United States Patent Application Publication US 2007/0192889 A1 - sequence listing, part 5

SEQ ID NO: 11375 - DNA, 571 bp, Oryza sativa
  Clone ID: TFbOSC7812j.C1.o1.gp
aaagacgataaacattttatcatttttattgatgatttacggggtctatacacaacgaataacacggtagtgcattttacactaccagctttatctctaacaaggcccttgatgttccttttgtcgaatcggtaattgatttttcttcacgaagatctaatgatcagaagcgttagttaagatcaacttgtgcaagcaaaacaatgcattaaatagtgttaagctgttgagcatcttgaaaactactttagtattcctctaacaaaattttccgcagtaacacctgtagaatcatactgtggctgcgaggcaaattctgcttgcacaaaaagaagcctgttaactgggcactaaccatcaagcaccactctacaatgatgaaaaggtttgttcgatccaatcagatagcctccgaatttttttggtcatatcagtgctctttgagaaataagactgggcatttgcaagcatcacagtcgcatcatgtcgaatagcttccagagttctgtagtaattgttctcaagccttatcctaatcacctcaatggaaaactggacaggaaacctaggt

SEQ ID NO: 11376 - DNA, 1551 bp, Oryza sativa
  Clone ID: TFbOSC400755j.C1.o21.fg
atggccttggcacagccaacattgacacttacccagcgctgtgggcctgcgagatatggtgagagcttgcctctatctgaatcttctggccctgaaaagaagctaaaattatttttctttgtcaagaccaaaaagtatttattcaaaccaaacactatgaccacacaagcttgtaagaagagaagagcagtttatataagcagtgaatcagaagactctggtacagactctgaggttgagggaagcaaactctccaaaaaagatggggtcacgtcagtctatacatgtggtcaccagccaacctctaagaataaggttgatccgatgaatactagcaagtcaaggcagtgtggaagtattctgaagaagctcatggatcacaaaagtggatggatttttaatacaccagttgatccagtggtatatggaattcctgattactttgatgttattcgcaatccgatggacttgggtactgttaaaaggaaactcacaagcaagcaatattccaacccttatgagtttgcagcagatgtgaggctaacattctcgaatgcgatgaagtataatcctccaggaaatgatgtccacggaatagctgatcaattgaacaaaatatttgattcggaatggaaattattggaaaggaaatggaaagacagaaatttggtacaagagcagccatcactgaaggtattaaaggctcagcctgctgttaccccaaaacctgtgctacctaagggggtgactgcaggcacaaattcagctgtgagcaagacactggcaactgcattatcctccaaagtaaaaattaaattttctgtgcgaggctctgagctgacctcttccaaagacacgcctttgcaagcagttggcagaagagacggcacaattaaccaatctctcccttgcaccaaggacaatgctaagacaccaaggatacaatcaagtgaggacagatctgaatcaactgaagaggaatatttgcctgaagaacctttatcaccaagcaaggctcttcgtgcagcaatgctcaagagtcgttttgctggtacaattgtcaaggcgcagcagaaagcacttctggatcatgggaagaaaatagaccctgcgaaattgcagttagaaaaggagaggctggaaaaaaggcagcaagaagagaaagcaagaattgaggcccaggtgaaggcggctgaagctgctgcacaattaaagctagacgaagaaatgaggatgaagagggagcaggaaagacgagcagcacgcctggcactacacatgatgaagaagactgttgatattgacaacagtgacttccttaaggacctggaaaacttaagcaaaaagtgggagctgaatccccctggcaaacttattgttgattttgtcgacgggatcgatctaccacctggcttagggagtccgctagagaggcttggccttttcatgaagaaggatcttgaggaagaggtcgaacatgaaatggaggacagtgtatcaccatctacggagatcgacgtggaggaaggagagatcagcttctgtcaatag

SEQ ID NO: 11377 - DNA, 300 bp, Oryza sativa
  Clone ID: TFbOSC11395j.C1.o1.fg
aatatgaatgagcatcctgatgcttggccattcaaagagccagtggattcacgtgatgttcctgactattatgacattatcaaagatcctattgatttgaagacaatgtcaaaaagagttgagtctgagcagtattatgtgacgctagagatgtttgtagctgacatgaagagaatgttcagcaatgcaaaaacttataactctcccgatacaatctattacaagtgtgcctcacggctcgagagcttcttctcaaacaaagtagcatctcagcttgcccaagcctcaacgaagaactga

SEQ ID NO: 11378 - DNA, 2376 bp, Oryza sativa
  Clone ID: TFbOSC401282j.C1.o16.fg
atggggaagacgcagaagttctccaaggggcacccgctcggcttcgtgccggattaccggcacggcgtggagacggtgggggagtcgaagggctgtatcgggagcccggagcggatcgtatcggggagctcgtgtgctgtgccgaagaggaaatgcggaatcctgaagacagaggatggaggggagcttccggggttcaatgtgccgcgggacgtcttcatgctgccgaggatgtcgccttcggataaaaaggacctcgagatgaggctccgcaaggagcttgagcaggttaaggccctacagagtaggctgtttttgaggccggctgcggtgagcatgaatggcggggcggcgtcagcttctggagacgtagttgcaaagagaaacgatgcgaagcttaaacggagcaattcagtgcagtctggcagaggagtgccaccatcagcagccacacctgtggtcaggtctgcaaactacgcagaagcttttaaacaatgtggcaaccttctgaagaacctcttcaagcatcagtgggctggtccgttccttgcgccggttgatgttgtacagttgaacattcctgattattttgacataatcaagaagccaatggatttgggtaccatcgagaaaaagttgaatgcaggcatgtactctacaccttgggattttgctgcagatgtgaggcttacttttgacaatgccgtgacttataacccagtcggtaatgacgtgaatttaatgggcaaaactttgaaatgtatttttgaaactagatggaagtttatcgaaaagaagcttccttcactagatgataaattctctgtgagaagagagccatcacaaaagggtgcagttaagaaagataccattgagaaagattacccttctgagaaaaagcactcgacaaaaggtgtacacaagaaagatatgtttaaaaaagaggatgcttcaactaagccagctttgcaaccaaagaagagaaaagcttctcccttggttcagggttctcttgaaatacctgtagtagaagctgataaggtcattgatgatgctcaagtggtacagccttctaaggtgattgatgatgcccaagtggtgcaggcttttaaggtgattgatgatgctcaagtggtacaggcttctaaggagattatgacggacagacaaaagtatgagctaagcgtaagacttcaatcatatggtgggttgattccaaatcatgtagttgatttcataaggagccaccttcctgatgataatgagggtgatgaagatgagttagagcttgacatgaatgtcctaagtgatagtacattgtttgaacttcagaagcttcttgatgactatgatagggtaaatcagtcaggaaaccctacaaaagatgagcatcgtgaggttgagtttgaaagtgaatatgggcttagcaactcatcgatgcatcatgaagaaggtaatgagctcgttgaagaagatgttgatattggtgggaatgatcttccacctttgacgtatcctcctgcagtatttgaaagtgaaactgcagaaagaagcagcaagcatagcacttctagcagttctagtagtgattcagaatcatcctccagtgattcagattcaagtagctcttctggaagcgatctggatgtcaatgttcctccatcaacaagtggggccaaggacaacacgcaatctgcggttaggttggatcaggaaaacgatccactgagctcgaccaatctaccacaacaaagtagtgatcctgtacctatttctgccgaagatgagggggagaatgtgtctgagaaacaggtcccccctgcaaagcaataccgagctgctgttttgttaaaccgctttgctgatacaatttttaaggctcgtgagaaaactcttgatcaggtcgcgaaaaaggatcctgagaaacttcaacacgacatggaggagcttgaaaggttacgaagagaagagagagctcggatacaagctgaggcaaaagcagctgaagatgctcgcaagagagctgaggcagcagcagctgctgaggctgctgcagaagctaaacgccaaagagaacgtgagagggaagcggctcgtaaagccttgcaacagatggagaaaactgtagacatcaatgaagggaacctctttttgaaagatcttgaaatgcttggaactgttacatcaggtgaacagtttcccagctcggttggtgagacgagtccaactcatacgcctgaaggccttggatttcagctaggtagcaaccctttagaacagcttggtttgtatatgaaaaatgatgatgaagaggatgaggaaggtgagtctgcagatgaaccaacgattgatgttgaggagggcgaaatagattga

SEQ ID NO: 11379 - DNA, 1773 bp, Oryza sativa
  Clone ID: TFbOSC400140j.C1.o16.fg
atgaagcgcaagcgtgggcgtaagatgggcaagaagggcaagttgaaagcttccatcacagcggatgcttctccaatgtccccgtccagcccgagcaccgtggatgcttcctcaaagtccccctccagcccaagcacagaggagaacggcaccagcccagcgcatcatcaggcagataatgcgcctgttattgctccgccaccagtgcctgaaccagcacctcctgagccggagaagccagccgtgtctactgacgtacagaatgctaagccaaaagtctatagccgagtcaggttgaagttcaaatctgccaaagtgttggagacgcaccagggtccttcagaagcaaaagcacctgttgatggtggtggtggtaaacctgcaagtgctgctcctgaagcgagcaaagaagttgcggagaaggctattgtatcaccagacggacagaaagatgcgcaggcagcagaattgagtggttctgataaggataagatggcaagaaaagtagcaagcataaatatcaagtctgtaggattatcttcggtagaagataaaaatcaggacaggaaagctgattcagtcagtgaacctcttccaagcaagcaggaaaccgtattggaaaatgtagaaagcgagactgcattggagccgagaagctcacaagagttggaggtaaagcaggctacgccagaacgtcagcgagatgacagagagctaactgctgcacttgaagctattaagaaagtcatgaagatggatgcagctgagccgttcaacacaccggtggaccctgttgctctaggaatacctgattattttgatattattgatactcctatggattttggcacaatatgtcaaaatctagaacgtggtgataagtatatgaactcggaggatgtgtataaggacgtgcaatttatatgggataattgtaccaagtacaacagtaaaggtgattacattatagagcttatgaaacgggtgaagaagggcttcatgaaaaactggctggcagcaggcttgtattctgatgcgcaggagaatggtggcaatgataacacaggcgatgaggatgtcaaaggttcaaaaggcaagtctaagcaaaaacggcggcgcctagggaatgatcgacacaaaaatgactgtgcatgtgctgtttgtcaagttacacgccgcaaaaaggaaaaggatgaaatcttggctgtcattgaaaacgatacagctgcagtgaatagtaacatttctgaccagcaaatcatggaggtagactcaggcattaataacgctggtagtcatgacactacctctagtcaggagcaaccaccacaaactgatatgtacagaagaacagtggtagcagatgattcagggactctgatagaaaatcatgtgaaattcttcaacaaccagccactgccacatgattatgaggatgaaggctccagaccatactttgacgaaaaagaagaggtagactatacggatttgatcagtcaggaggaacatacatccagtcagcccaatgatggctccgaaattgcacaacaccaacataaggagccaacagaaacaagccaggagattgaaatggaggattatcccatacagaaggagaaccaatcattcttgcaactctgcgcacggcttttccccagcaaccagagttctgttttcaggggacgccattctctgttccgacagcaacagcggcaggtttcaatgaagggaagccctctgcatgcggccataacagcgataatgaaacggtag

SEQ ID NO: 11380 - DNA, 1035 bp, Oryza sativa
  Clone ID: TFbOSC34011j.C1.o25.fg
atggcggcggcggagacggccgccactgccgccgccgccggggagagggccccggggacggaggtggacgcgttccggcgccaggtcgaggacctcgtctccaagaccgaccagctggagaggagggtgaatgaagtggtgggattctacgacgggaagaaacatggcagtggtggccggaaggctggtcgcaaggatagcagcctttccaaagggatgcctgatcttatgcgccagtttggcacgattgtgcgccagatcacatctcatgaatgggccgagccatttctcaagccggttgatgtggtaggccttcagcttgatgactattacaagattatcaccaaacctatggatttttcgaccatacaaaagaaaatggaagggaaagatgacaacaagtataacaatgtccgagaaatatattcggatgttagattaatttttgccaatgcaatgaagtacaatgatgaacgacatgatgttcatataatggcgaaatcattgcttgagaaatttgaagagaaatggctccagcttcttcctaaagttgaaaatgaggaaaggaaacaaaaggatgaggaatccaacggtgttccaaaagtgaacatttctccagaagaagctattgcaaaactagcaaaagatactgacaatgagctgattgaaatcaacaagcagttggaggagcttcggcaaatggtggtccagaaatgccggaaaatgactacatatgagaaaagaaaactgggtgcaggtctctgccacctgtctccagaagagcttactaaggcattggagatggttgcacaagacaaccctagcttcgaagctaaaggagacgaactggaacttgatatggatgctcagagtgagacaaccctctggaggttgaaattctttgtgagggaagcattggaacgacaggccaacgtcgcttctggcaggactgatgaaaatgcgaaaagaaagagggagatatgcaatgctctggccagaactgcttcaaaaagagtcaagcagcaacctaattag

SEQ ID NO: 11381 - DNA, 1950 bp, Oryza sativa
  Clone ID: TFbOSC407196j.C1.o12.gm
atttctatgcagccacttctcgtctccagccacgcgtggtccttcacctccctgtgcgagggcgccaggataggaaggagaaggaagatgaagcgcaagcgtgggcgtaagatgggcaagaagggcaagtcgaaagcttccaccacagcggatgcttctccaatgtccctgtccagcccgagcaccgtggatgcttcctcaaaatccccctccagcccaagcacagaggagaacggcaccagcccagcgcatcatcaggcagataatgcgcctgttattgctccgccaccagtgcctgaaccggcacctcctgagccggagaagccagccgtgtctactgacgtacagaatgctaagccaaaagtctatagccgagtcaggttgaagttcaaatctgccaaagtgttggagacgcaccagggtccttcagaagcaaaagcacctgttgatggtggtggtggtaaacctgcaagtgctgcgcctgaagcgagcaaagaagttgttgcggagaaggctattgtatcaccagacggacagaaagatgcgcaggcagcagaattgagtggttctgataaggataaggtggcaagaaaagtagcaagcataaagatcaagtctgtaggattatcttcggtagaagataaaaaccaggacaggaaagctgattcagtcagtgaacctcttccaagcaagcaggaaactgtattggaaaatgtagaaagcgagactgcattggagctgagaagctcacaagagttggaggctattaagaaagtcatgaagatggatgcagctgagccgttcaacacaccggtggatcctgttgctctaggaatacctgattattttgatattattgatactcctatggattttggcacaatatgtcaaaatctagaacgtggtgataagtatatgaactcagaggatgtgtataaggacgtgcaatttatatgggataattgtaccaagtacaacagtaaaggtgattacattatagagcttatgaaacgggtgaagaagggcttcatgaaaaactggctggcagcaggcttgtattctgatgtgcaggagaatgccgccggcgaggaggatggcgcgacgggcggccgcggccgtgtcgggatcctcgtcaacgtcgcggcgaacccgtggctcagcgaggtcgcgctccggcgggtcggcacgtcagcggcgatggtggaccggctggtggagatgctcacctggaacggtcgtgacaaacccgcggctcggcgaggccgcgctccgacggcaagaagcgggacgcgctccggcgccatcgagtcggtgtcgtcgctgcttttcgtcgccgacgaggagtgcaacctcctaggcctcctctttgccatgcaggttggacctgggcacctggctagcttgcacggtggtcggcggacagttgccggcgtcgaccggcggcttgggggccagcgacgtgcatcggctctcaggctcggcggcgtgcggctagcgacgaacggcggagggtggccggcgacgagcggcggcacggcaaccggagtgcggcgagcggcggtcggcggcggaagcgtccttcttgtttttttgttcggtggcggtggccgcgtggggcgtcgcctgccgccaccgccgcgcctccgcttccgctccgctcgcacgccgcctccgccggccgcatcctcccgtccgcgctctccgccgcggagagatcgagtgccgctgcatcctcccgtccgcccctttgccaactccctcctcgccgcatcctcttcgatggagagccagacgaggccaacgggcgcgaggcgggagaggagatccggccgacgacgcggtgacggccctcgccggccgccgctcgtgcagctgctgcccctccgcctgcgcccacccgcacgctgctccgccgtccgcggcccatggagaagagagagggagaggtga

SEQ ID NO: 11382 - DNA, 564 bp, Oryza sativa
  Clone ID: TFbOSC405157j.C1.o1.fg
atggagacacttgtgcaagggcggtggcgccggccggtgcattcgctccggcaccttcaccgtcggcggctacgactggtgcatctgcttctacccggagggccagggcggggcggcggcgaccgggaacacgtctcggtcaagctcaggctggtcacccgctgcgccacggccaccgcgttctacgagctccgcctgctcgaccaggacaccggacgcgccgccgacgttgaccgggcctccggcgcgcccagggtgttcgcgtcgagcaatcccggcacagcgtgcttcggccgccgcgcgttcatggagcggagcaagctggaggcgtcgcccgcgtgcctgcgcggcgacagcgtcgtcatcgactgcgccgtccgagtcgtcgtccacgaccccgtcgtctccgccgtgcggcgccgcgaggcgccggacgacgtcccgccgtcgaacatactccggcagctggtggcgcaggtggagtccgagggcgccgacgtgacgttccccgtgcagggggagacgttcacggcgcaccgcctgatgctcgccgcgcggtcgccg

SEQ ID NO: 11383 - DNA, 1428 bp, Oryza sativa
  Clone ID: TFbOSC400305j.C1.o20.gm
atgcgttgctacgggaggaaaagaccgtggaagcgggcgtcgttctatggcagagtccgtaatgtcaacgaaggagtaatcgtggcggagctggtggagcaagacggcgtcaggagctcttgccggcatggcaaggaaaagcttgctggcggcagcaagatgacgacgcacggcttgggagggacagagcggcatggaatgaaacaattcacccaaggccacgacagcgagcctcaaccttgcgtggcccacgagaagcaggcgcaaggccggttcagggtgacggctaggttcttggaacttgaaagacagaaactgaagaggatggggtccaagaagaggatgtcaaggtacgccaagaagcacgaggaggccacgctcaagttcgacgtcgtcgggtacagcctcaacgagggcatggccgccggcgagttcatccggtcgccggccttcgccgtcggggctacgactgggcaatccgcttctaccccaacggcgccacgatgccctaagcctcagcgctcaaatccgatgcaaagatatcgtctggagaaggaagaatcaggctacatcaaggacgattgcctgaaaatcgaattgcggcgcacaagagcgtgctcgcccgtcttcaaggcggagctctatggagggatgaaggagagggaggcccgtagcgtgaccgtggatgacacgcagcctgacgttttcagggctctcccacatttcatgtacaccgactcgttgcccgacatggacggcgttgaagatgccgactatgttgaaatgatcaggcttctactcgtggccgcggatagatatgccatggataggatgaagttgctgtgcgaaagcgtcctcgatgatttacttgatgcggagacagttggaactacgctagctttagctgatcagcatagctgcaacaaccttaaggatgtttgcgttaaatttatggctacttcaaaagggatggatgctgtaatggcaactgaaggctatgataatctcaagagaaattgtccttatgtcttgatagatgtgttggagaagcatgccagcgtagcaaactcgggtgaaaacgttgtggacccacttgttaatctctcactgcccttcatctcccctgcgttcatcgccggctcgccaccgccacccctcttctccaccgcgcggccgaccgtgccccatcgacaccggcgccgcctcgtggccgaccaccgccgggaaccgttccgcagccgccaccccatcgttacggcagacggggaggaggacgagcaccatgttgagcttcagcgtctcggcgatgccctggtcggccacgaggcggcgccggcgtcgatggggcggtcgcagccacgcggtagagagaagaggggcggcggtggcgagccggcgatgaacgcgaggggagatgaagggcagtga

SEQ ID NO: 11384 - DNA, 471 bp, Oryza sativa
  Clone ID: TFbOSC400049j.C1.o21.fg
atggagccacaggtgttcaaatccttgctcactttcatttacactgactcgttgcctgagttggaggacgaagaggaaactgaatccgatcgagatgaagaagaagatcaggagagtgaagcagatggagtacacggagaagattacgatgacgatgacgatgatgatgatgatgacaatggtggtgatgagatgtggtcaccattgctcgtagcggcagataggtacgatctccagaggctgaagctgatatgcgcgaagaagctgtgcgagcggatcgatgcgagcacggtggccgataatcttgggctcgctgagaagcagcattgccgtctgctgaaggaggcgtgcttggagttcctcaaagctccggcgaatttgaaggttgtactggcgagtgacggcttggatcacataactgcaacctgcccctctgttctgaaggagctccttgctaagtttgcatcttaa

SEQ ID NO: 11385 - DNA, 834 bp, Oryza sativa
  Clone ID: TFbOSC415318j.C1.o6.fg
atgtccactcactccactgagcttgtcaagggctcgcatgagttcaccgtcgccggctacagcctgcagaagaggaacggcaccggacacttcgtcaggtccggctcattcgaggtcggtggatacagctgggcgatccgattctaccctgctggcagcacaaaggaagaagaaagacacgtgtccgtgttcctcgagctgggaagcactgtggtagagaaagttaccgcaaggttcagattccgcgtcaatggcgctaccgcgagctcgtggggccagtttaacgacttcacacttagcagcaaaacatgggggtaccagaaatttatggagatagaacccgtggagtcggagtacctgatcaacgactgcctgacgatgcactgcgacgtggaggttgtcaaggagttgaagaccggagcaaccatgagccgcttcatcacggtgccgccgccagccatctgctgtcatctcgagcagcttctggagagcaaggaaggctgcgacgtgacctttcaggtcgagcgcagcgactacgacgcgcacagggtggtgctctcggcgcggtcgccggtgttccgcgcccagttcttcggcccaatggcggacaccggcggcggagacaggcctactcaaactgtttttattcctgggaggaacattataggagtggttattctacatgagacgttgtatgaattacatcgtaaaggaattccaatgcattttaggaagcattctaataaatattggaaagttattgaagaaagaattgagaaaaaacttagtagttggaaagatagaattatcatcacaatggtaggttctcggtaa

SEQ ID NO: 11386 - DNA, 369 bp, Oryza sativa
  Clone ID: TFbOSC405123j.C1.o1.np
gccatggacgacctcgacgacgacgacgacgacaaggcgcatatgatcatgcaccttctcgaggccgccgaccggtacgacgtcgagaggctgaagctgatctgcgagctcatgctctgcaagagcatcgccgtggacaccgtcgcggcgacgctggcaatggcggatcagcaccattgccagaagctcaaggaggcgtgcatcgagttcttggccacctccaagaagatggaaggcgtcatggaaagccaagggtacgagaagatgaagctatcttgcccttctttcatggtggatttgtgggagataataggcaggaagaattataaagttttatccgattcatgacataaacaacaagtatttata

SEQ ID NO: 11387 - DNA, 1044 bp, Oryza sativa
  Clone ID: TFbOSC400964j.C1.o15.fg
atgtgcgagggtgtgcgggccgccggcgacgccgccgccgccgccgacgtcgacgtcatcacctcctccggccgccggaggatccccgcgcattccactgttcttgcgtcggcgtcgccggtgctggagagcatcctgcagcgccgcctgaagaaggagagggacgccgccgccggcggcggcaaggtccgcagggccgtcgtcctgatccgcggcgtcaccgacgacgccgcggccgccttcgtccgcctcctctacgccggcagcagtggtgatgaggaggagattgacgagaagagcgcggcgcagatgctggtgctggcgcacgcgtaccgggtgccgtggctgaagcggcggtgcgagggggcgatcgggtcgcggctcacggcggagtcggtggtggacacgatgcagctggcggcgctgtgcgacgcgccgcagctgcacctgcgctgcaccaggctgctcgccaaggagttcaaggccgtggagaagaccgaggcgtggcgattcctccaggagaacgacccctggctcgagctcgacatcctccagcgcctccacgacgccgacctgcggcggaggaagtggaggaggaagagggcggagcaaggggtctacgtggagctgagcgaggcgatggactgcctgagccacatctgcacggaggggtgcacggaggtcgggccggtggggcgtgcgccggcggcggcgccgtgcccggcgtacgcgacggcgtgccggggactgcagctgctgatccgccacttctcccggtgccaccgcaccagctgcccgcgctgccagcgcatgtggcagctgctccgcctccacgccgccctctgcgacctccccgacggccactgcaacacccctctctgcatgcagttcaggagaaaggaggaggagaaggcggcagcgaaggcgaaggcaaaggccggcgatgatgacgataagtgggggcttctggtgaagaaggtgagggttgccagggccatgtcttctctgggcaagaggaggcagatgagttgctcccagtgctga

SEQ ID NO: 11388 - DNA, 309 bp, Oryza sativa
  Clone ID: TFbOSC547j.C1.o8.fg
atggctcaacatctacttgctgcagcagacaagtatggcctgcataggttgaagatgatctgcttagaaatattaagtagccatattgatgccaactccgtggcaaccatcttggtgctagctgagaagcactattgctatggtctcaaggaggcatgctttgagttccttaactccttagcagtattgtccgcgattgcagcaagaggcaaggagagtgtgggtgcgacggccgacgccggggtgcgggggaatgcagagaacatgcaagttgcaagggatcaaggcactttattgattaatgattag

SEQ ID NO: 11389 - DNA, 1113 bp, Oryza sativa
  Clone ID: TFbOSC400305j.C1.o28.fg
atggggacagagccgctgccaatgtcaaggaagctgagcagtgggggcgggtggtttgatggtgaggatccagtggaggaaggagttcttggtgatgacgcagcaaaagccgacgcaggcggtgttggcgggggagaggagttgtattctgctgctagtgcatgtgttaacataacaagaaatctctccctccctatcaaaacaaatccagaacatgatatatcttcatgtgagcaaggtctcttaagtgaaccgcatggaaaaatacccttcctcttctcagagatattttctcatcacttcaaactttttaactcctctccactctctcccttccttcctcctcctctcctctcctttgctctctccttttctcctctcttcgcctcctcaccgagtgcgacgagggacgactacggcaccaacgatggcgggcaagcgggcgggcggccggcgggtggtggcggcgggagcgggcggccggcgagcggatctgccacccccgtcctcgagagtgatggcggcgcgcggatctgctttacccaacctcaggagtgtcgacagcgggagtgggagaccagcgcgtggatccgccgtctccccgccaacggtgacgagcagatctgcagcccccgccctcgtagcgaccgcggagtgcggatttgccgcccccaacctcgggagcaggcgacatatttggcaccgccgccctcgggagcgatcacagccacggcgacgccgggatggatctaccaacaacaagagcaacttgaacaagtgatggattcgtcgatgaaccctagcccattgatgtggtttgataacacaactcataacttgcttcgtgctgctgactgttatgggctggaaaggctgaaggccatctgcgagacgaagctttgcctggatattgatgtgaagagcgtgatggttatattgcttctcgctgatcagcaccagtgcgacatgctcaaacaggcatgcttctccttcattgccaatccgaacacactggaaacggtgactggaacaccagagtatcatcagtttaagagtttatacccaattctactaatcgaggttctggagaatgtttgcatacttcgcaaatga

SEQ ID NO: 11390 - DNA, 2394 bp, Oryza sativa
  Clone ID: TFbOSC900178j.C1.o15.gm
atgggtgacctttcttcatctgactcgctacttggatgggccaatgatgagctggacctatttgcttcatatggagcatccctgttcccgaacaccaggaagccgctcatttgttctgaacatcagcctatccagtcggttcctcctagttgcagagtccccaatgttgctattgtctatgtgctggcggacgtccccggcggcgtcgagctggcggcgcgggcggcagccccggcgccggccgcggcgatcggcgaggccgtgcgggtcatggagcgcgtccgcaggcggatccgggtccggatcggggtcggagaggcgggcggcgcgggcgcggcgggcggtgaagagctcggaggcgctcgtcatggcggggtggcggcggtgagaaaagaacagcggaaaaagggcaagtggggcagcagcaagcacaagccattcgggaccgattccatccacaagccgccgtacgaattgccattgtgtggcgtccagccaccacgcgggtccaatggcaaccgcggctcaatccggagggtgccgcacctgcgtcactcactgcacccgatactttcgcaagaactcccaagcgatattaccatcaaagtcgacgatgccgccttcaacctgcacaagcttccattggcatccaggtgcggctacatcaagaagcaggtgtcaggagtcggcggcaacaaggcgacgcacctggagatcgccggcatgcccggcggctccaagtcgttcgagctcgtcgtcaagttctgctacggcgtcaacttcgagatcaccgtggacaacgtcgccatgctgcgttgcgccggcgagcacctcgagatgaccgaggagtgcaggccgggcaacctggtcggcaggacggaggcctacctggaggaggtggcgctggcgagcctcgagggcgcggtcgccgtgctccgcaaggccgaggagctcctcccggcgtcggaggagaaggcgcggctcgtcgccaggtgcatcgacgccgtcgcgtccatcgtctgcggcggcgacggccagttcagcatgtcgctgggcacccccggcggcggcggcggcggcggctacaatggcgtgggcgccgcggcgtcgagggaggtcgacgactggtgcgccgacgagctgacggcgctgcggatcgacacgttccagcgcgtcatgatcgcgatgaaggcgaggggcttcaagggcatcgccatggggacactcatcatgctctacgcccagaaatctcttcgacggctggacatgcacgggagggacaggaagaagatgggcgcgaggcaggagcacgagaagcgggtggtgctcgagacgatcgtgagcctgctgccgagggagaggaacactctgtcggtgagcttcctgtcgatgctgctccgcgccgcgatccacctcgacacgacgctggcgtgccggctcgacctcgagaagcgaatggcggcgcagctcggccaggccgtgctcgacgacctcctcatcccgtcctcctcgcccgacgccgccgccgccacaacggcctacgacatcgacgccgtgcagaggatcctggccggctacctcgacctggactacaccacggatccgccgccacggctggactacaccaccgacgacgacttcagctcggcggcgtcgccgccgcacagcgacgtcgcccaggtcggcaggctcatggatagctacctcgccgagatcgcctccgacgagaacctgtccgttgacaagttcaccgccctcgccgagctcatcccggagcgcgccaggttcaacgaggacggcatgtaccgcgccattgacatctacttgaaggcgcatccgagtctggccgagggcgagaggaagaaggtgtgcagggcgatggactgccagaagctgtcgcgcgaggcgtgcgcgcacgcggcgcagaacgaccgcctgccggtgcagacggtggtgcaggtgctgtaccacgagcagcggcgcctccgcgcgccatcgcagccgccgagcgccgcgccgtcgtacgccggcggcgagtcgccggcgctgtcgtacaggccgacgccgagcttcaacggccggcaccggccgggcgttcccgacgaggtgtcccggctgcagcgcgagaacgacgagctcaggatggagctgctccggatgaagatgcgcctgagagacccatccgtggcgttctccgcaggaggagtcccgccgtccggtaggccgccgctgccgaagaagccgggcggcggcggcggcggaagcagcggcggattcatgaacagcatgtccaagaagctcgggaggctcaacccgttcttgcgatcggacgtgctcggcggcggcagggtgcggacgaagccgcccaaggatcggaggcactccatttcttga

SEQ ID NO: 11391 - DNA, 2661 bp, Oryza sativa
  Clone ID: TFbOSC404491j.C1.o1.fg
atgaggaagctcttcttctccgagttgacctcctgcaaggagaccaagctccactccgcgccccactcatggcttcccctcgagaaagggaagctctccaagttcgccggccactccacctcctccatagaatcgctgatgaaaatgccggagccggtggttcttccccacttcaagcctgcggattatgtggacatattggcccagattcatgaggagctggagtcttgccctcctgatgagaagtcgtgcctgtacctgctccagttccaggttttccgcggcctcggcgaggtgaagctgtcgcggaggagcctccagtccgcgtgggagaaggcgagcacgatacacgagaagctgatattcggggcatggctcaagtatgagaagaaaggggaggagccgatatccgacctcctcagctcgtgtggcaagtgctctcaggagttcaagctgctggatttcgtgtcgcagatctccaccgggtcgcatgagataagctatgatgatgagtcggatgtgttttggggctctccggtggtacatttccggataagagatgatatgattgcatgcgatcggcgaaagcttgctgctttgtcgactccgctgtatgcaatgcttaacggtggctttcgggaatcacatcttgaggttattgatatgtctcggaatggcatctcctcgattggtatgcgagcaatcagtaaattcagcttgacaggaaggttaccgtatttatcagcagatgctattttggaaatgcttgattttgctaataagttttgctgcaatggcctcaaggatgcttgtgagcgaaagcttgcttctttcatttgctcgaggcaggatgctatagacttcatggagtgtgctcttgagctgggttgttccatccttgctgctgcatgcttgcaggtgctcctgaatgagcttccagagtgcttgaatgatgaacaagtggttaggatattctcctgtgcaagtaagcagcagcgatccacaatggctggaaatgcttctttctccctatattgccttcttagtgaagtctccatgagcatcaacgcgacatcggatgtcacggtgaccttcttggaaaaattggtggattcagcatcagattctagacagaagcagttggccttgcatcagctggcgtgcacaagacttctaaggaaagattatgctgaagccgagcgcctgttcaatgccgcctttaccgctggacatctctattcagtagtgggtttggctagactggcctctatgaggggtaataagcatttttctctcaagttgcttgattctgtcatgtcatctcgctggccacttggatggatgtaccaagagagagcactatatttggagggtgataacaagttggaaaatcttaacaaggccactgagttggatcctacccttacatacccctacatgtttcgagctgcatctttgatgaaaagacaaagcgttgaagctgcccttatggagattaaccggatcctgggatttaagcttgttctggaatgcttagagctaaggttctgttgctatcttgcacttgaggaccatagagctgctttatgtgatgtccaggcaatcctcactcttgctccagattatcgtatgattggtggtcgggtgtctgcaaagcagctgcgtatgcttgtgatggagaatgttgagcagtggacaactgctgactgttggatgcagctttatgatcgttggtcatctgtggatgatataggatccctctcggtcatatatcaaatgctggagtcagatgctgctaaaggagttctctactttaggcaatctttgcttcttctcagattaaattgtcctgaggctgcaatgcgcagtttgcagctagctcgtgaacatgctgcaagccaacatgaacagcttgtttatgagggatggatattgtatgataccggccactgtgaggagggactgcagaaagcagaagcatccatcgcaatacaaagatcatttgaagcattctttctgaaagcttatgctttggctgattcgagtcttgacccttcaacttcagcaacagttgtatcacttcttgaagatgcattacgctgcccctctgatagactacggaagggtcaggctctgaacaaccttgggagtgtttatgtggattgcgggaagcttgacctggcagctgaatgctacatcaatgccctaaagattggtcataccagagctcatcaaggccttgccagggtccatttcctcagaaacagcagaactggtgcatatgaggaaatgaccaagctaatagagaaggccaggagcaacgcatcagcttatgagaagaggtcggagtactgtgatcgtgagctaacaaaatcagacctgcagatggtgaccaaactagaccctctgcgtgtatacccctacagataccgtgctgctgtgctgatggacaaccacaaagagaaggaggccatcgcggagctgacaaaagcaatcgccttcaaggcggacctgaacctgctccacctgcgagccgccttccacgagcatgtcggcgacatctcgagtgcactccgggactgccgcgcagcgctctccgtggatcctaaccaccaggagatgctcgagcttcatcaccgggtgaacagccaagaaccctga

SEQ ID NO: 11392 - DNA, 1734 bp, Oryza sativa
  Clone ID: TFbOSC402104j.C1.o34.gm
atgatgacccgtcgccaggatgcctactaccgctacccaaccacgtcgaccatcgtcgcgtcggcgccaatgcccaccggccaccacgtcctcaggatcgacggctactccctcaccaaggccaagttcgccgccggcgaagaatgcgacgagtcgtgcagcttcgtcgtcggcggccacgcctggcgcatcaggtactaccccaacggcgccgtcgtctccggctccggtggcttcgtatccctcatgctctcccttgatcatcagcccggcgccgcattgccggccgccgtcgtcaaggcgcggttcgcgttcagcttgctcgacatggacggcgagccggtgccgtcgcgcacctacgcgagcgacggcgtggtcagcttcagcgctaattcgtcgagcacgttcggggcggagaggttcatcggccacggcgagctcgaggcgtcggggcacctcaccggcgaccgcctcgccttccggtgcgatgtcaccgtcgtgaagcgcgacgggcctccgacgatgtcgaccctctgcccggtggagcacgacatgttcagatgcctgctcgacaccggggacgacgcggacgtcgcgttcagggccgccggcggcgagacgatcgccgcgcataggcgggtgctcgagcgacgggcaccggagctggccaagctctgtcgtcgtcgcggcggcgcctcctgcttcatgggactcgtcgggaggcacatcgacgtcggcgacatggacgccgctgcgttcaaggctctgcttcacttcgtgtacaccgacacgctgccggagacgatggccccgcgagaggtgccggccatggcgccgcagctgatcgcggcagcgcgtaaatacggcttggactgggagaggttgaggctcctctgtgaggacaaggcgtggggatggcgcgtcgacgacacgagcatggacacgacggcggcggctgctccggctaccggcgatgatccgaagcgtagccagcgaccaccgcgcgcctccttcactgccgccgccgcctcactgttccgtcacccggcctcgccggctggccgaaaagtgtcaacgacgccggcgaggccccgccggctggcccccttcccctcccctcctttgcctcaagccggcggcggtgcgctgtatgtcgtcttccccgtcgccggcggcggggcgccatcaccggctacctcctcctaccactctttcagctttgcccccgtcgcctcaaccggcccgccgcccgctcccgaccccgcggggggtaatgctttatattttagaatggtgggagctaaggctacactttactgctataagatcggcgtcttctctccacacgttctatccataagtgtcgtggcgacgtatactcagcttctcttcctcgctcgaaagggtgtcgccatgcgcgcgttcgagagcttcaccggtcgtcacgacgaccgccgcctcgccttcatcaaggacggcgtcgagctgcgagccgggctgccaccagggccggctgggacagtaaggacggtgcgactaccttcattttttttccacaccgaaccactaaagagtcagtgccggccctggccaccgccgccacccgtcggcgaccctgagtccggcggcctgcgccgccgcttgctctccttgctggacgggacggacgtcaccttcagggtcggcggcgaggcgttcgccgcgcatagctccgtggtcgccgcgtggtcgccg

SEQ ID NO: 11393 - DNA, 1068 bp, Oryza sativa
  Clone ID: TFbOSC401213j.C1.o7.fg
atgacgcagtgggcggatctggacgcgctccggccggcggtggccgccgacgtgcaggtcgtcacgtcggacgggaagagcatcgccgcccattcgttcgttcttggcacggcgtcgccggtgctggagcggatgatcgagcgggcacggcgggggtggaacgccgagtgcaccatccgcgtcctcggcgtctcctccgacgccgtcttcgccttcctccagttgctctacgcttccagggtgacgccggaggacgaggaggtggtgaccgcgcacgggccgcagctgctggcgctgtcgcacgcgtacaggatcgggtggctgaagcgcgcggcggaggcgtccgtgacggcgcggctcacgccggagcacgcggtggacatgctgaagctcgccaggctctgcgacgcgccgcggctgtacctgcggtgcgcgcgcctcgcggccaaggacttcgccgccgtcgagcggtccgagggctggcgcttcgcgcgccgccacgacgccgcgctggagctcgagatcctccagctcctcgaggacgccgaccagcggagggagcggtgggcgcgggagagggcgtcccgggaggcgtaccgccagctcggcgaggccatggactccctcgagcacatcttctccgacgacggctgctcctgcgccgacgccgacgccgacgccgacaccgacgcgccgccgtgccgcggcctgcgcctgctgatgcggcactacgcgacgtgcggcgcccgcaaggccgcgccgggcggcgggtgcacgcgctgcaagcgcatggtgcagctgttccgcctccacgcctccgtctgcgaccgggcggcgccgcacgacgacggcgaccgcccatgccgcgtgccgctgtgcagtcatttcaagggcaagatgcgggcggagaaggcggacaagacgtggcggctgctggtgaagaaggtgacgagggcgagggcgatgtcgcggctggcggcggggcgcgagcgcgaggtggtgccggaggtggtggccgcgtcgtgggcgaggtacagcagcagcggaggggccgccaggttgagatga

SEQ ID NO: 11394 - DNA, 762 bp, Oryza sativa
  Clone ID: TFbOSC401965j.C1.o36.fg
atgaagcaaatatctccgccccatcatgattttaatcctgtgtccgccactggttgcaaggactacatctccttctaccttttcctcgaagacgcggtcgatgagcctgtgatgggacaggttacatttagcttactcgaccaagacgggaagccggtgctgtcacgcacccataccacccgaatgtttagcttctcacttaatagctcctttggcttccacaaattcattagaagggaagatatggagcaatcgaaacatctcaaggacgactgcttcgccgtcagtgtccatttagttatcaccaagggagcaccttccgtcaaggtaccaccatcgaacttgcacagtcattacggtgatctcctctcaagtaaacagggcgccgacgttgagttcatgatgttcgaggctctacttatctttatctacacggatatgttgccaaagatggaccaagaagacgaggtagcaatggctcaacatctgctcgtcgcatcggatacgtatggactgcagaggctcatgttgatctgcgaagatagattatgcaaccatatcaatacagactccctggcaatcatgttggtgttggccgagaagcaccactgcatacgtcttaaggaggtgtgctttgagttcctcagctcctcaacggctctagtcgagttcatggaatcaagtgactttctgtattttatacggagctgtcctactgttttgaaggatctgatttacaatgtcgctgctcatggaaaatga

SEQ ID NO: 11395 - DNA, 1914 bp, Oryza sativa
  Clone ID: TFbOSC9665j.C1.o1.fg
atggcggcgtcgtcgtctgcggcggcttcaaccagctgcgccgtcgcagccgaagctaatggctcaacgtcgacgatcgtcgcgacgacgaagcccaccggccaccacatcctcaagatcgacggctactctcggactaaggccatggtcgccgccggcgacagcatcgactcctcccgcttccacgccggcgatcacgcgtggcgcatcaggtactaccccaatggcaccgaccgcagcaaccagaatcctgacgccatatccgtcatgctcgagctgcaggacgccgccgccggccgcaataatggcgccgccgccgccgccgccgtcaaggcgaagttcgtgttcaggctgctcaacaaggacggcgagccggtgccgtcgcgcacctaccgcagcagcgtgcacagcttcccttcctccgacggattcaagaattggggattcctccgattcatcacccacggcgacctcgagaagtcggggcacctcgccgacgacggcttcgccgtccggtgcgacgtcaccgtcatgggcggcatcgagctccgcgtcgagccggcgtcgtccctcgccgtgccggagccggacatgcaccgccacctcggccgccttctctccgccggggacggcgccgacgtcacgttcagggtggccggcggcgaggcgttcaccgcgcacaggtgcgtgctcgccgcccggtcgccggtgttcaaggccgagctatatagccgtggcggattcctaaggcccgccgccgccggaaggcccggaacacgcgtcatcgacgtcgacgacatggacgccggagcgttcggggcgctgctgcacttcgtgtacaccgacacgctgccggagatggcgtcggcggacgtgccggccatggcgcggcagctgatcgcggcggctgacaagtacaaagtggagaggctgaagctggtctgcgaggacaaattaagcaggcgtgtcgtcgccgacgacactagcatgacgccgacgccgatgtcgacgccgacgacgatgactgattcgacgacgaccgcatgccggtggggggcgaaatttcaaaccctgcgccagcgtccatgtcaacgcgagtgtcaagatcagctgctcgatctcgccggcgagcgggtggcacggtacagccaatccggcgacaagtgttccatctccaagaagaccgatcgatgggtttgcaatagcttcatcaagagggatgagctggagaagtccggccatgtcgtcggcaaccgcttcgccatccggtgcgacctcaccttcaacgtgcaggacctccgcgtgagggggctcgtcgccgtgcagctcccgccgcccgtcctgggctgccacctcgccgagcgcctcctgttcgacgacgagacggccgacgtgaggttcagggtccgcggcgagacgttcccggcgcaccgggcggagctcctcggctcctccatgaaggagcacgccgcgaggaccatccgcgtcgacgacatgaaggtccccgtgtttgccgcgctgctctacttcgtctacaccgacgagctgccggagatggaggacgacgagcgcacggtgattatggcgccgcaccttctcgtcccggcggacaggtacgacatggacaggctagctgaagaaggtgtgcgaggacaagatggtgaggcacctcgacgtcggcacggtggcgacgtcgctggcgttggccgagctccatggctgcccgcggctcaaggaggccatcttgaggttcctcgtcgtgtcgccgccggagaagttgaagacggtcatggcgagcgaggagtaccaacatgtgatcacggatttcccctccatagccacggagattgttcttgccatgctcgccgcaaattcggcttagcaagcgaattgacagtggagatgaggagatag

SEQ ID NO: 11396 - DNA, 1176 bp, Oryza sativa
  Clone ID: TFbOSC412646j.C1.o19.np
aagactacgacacaacaaatcgatcgacacatccaaaaatcgatcgacacgacaaatcgattttcttattatggaaataccgaaataggagttttggattactcggcgacgaacgcctctgccatcggcgatcccatcaactccgacctcttcaccgccggagggctaacctggagggtgaactgctacccgcgcggcgacaaggcagacaacaatggcgactacatctcgctctacctcgagctgatcagcaagtccaagaacatcaaggccatcttcgacgccttcatggtggatgaacacggcaacccgtccgatggatcgaacaggttagtgcaggtctacccacccgcgggctatcccgcgtggggatggccacgattcgtgaagcgaagcaatttgtcatcggtgttcgtggtggatggcaaggtcaggatcatgtgcgtcgtcggggtcaccggcggccatctcgacggcggcttattgccgctgccgccgccgaacatcggggtccatctcggcggcctgctggacagcgaggatggtgcggatgtcaccttcgccgtcggcggcgagacgttccacgcgcaccgggccgtgctcgccgcgcgctcgccggtgttcagggcggagctcctcgggtccatggcggaggccaccatgccgtgcgtcacgctgcgtgacatcgagccggcgacgttcagagctctgctacacttcgtgtacacggacgttctgcagatcgaaggctcttcgtcgacgagtacaactgatctgcttcagcgtttgctcgcggcggcggacaggttcgcgctggagaggctgaagctgatgtgcgcccagaagctgtgggagagcgtgtcagtggagacggtgatagcgactctgtgctgcgccgagatgcacagctgcccggagctgaagaacaggtgcatagatctcgtggtgacgaaagacaacttcatggaggtagcggtaaccaaggactactttcatcttgggcagagttttccgtcagttatcgaagagataacgggaaaccttcctcgcaccatgcaaagaggaccatggggccaaacatggagacagcatcgggtctccggttcactgggtggcgtcacttcgtcaagcagagtgatctacagccggatcatgtcagcgacaaaggcacggtca

SEQ ID NO: 11397 - DNA, 1293 bp, Oryza sativa
  Clone ID: TFbOSC415148j.C1.o5.fg
atggaggacgagggcgccgggggcgggggcattggcggcgacgcatccccggtgcacgtgggctccgcgacggaggtgggggtggggcgggacatcgtaccgtcaccgacgagctcacggtcggtgatgcagacggtgaacgggtcgcacatgttcgtgatccagggctactcgttggcgaaggggatggggattgggaagtacatcgcgagcgagacgttcacggtgggagggtgccagtgggcgatctacttctatcctgacgggaagaaccctgaggacaactccgcctacatctccgtcttcattgcgctcatctccgacggcatcgacgtccgcgtcctcttcgagctcaagctcctcgaccagagcggcaaggccaagcacaaggggcactcccagttcgaccgctcccttgagtctagcccctacaccctcaagaatcgcggctccatgtggggttataaaaggttctttcggcggactgctcttgagacatcggattttcttaaagacgattgcttaaagataaattgtactgtgggtgttgtggtatctactatggattactcaaagccacattcgatacatgttccagaatctgacataggctaccattttgggacactgttggacaatcaggagggtgtggatgttatatgtaatgtggcaggagaaaagtttcatgcccatcagttggtcttggctgcccgatcttcctttttcagatctgaactttttgagcatgaatcagatgaagagaagaatgaagttgatactagcaatgaaatcaaagagattgtcattgatgacatggagccaaaagtgttcaaggctgtgcttcattttatgtacagggacaatcttgttggtgatgatgagttgtctgcatcaagctcggactgctctatctttgatactttagctgggaaattattggctgctgctgacagatatgagttgccaagactacggttattgtgtgaatcttacttgtgcaagcatatttctgtaaactctgtggcaactaccctagcattggctgaccgacatcatgctatggagcttaaatctgtttgcctaaaatttgctgctgaaaatctttcagctgtaatccggaccgacgggtttgattacctcaaagacaactgccccgcgctgcaatcggagatactgaggacggtcgccgggtgtgaggaggaatgcagcagcggagggaagagccagagcgtgtgggggcagctctcggatggcggcgataccagcgggcgcagggtgaggccaagggtctga

SEQ ID NO: 11398 - DNA, 1161 bp, Oryza sativa
  Clone ID: TFbOSC400305j.C1.o21.fg
atgccgtcgtcgtcgtcggcggcggcggcggcgtgcgggcccccggagttcacgccggggtggaagacggtgtcgacgtgcgccccggacgtcgtcggcgagggcgtccacgtgttcgacatcttcgggtacagcgaccacaaggggatgggcgcccacgagcccatcaggtcgggggccttctccgtcgccggcctcgactgggtcgcctgcctctacgccgacggctacggcgtcgccggcatcgacgacgtctccgcctacctcaggctcctcggcgacgcgcccaccccgcgcgtgtgggtctcctgcgaggtcaagctcgtcgaccagcgcaccggggtggcctccacgccgcagcccttcctcaggtacgccctggcgttcggcgacaagtgcaaggccctccactgtatgatgatccccaggggccagatcgaggtggagccctacctcgtggatgatcgcctcaccatggagttccatgtcgtcgtcaggagagacccccgggtgtcgaggaccgcccggttcccgcgcatcttggtgccgccgcccgacatcaagcggcagtttgccaacctgctgcagagcaaggagggcgcagatgtcaccttcgatgtcgcgggggagccgttctccgtgcacaagctcgtgctcgcgatgcggtcgccagtgttcaaggcggagctctgcgggctgctgagggagccgggaacacagcctattaccatcgttgatatgcagcccgccgtcttcagggccctgctgcaattcatctataccgatcagttccccgtgacgcgcggtttcgagagacgcgacaattgtgaaatgatccggcacctgctcgttgctgcggacagatacgccgtggataggctaaagctgctatgccaaggtatcctttgcaagaatcttaatgttcacaatgtcgcgactacgctggcactggctgatcagcatcaatgcgacaagctgaaggatgcttgcatcgaatttatgtcatgttcaaagaagatgaagggtgtagtggcgagcaaagggtatgaggatctccaaagaatggcaccttctgtcttggcggatgccgtggcgcagatgtcgaagctcaacaaaatgtcaaggggtagtgttccacaagatgagtctaagagctgttag

SEQ ID NO: 11399 - DNA, 1032 bp, Oryza sativa
  Clone ID: TFbOSC400049j.C1.o16.fg
atgtcgccgccggtggcggaagaatcagaagggggtggcggtcgaatgcctgagtcgatggatcatcctccggtggtggaggaatcagaagccagacggcaacagcgacggccgggcgacgggaaacttcaccagcacggccagatcgacggcgccgtcgacgtggagtggagagcggatgaaaagagcaacgcggatttttcggtgcaggcgaagtaccagattagtttcgctaaccaggtgaagatgcaaccttcgttaaaatacattatggtaagaacttttattcgtgggtgttcttggacttggggctataagaagttcatcaaaagggaagatttcgagaagtctgacgatctcagggatgactcgttcaccatccggtgcgacattctcatcctccgcaagatccgcgccgaggagacgaccgagatactccccgctgctgaatcctttgtatccgtgcccccgtctgacatgaaccagcagttcggtgacctgctggagaccgagaagggcgcggatgtggtgttcgaggtcggcggccagacgttcgcggcgcaccggtgcgtgctcgcggcgcggtcgccggtcttcagagcggagctctacggcctgatgaaggaaggcgacactgctggagtcgtgcgcgttgaagaaatggaggcgcaagtgttcaaggtgttgctccgctttctgtacactgactctttgccggagatgaaggaggaagacgtcatgtgccagcatctgctcgtcgcggcggaccggtacaacctggagaggctcaaactgatctgcgaggagaagctgtgcaagtacattagcgtgggcaccgtgtcgaacatcctggcgctggctgatcagcaccgctgtgacgggctgaagaaagcgtgcttcaattttcttggctcaccggcgaacctgagtgctgtcgtcgccggtgacggcttcaagcatctgtccaagatttgcccctctcttatggaagagctggttgtcaaactggcacttccagctactcaagcttag

SEQ ID NO: 11400 - DNA, 1269 bp, Oryza sativa
  Clone ID: TFbOSC400049j.C1.o54.fg
atgaaggccaccgcggggctggtggaggcgcagaggagaccagccaggagtaaagcagttcgccgtcgacaggggagctgcggtggactcgatgtgtacgggcaggcgtccgtcgaggtggaggcctcagctcctacatctccgtcggacgtcgggctagacgcaggtatgacgacgacgacgacggcggcggctgcggctctcacgtccagcgtcggtgacggtcctccgccgtcgaggtccaccactaccatcaccgcgggacgaacctaccacatactcaagatcgaggggtactccagcaccttgaaagccggtcgtggccaggccctccgttcctctccgttcagtgcgggaggtcgcacctggtatatcagctactacccaaacggagggcgagaaaccaacaagcactgcatctctttcttcatccatcttgacgatgacacggtcaatgacgatgtcatggcacaagttacattcagcttgctcgaccgacacaggaatccggtgcggtcacacactgtcaccaccacattgtataacttctcggtggctagtagtaacgcgcttgggttcgaaaacttcattagaagggacgacttgcaacgatcggaatatctcaatgacgactgcttcgctatcgcggttcgtctggtcatcaccgaggaatcaccatccttcacggtgcccccatcgaacatgcacatggattatggtgatcttctatcaagcaaagagggaaccgatgtcgagtttgtggttggcggcgagacatttgccgcacacaggttggtgctagcggcacggtcgccggtgttcaaggcggagctattcaaaccaatggaggaaggcaccacggatgtcataaaaattgacaacatggatgcacaagtgtttaaagctctgcttgtttttatctacacggacacttggccagagataggtcaagacgagacgactatggttcaacaactactcgttgcagccaataagtatagcctatcaagactgaagataatgtgcgaagataagttgtgcagctatattgatacaagttcagtggttactatgctgatgctagcagacaagtaccaatgccatggtcttaagaaggtgtgcttcaatttccttgcctcttcaagagcattgtctttggtcatgaaagcagataatttctggtgtttaatccagagccatccaactatgttgaaggatttaatttacaacatcgttactcatcaattggaaattaaattatcagtgtag

SEQ ID NO: 11401 - DNA, 1277 bp, Oryza sativa
  Clone ID: TFbOSC401668j.C1.o22.np
tcggacgtgtccttctccgtcggcggcgagacgctcatccacgcgcaccgcgccgtgctcgccgcgcggtcgccggtgttcagggcggagctcctcggctccatggcggaggccaccatgccgtgcgtcacgctgcacgacatcgagccggcgacgttcagagctctactgcacttagtctacaccgacgccttgccagcgagctccacgtcgtcttcgacggcggcggcggcggttgagttcttccgaggattgctagcggcggcggacagatacgcgctcgataggctgaagctcatgtgcgctcagagcctatgggagatcgtgtcggcggagaccgtcgcggcgactctggcttgcgcggagatgcacagctgcacggagctcaaaactagatgcatcgacttcctcatgaaggacagcaacttcaagaaggcagcggtgacagatgactacctgcatctttatgcagagcttcccgttagtgatcaacgagataaaggcacggctccaggcttgagacttgaaatagccgacactccggtcaaccaacaaataaacagaaaagaagatggacccaccgttcattctcattaccttctctttcttcttcctcccctcttctctcttcatcctaccagatcggaactcgccgccctgcagagatggggtggggaggatttgcaaggagagctaaataatcaatcattatttccttaagctatactcgccatcaccccatagccgtgccgccgccgaacctgggcggccatctcgccgccatggtgggcagcgccgacggctccgacgtgtccttctccgtcggcggcgagacgctcatccgcgcgcaccgcgccgtgctcgccgcgcgctcgccggtgttcagcgcggagctcctcggctccatggcggagggcaccatgccgtgcgtcacgctgcacgacatcgagccggcgacgttcagagctctcctgcacttcgtgtacacggacgctttgccaccgagagacatactatctccttcgtttttcaagaaattgttcgcggcagcggacaggtttgcgttggacaggctgaagctgatgtgcgcccagaagctgtgggaaagcgtgacagtggagacggtggcggagactctggcctgtgccgagatgcacagctgcccggagctgaagagcaggtgcctcgacttcttcgttgaagagaacaacttcaggaaggtggtagtcactggtggttacctgcgtcttatgcagggtttcccatctgttatcgat

SEQ ID NO: 11402 - DNA, 1113 bp, Oryza sativa
  Clone ID: TFbOSC401879j.C1.o9.fg
atggcgtcgaggagcatatcaagctgcacaactgagacggcaaaaggcatccacaggttcgagatcttcagttacagcatgatgaacaccgaagccgaagacgactccatccggtccggcgtcttcaacgtaggaggattcgattgggcgttgctttactaccctgacggcatcgacgacgacagcaagggctacatcggcgtctacctcgagctgatcagcaagaacggcgagccatgggcactcgtcgacgtgaatctgatcaaccagctgcaacccgggcaacctcgtcagctgttcaccaagaccgatgtgcctaccccgttcagatcttcaagctttcaggagtctaccttggggtctctcaagtgcatgaagaggagcgatattgagagcactccagggttcatcgtcaatgactgcatcgtgatcgaatgcaatgttactgtcatctatgagccaaaagtgtctaaaaccagggcattgtgtgacgctgaaactagttcggcattgcgcgagatcgaggtgcctcctatggagatatcgtcggatttcgccaagatgttgaaggacggtgtaggagcagatgtgacattcagagttggagaagacacattccgtgcccacagggcggtgctagctgcgaggtctccagtatttcatgctcagctctgtggaccgatgaaggagaagaaggagacacaaatgcaggagataaccatccaagacatgcagccatctgtcttcgaggctttcctctatttcatctacaccgattgtgttccaagaatggatgatcttggcaatggtgagaagatgcatttgatgatgcatttgcttaaggccggtgaccggtatggattggagaggctcaggatcatgtgcgagagatttctagctacgaacctcgacacggagcatgtatctgcgatactgggtctagctgacttgctagatctcaagaagctcaaggaagcttgcatggagttcatggtcccatctgagagaatggatgccgtggctgcaagtcaagggtaccagcagctgaagagagcatttccctctctggcgtttgaagtgtgggagaggaggagccgtgttcgcaggaattaa

SEQ ID NO: 11403 - DNA, 1053 bp, Oryza sativa
  Clone ID: TFbOSC405158j.C1.o3.fg
atggcgtcgaggagcatatcaagctgcacaactgagacggcaaaaggcatccacaggttcgagatcttcagttacagcatgatgaacaccgaagccgaagacgactccatccggtccggcgtcttcaacggctacatcggcgtctacctcgagctgatcagcaagaacggcgagccatgggcactcgtcgacgtgaatctgatcaaccagctgcaacccgggcaacctcgtcagctgttcaccaagaccgatgtgcctaccccgttcagatcttcaagctttcaggagtctaccttggggtctctcaagtgcatgaagaggagcgatattgagagcactccagggttcatcgtcaatgactgcatcgtgatcgaatgcaatgttactgtcatctatgagccaaaagtgtctaaaaccagggcattgtgtgacgctgaaactagttcggcattgcgcgagatcgaggtgcctcctatggagatatcgtcggatttcgccaagatgttgaaggacggtgtaggagcagatgtgacattcagagttggagaagacacattccgtgcccacagggcggtgctagctgcgaggtctccagtatttcatgctcagctctgtggaccgatgaaggagaagaaggagacacaaatgcaggagataaccatccaagacatgcagccatctgtcttcgaggctttcctctatttcatctacaccgattgtgttccaagaatggatgatcttggcaatggtgagaagatgcatttgatgatgcatttgcttaaagccggtgaccggtatggattggagaggctcaggatcatgtgcgagagatttctagctacgaacctcgacacggagcatgtatctgcgatactgggtctagctgacttgctagatctcaagaagctcaaggaagcttgcatggagttcatggtcccatctgagagaatggatgccgtggctgcaagtcaagggtaccagcagctgaagagagcatttccctctctggcgtttgaagtgtgggagaggaggagccgtgttcgcaggaattaa

SEQ ID NO: 11404 - DNA, 619 bp, Oryza sativa
  Clone ID: TFbOSC100059j.C1.o1.gp
gatcaagggcgcacaaaataaattttgcggaaggacaacaggttatatgtcagttaatggaaacaaagcttgcaaagagataaaataaacctatctatcatataaacagataagcaccacaaaggtgctcccaaaatgtaaagagtaaactgactacggtacctgatttaggaagagaagaaagaatacccatatcccttataaattaagctaacagctcttagactcatcttgtggaacactaccccttgacattttgttgagcttcgacatctgcgccacggcatccgccaagacagaaggtgccattctttggagatcctcataccctttgctcgccactacacccttcatcttctttgaacatgacataaattcgatgcaagcatccttcagcttgtcgcattgatgctgatcagccagtgccagcgtagtcgcgacattgtgaacattaagattcttgcaaaggataccttggcatagcagctttagcctatccacggcgtatctgtccgcagcaacgagcaggtgccggatcatttcacaattgtcgcgtctctcgaaaccgcgcgtcacggggaactgatcggtatagatgaattgcagcagggccctgaag

SEQ ID NO: 11405 - DNA, 609 bp, Oryza sativa
  Clone ID: TFbOSC9673j.C1.o2.gp
aaactcgaccaaacaaaaatatcaattagaaaacttttgacgacctgggaaagaatttaatttggattgacagagattacatatgagaaagaaaactcggccatgcattttctataataaacacaatgactcggtgagattactttgacactaacactaatgaccaattttgcagaaactagtttgacttaatacccactaattaaaaatctagctaaactaattgtttcatgacgagttcagtcaaaactgaaggacatgttgccttcagatgctcgaagccatcggtagccatggccgccttgaggttgcccggagaagacaagaactcgacgcaagcctccttgagcgcgcggcaatggtgctgctccgccagcgccagcgtcacggcgacgttgcccatggcgacgcggcggcgcagcctgtcctcgcagatcagcctcagcctctccatcccgtacgcgtccgccgcggcgagcagccgccgcgccatggcgtcgtcatcgtcgtcgtcgtcgggcagcgtgtcggtgtagatgaagtggagcagcgccctgaacgcgtcggcgtccatggcggcgagccgcagcgtcgccggcgacgacggcg

SEQ ID NO: 11406 - DNA, 642 bp, Oryza sativa
  Clone ID: TFbOSC33617j.C1.o1.fg
tttccccctatttttactcttcttaaatatatattatacgccggtgacgacgacggcactatacccatcccgtggttgaacctcaatggccagctcggcgacatcgtggaccgtgccgacggctcggacgtgccgttctctgtcggcggcgagatgttccacgcacaccatgccgtgctcgccgcgcgctcgccggtgttcaagacggagctcctcgggtccatggcggagtccgccatgccgtgcgtcaccctgcacaacatcgacccggccacgttcaaagctctactacacttcgtgtacatggacgccttgctgtcgccgactagaggcggtgccagctcgacgtcgacgacaaccggatttttcaagagcttgctcatggcggtggacatgtacgcattgaagaggttgaagctgatgtgtgcacagaagctgtgggggagcgtgtcagtggagacggtggcgacgacactaggctacgccgagacgtaccattgcccggagctaaagagcaagtgcctcagcttcttgatggcggagagcagcttcaagaaggtggccttcactgatggctactttcatcttaggcaggatttcccgttaattatcgaagagataaaaaagcggattgagagttaa

SEQ ID NO: 11407 - DNA, 547 bp, Oryza sativa
  Clone ID: TFbOSC14613j.C1.o1.gm
aaggccgtactggagagatcggagtacctccgggacaaccgcttcacgatcaggtgtgacatcacggtcatgaagaatcccgaggcaaaggacactggcggcaggcgggtaaccctgccaccgtcggacctggcccggcacctcggcggcctcctcgccaccggagtgggcgccgacgtgacgttcgaggtcgacggcaagacgttcttggcgcatcggaatgtgctcgcggcccgatccccagtgttccaccaagagcttttctccctaacggagaaggggaatgccgcgactggcggtgccggtgtcatcatacgcgtcgacgacatggaggcgcaggacttcgaggctctgctccacttcatatacaccgactcgttgccggagatgaaaggtggagacgcagtggcgatgctcccaacctggtcgcggcggctaacagccatgttggcgtttgctggggaacaccaatgccccgagcttgagaagaagtgcttgcagctactcgaagatccagcaaatttgaggaacatcgtggagactgaag

SEQ ID NO: 11408 - DNA, 4011 bp, Oryza sativa
  Clone ID: TFbOSC34061j.C1.o19.gm
atggatatcgggccgcatagcatccagctgatcgcgccgccgtccctctatcacgccgcctccgctgccgccatgggtgatcaccgcgacccggctttccccgcggcggcgggcggctgccggctgcccaagacgtcgtcggtgagcgtcacggagtccgtcaccgcggtgcacgatttcaaggtgacgggttactcgctgatcgaggggctgggcatcggcaggtacgtcagctcatccaccttcaccgtcggcggcgtcgactgggccgtcaggttctaccccgacggctccaccgtcacctgcctcgggaacgcgtcggcgttcctctactactgcggcagggagaaggaggtcaggaccaggttcaccctgaatctgctcggcaaggacggcaaattgtcgcaggtgaccaattcctacatgaagcacaccttctccccggcgagtgacaattggggattcatcaaattcgccgagaaatcgaagctgcagagctcgccgttcctccacaacgactgcctgaccatcaggtgcttgctgaccgtcgtcagggaatcccacaccaaggatgttgaggtcaattctgttgttgtcccaccgtccaacctgcataccgattttgagaacatgctccaggatggtgaaggttcagatgtgacattcaccgtgggtggccaagagttccgtgctcataaatgtgttcttgccttccggtccccggtgttcaaggccgagcttttcggtccgatgaaagaaaatggcacgcaatgtatcaagatcgacgacatggagcctgaggtttttgaggctcttcttcacttcatttacacagataggctgccagatagctgcagagatggcaaggctgcagcaatgcagcacttgctagttgccgcggatcggtacggagtggacaggctgaggctgatttgtgagaggcggctcagcgaaaccattgatgtggaaacagtggcaaccactcttgttttagcagaacaacatcactgctcgcagctgagacaggcttgcattggggacagccttaccgaaattgctcctatggaggaattcttcatcactcacagaataagctgtggagaaatcgacgccaggagcttcgtggaggttgaggatgaggcagaccgagacgacggcgaggcggcggtgtggggcgcagagggccgtcagccccaaatcgaggaggcagtggtcgacgtgcgggcgccccctggaacagcgccgccgccgacgcctgcgaggaagaggacggcggctgcatcgccgcttggagcaacgccggcgcctgcgcctgagaggaagggcatggccgctgcatcgctgcctggagcaacaccgacgccgacccctgtgaccaagaggaaggggacgaccgctgcatctccgcgtggaactcagtcaacgacgcctgcgaggaaggggttggccgttgcttcgccgcctggaaagccgctgccgacgcctgggaggaagaggaattttgttgctggcgactggcgaggagggcgagaaaaggagcgcgggaacaattttccccctacgcgcgcgaggcagcgacgaccgcgattgggaagaaaaaatggttccctgcaaatgagtaacgacatatacggatatgggaacatggattattgggatgttgtggcagacatgttgacttcatcggctgcccgtacgtcctcacggagcgtgtgggagggcatcaccgggacgcacgacttcgaggtggtcggctactcgttgatggacggcttcggcgccggaaggcacgtctgctccggcgacttcagcgtcgccggccatgactggtatgtcgcgttctaccccgatggcctcgaccaggattccgccggctacgcgtcggcctgcctcgcctaccgcggcaaggagaggctcgtgagagccaagtacagcctgagcttggtggccagggacggcagggcgtcgccgctcgccggcgacacgctgcggtcgcactacttcacgccgacgagccgcagcgccgacgtcctcaagttcgtcgagaaatccaacctgtcgtcgtcgccgtcgtcgtcgtcgtactcgtgcctcgacgacgacaccctgaccatacggtgcgtggtcaccgtggtcaccggcccgcgcgtggtgagcgtcgcgccggccaaggagaggggcccccgcgtcacggtgccgccgccgagcctccacgagcacctggcgcggatgctgcgcgacgggcggggctcggacgtggcgttccgcgtgggcggcagggtgctccgcgcgcaccggtgcgtgctcgccgcgcggtcgccggtgttcgacgcggagctcctgggcccgatgatggagaccaccgctccgtgcatcgagatccacggcgtcgagcccgccgccttcgaggcgctcctccgcttcgtctacacggacagctggccgctcgccggcgtcgacgtcgcggcgacggtgcgcctgctctccgcggcggacaggtacgggctggagaggctgcggctgatgtgcgaggagaagctgcacgagggcatcgacgtggacaacgccgccgacgtcctcgccatggcggagctccaccattgctcgcagctcagagacgcctgcgtcgcgttcattgcctcgccgagcacgctgggtcccgtcctggcgtcgagcggcttcgaggatctcatcatggcgaccggcgcttcggtgaccaaggagattttgcacaagcagccgccgtcgcagccgcagcccggcatgggcggcccgcctccgccgccacagggcgcggcggggcagccgccgcagtggggcgcgatcccgccgccgatgccgccgcaccagtacggcgcgccgccgccccagcagccgccggcgatgtggggccagcccccgccgcaggcgcactacgggcaggtgcccccgccccagccgtactacgccgcgccaccgccgcaggcgatgcccgcccccgcggccgcggacgaggtgaagacgctctggatcggcgacctgcagccctggatggacgagagctacatctacaactgcttcgcggccaccggggaggttcaatctgtgaagcttatccgggacaaacaaagtggacagcttcagggttatggctttgttgagtttacaagtcgtgcagctgctgatcgaattcttcagacttataatggacagatgatgccgaatgttgagatggtcttccgattgaattgggccagtgctggcgagaagcgtgatgatacccctgactacaccatttttgtcggggatttggctgcagatgttacagactacctactacaagagacattcagggtccattacccttcggttaagggtgcaaaagttgtaactgacaaaatgacaatgcgttcaaagggttatgggtttgtgaaatttggtgatcctacagagcaagctcgtgcaatgactgaaatgaatggaatgctttgctcttccagaccgatgcgtattggtccagcggcaaataagaaaacaacaggggttcaggagagagtaccaaatgctcaaggagctcagtctgagaatgatcctaacaataccaccatattcgttggtggtcttgaccccaacgtcactgaagatgtcttgaaacaagttttcgctccttatggagaagttgtccatgttaagattcctgttgggaaaagatgtggttttgttcaatatgttaacaggccttctgctgagcaagcactggcagtgctacaagggaccttgattggtgggcagaatgttagactttcgtggggtcgaagcctttcaaacaaacagcctcagcacgactcgaatcagtggggtgctggtgctggtgctggtggttactatggtggctatggacaaggttatgaggcttatggtgggtatgcacaacctcaggatcctaacatgtatggttatggagcctatgctggttatcccaattaccaacagcaacaagtagcacagcagcagccgccgcagcagctttag

SEQ ID NO: 11409 - DNA, 1914 bp, Oryza sativa
  Clone ID: TFbOSC419840j.C1.o2.fg
atggccgggagcgaggcggcggcggcgcaggaggcggagatggacccggacttctcgggcgggggcggtgggggccccagcttcgagttcgccttcaactcggtcaacttctccgaccgggtgctccggatcgaggtcgtcgcgggggacgacgacgacgacgacgaccacgcgcccggctccagccgggacggcggggccggctcgctctcggattgggcgcgccaccgcaagcgccgccgcgaggagctcctcaaggagaaaggccgttggataattggtgatgcaagggatacaattgtgcaacctagaaattttggaagaacctgtaatcttgtactaattgattatacctgtaggatgatatggcatactcgcctcgggttgaggggacaatgtggtcaattgtttgagataaaacttcagttgcttgttagctgtgccgatcatgatctcaatgcttgttttgtgcttcttaggtcatgctcaaaggtagagcccgagtctgaagcagtcatgccagaccagataaattgcaaagtagaaccagaagaatgtgatgcatatgaagaaaatcaagaagaacctgtagcaatgatggacgactctccacccagtgttggccctgatggtgatgatggaccaagtatggactcaccttggagtggtggggtgagcacaccagttctaagagtaaagaacatttatatcagttcagcgattcttgcagcaaaaagtcctttctttttcaagcttttctcaaatggcatgaaagaatctgatgagaggcaggcaacccttagaattactgattcagaggaaaatgcccttatggagcttttaagctttatgtacagtggaaagttgacatcaactgaccctactcttctactggatattctgatggctgccgacaagtttgaggttatttcgtgcatgaggtactgcagtcagttgctcacaagcttgactatgactacagaatctgcactactctacctagatcttccatgctccatttcgatggctgctgcagttcaacctctgacagatgcagccaaggaatatctttccaacaaatacaaggatttgactaagttccaagatgaagtgatgaacatccctcttgctggaatcgaagccatcttgtcaagtaatgacctccaggtggcatctgaagatgctatctacgatttcttgatcaggtgggctcgcgcacaataccctaaatcagaggaaaggcgtgagatcttgagttctcgtttgcttccgctcgtgcgattcagtcacatgacctgtaggaagctgcggaaggtcctaatatgcaccgatctggaccatgagcaagcaaccaagtgtgtcactgaggcacttctatataaagctgatgctccacacaggcaacgtgctctcgcagcagacgtaacaacctgtcagaaatttgcagagcgggcttacaagtacagacctttgaaagttgttgagtttgaccgaccctacccacagtgtatagcatacttggatctaaagcgcgaagagtgctcccggctcttcccgtcaggtcggatgtactctcaagccttccatcttgcagggcagggcttcttcctctcagcacactgtaacatggaacagcagagtacgttctactgcttcggtctcttcttagggatgcaagagaagggctcaatgagcgtgacagtagattatgagtttgctgcaaggacaagaccgtcaggagagtttgtgagcaagtacaagggtaactacacgttcaccggtgggaaggcggttggttacaggaatctctttgcgataccatggtcgacgttcatggctgacgacagcctcttcttcctcgacggcgtgttgcatctgagagctgaattgacgataaagcaacccactgtctaa

SEQ ID NO: 11410 - DNA, 1107 bp, Oryza sativa
  Clone ID: TFbOSC401762j.C1.o40.fg
atgccaaccgccaccggcagccgcacaccggtgcggtctgcctccgccgtcatagccggcacggagagcggccagcaccatctcaagatcgacggctactcccgcatcaaggacgagctgcccaccggcagtgacatcaagtctcgatctttccgcgccggaggccatagctggcacctgcgctactaccccaacggcttcaactcggactgcgccgagtgcatctccatcttcctccagctcgactacaatgtcatgaaaggcgtgaaagcgcagtacaagttcagcttgctcgaccgtgccaggaagccgtcgtactccaggagtagtggcaaggcggacgtcttcctcaacaccggttggggttaccggacttacatcgaaagggggcttctggaatcgtcggagtatctcagagacgactgcctcacgatcgtgtgtgacttcaccgtcttcaaggacttgcggaccgaggacatcgacgttgatgacgcgatgccaccgccgcagtcgcctcctacagtggtggtcccgccatctgacctgcaccggcacctcggaggtctcctcgccaccggagagggcgccgacgtgacgttcgaggtcgagggcaagacgttcgcggcacacaggtgggtgctcgcggcccggtctccagtgttccgtgtggcgctcttcggcgccacgaccggtggcgccgatgatgtagtgcgcgtcaatatcgatgctatgaaggtgcaggactttgaggctctgctccactacatgtacaccgactcgctgccggagatgaaaggaggagaggcggcggcgatgctcccagaccttgtcgcggcggcgaacaggtacaagatggagaggctaaggctggtgtgcgaacacaagctatgcgagtacgtgaacgggagaacggttgttgccatgcttgcatttgcgggggagcaccagtgcaatggccttaaggagaagtgcctgcgttttcttgatgacccggtgaaactgagattgattgtgcaggcagagggagtcgagaatttgagcaaaagttacccttctattttgaaagatgtaattgccaagtttgttgcaacacccgtagatagctga

SEQ ID NO: 11411 - DNA, 1050 bp, Oryza sativa
  Clone ID: TFbOSC412646j.C1.o21.fg
atgttggacggcggcttcatcgagctgaagctccggtacgaggacctcgccgccggcgacttcgtccgctccgacgacatctacgccggcggccacacgtggcgtgtcctctgctaccctcgcggcggcggcgcgatgaacagcaatggccagcggatcggcggcgagtacctctccatcaagctcgacctcgtcacccggtccaccaatgtcagggccatcttcgccgcgttcctcgtccacctcgacggccacccgtccccggtccacgccaagagcttcgtcgccgtctaccctctcggcgccggcggccgcggcggcggcaaggccgccgccgggtggatgtacttcgcgtcgcggagcgagctcgagaagaagttcgtgtccggcgacggctgggtcaccgtcgtctgcggcgtcctgatcccgagcgacagcccacaggcgctgtccccgccgccgccgccgcctccgtcgtccggtggaggaggcgggcacatcggccgcctgctctacggcgccgccgacgacaccgcggacgtcgcgctcgtcgtcggcggcgagacgttccgcgcgcaccgcgccgtgctcgccgcgcgctcgccggtcttcaaggccgccctcttcggctccatggcggaggccaccgcgccgtcggtcgcgctccgggacatggacccggcggcgttccgcgcggtgctccacttcatctacacggacgcgctgcccgacgacatcgacgagctcgccggattctccccggtggacatgttccagcacctgctcgccgcggcggagcggtacgagctcggcgggctgaagctgctgtccaccaagaagctgctcgacaacgtcacgccggagaacgtcgccgggatcatcgtctgcgccgagacgtacggctgcccggagctgaagaagaagtgcctcgactacctcgcgcgcgaggacgaacacttcaggaaggcggcgacgacgcaggggtaccttcgattgttgcaggatttcccttccctcatggatgaaatacgagctgtgattgagagatga

SEQ ID NO: 11412 - DNA, 2388 bp, Oryza sativa
  Clone ID: TFbOSC2852j.C1.o4.fg
atgttgacttcatcggctgcccgtacgtcctcacggagcgtgtgggagggcatcaccgggacgcacgacttcgaggtggtcggctactcgttgatggacggcttcggcgccggaaggcacgtctgctccggcgacttcagcgtcgccggccatgactggtatgtcgcgttctaccccgatggcctcgaccaggattccgccggctacgcgtcggcctgcctcgcctaccgcggcaaggagaggctcgtgagagccaagtacagcctgagcttggtggccagggacggcagggcgtcgccgctcgccggcgacacgctgcggtcgcactacttcacgccgacgagccgcagcgccgacgtcctcaagttcgtcgagaaatccaacctgtcgtcgtcgccgtcgtcgtcgtcgtactcgtgcctcgacgacgacaccctgaccatacggtgcgtggtcaccgtggtcaccggcccgcgcgtggtgagcgtcgcgccggccaaggagaggggcccccgcgtcacggtgccgccgccgagcctccacgagcacctggcgcggatgctgcgcgacgggcggggctcggacgtggcgttccgcgtgggcggcagggtgctccgcgcgcaccggtgcgtgctcgccgcgcggtcgccggtgttcgacgcggagctcctgggcccgatgatggagaccaccgctccgtgcatcgagatccacggcgtcgagcccgccgccttcgaggcgctcctccgcttcgtctacacggacagctggccgctcgccggcgtcgacgtcgcggcgacggtgcgcctgctctccgcggcggacaggtacgggctggagaggctgcggctgatgtgcgaggagaagctgcacgagggcatcgacgtggacaacgccgccgacgtcctcgccatggcggagctccaccattgctcgcagctcagagacgcctgcgtcgcgttcattgcctcgccgagcacgctgggtcccgtcctggcgtcgagcggcttcgaggatctcatcatggcgaccggcgcttcggtgaccaaggagattttgcacaaggtgtccgaatcgtggagcggtcctgctagggcatctcgtcgcattgatgcagcagccgccgtcgcagccgcagcccggcatgggcggcccgcctccgccgccacagggcgcggcggggcagccgccgcagtggggcgcgatcccgccgccgatgccgccgcaccagtacggcgcgccgccgccccagcagccgccggcgatgtggggccagcccccgccgcaggcgcactacgggcaggtgcccccgccccagccgtactacgccgcgccccgccgcaggcgatgcccgcccccgcggccgcggacgaggtgaagacgctctggatcggcgacctgcagccctggatggacgagagctacatctacaactgcttcgcggccaccggggaggttcaatctgtgaagcttatccgggacaaacaaagtggacagcttcagggttatggctttgttgagtttacaagtcgtgcagctgctgatcgaattcttcagacttataatggacagatgatgccgaatgttgagatggtcttccgattgaattgggccagtgctggcgagaagcgtgatgatacccctgactacaccatttttgtcggggatttggctgcagatgttacagactacctactacaagagacattcagggtccattacccttcggttaagggtgcaaaagttgtaactgacaaaatgacaatgcgttcaaagggttatgggtttgtgaaatttggtgatcctacagagcaagctcgtgcaatgactgaaatgaatggaatgctttgctcttccagaccgatgcgtattggtccagcggcaaataagaaaacaacaggggttcaggagagagtaccaaatgctcaaggagctcagtctgagaatgatcctaacaataccaccatattcgttggtggtcttgaccccaacgtcactgaagatgtcttgaaacaagttttcgctccttatggagaagttgtccatgttaagattcctgttgggaaaagatgtggttttgttcaatatgttaacaggccttctgctgagcaagcactggcagtgctacaagggaccttgattggtgggcagaatgttagactttcgtggggtcgaagcctttcaaacaaacagcctcagcacgactcgaatcagtggggtgctggtgctggtgctggtggttactatggtggctatggacaaggttatgaggcttatggtgggtatgcacaacctcaggatcctaacatgtatggttatggagcctatgctggttatcccaattaccaacagcaacaagtagcacagcagcagccgccgcagcagtga

SEQ ID NO: 11413 - DNA, 1818 bp, Oryza sativa
  Clone ID: TFbOSC22376j.C1.o7.fg
atggacccggacttctcgcgggcgagccgaggcccgagcttcgcgttcgccttcaactccgtcaacttctccgaccgggtgctgcggatcgagatcgtcgccggggacgacgcggcgggggccaagggcgccgcgggggaagggtgctcctcgctcgccgactgggcgcaccagcggaagcgacgccgggaggagctccgccgcgagaaagctgtcgcatttgattttaggagttatcctaaatttgagtctaaaaagaagtgggccaccaacagaaacagttgcttccccctccgcgggatagctcttggtcgcccgcactgccgattgggagcaagcgcggtgcggtacttccggagagcgagatctcgggaatgtgaatcaggaaaatacacggatctggaaacctgtaaagttgaagcagaagaatgtgatacctatgaggaaaataatgaggaacctgtagctatgatagaagaatctccaccagatattggacaagatggtgaggatggagacagctgcgattcatcctggagtatggagtgtacccaagtcttgagagtaaagtctatttacatcagttctgcaattctagctgcggaaagccctttcttttataagcttttctcaaatggcatgaaagaatctgatcagaggcatgctactcttagaataactgcttcagatagcttttatctgatcattgtatgtctatctgaaacagaggaaaatgccctcatggagcttttgagctttatgtatagtggaaagttgacaacaaatcagccaacccttctgctggatatcttgatgattgctgataaattcgaggttgtttcttgcatgaggcattgcagtcaattactaagaagcttgcctatgactacagaatctgcactgctctatctagaccttccttcgagcatttcaatggctgctgcagttcagccactgactgacactgccaaggcattccttgccaacaagtacaaagatttgaccaagcttcaagatgaagcgatgaatattcctctggctggtattgaagccatcctatggagtaatgatctgcaggtggcatcagaggacgccatctatgattttgtgatcaagtgggcacgttctcaatacccaaaactggaggagaggcgagagatcttgggtactcgtttgttgccactggttcggttttgtcatatgacctgcagaaagctgcggaaggtccttgcatgcaatgatctggatcatgaacaggcaactaaatgtgtcaccgaggcacttctatacaaagctgatgcaccacatcgacagcgtacccttgctgcagatgttttgacttgtaggaaatatgctgagcgagcttacaaatatcgtccacttaaggtggtggaatttgatcgaccatatccacagtgtatagcatacttggatctgaagcgtgaggagtgcagtcggcttttcccatctggacggatatactcacaagcgttccatctcgcagggcagggcttctttctctcagcacactgtaacatggatcagcaaagtgcattccattgctttggtctgttcctagggatgcaagagaaaggctcgactagtgttactgtagattacgagtttgccgcaagaacaaggccatcaggcgagtttgtcagcaagtacaagggctactataccttcaccggtggaaaggcggttggataccggaatctatttgcaattccatggtcatcgttcatggctgatgacagcctcttcttcatcgagggggtactacacttgagagctgaattaaccataaaacaaccctag

SEQ ID NO: 11414 - DNA, 1185 bp, Oryza sativa
  Clone ID: TFbOSC415318j.C1.o8.fg
atggccgcagccgccgcctcaactgtgccccagtcgtcttccaccagcagcacaccgcaaaacaccatctccactcactccactgagcttgtcaggggctcgcatgagttcaccgtcgccggctacagcctacagaagaggaagggcgccgggcactccatcaggtccggctcattcgaggtcggtggatacagctgggcgatccgattctaccctgctggcagcacgaaggaagaagaaagacacgtgtccgtgtacctcgagctgcgaagcactgtggtagagaaagttaccgcgaggttcagtttccacgtccatggcgctagcgcgagctcgttgcatatgcgcggtagttttgacgactacacgcctaccagcaaatcatgggggtacccgaaatttatggagatagaaaccgtggagtcggagtacctgatcaacgactgcctgacgttgctctgcgacgtggaggttgtcaagacggtgaagaccggagcaaccattagctgcttcatcacggttccgccgccggccatctgccgtgatctcgagctgctggtggggagcaaggagggctccgacgtgacgctccagttggagcagagcgagtacgacgctcacagagcggttctcgcggcgcggtctccggtgttcagcgctcagttcttcggcccaatggcggacgaggacgccgccgccgccggcagccggaggaacgtgcggatccacgacatcaaaccggcggtgttcgaggccgtgctccactttgtctacaccgacacgttgccgccggccaccacgagctggtccgcgagccaccgcgacaagcgtcctaagctcagcgacgtcgcggccgccagctgctcggaagaagaggtgagagtgatgatcggagagcggctcgcggcggccgacagatttgacctggagaggatgaggctgctgtgcgaggacgcgctgtgggagaccatcgacgtggcgaacgcggcggcgacgctgcggctggctgaccggcaccattgcccgcagctcaaggagctctgcatggagtacatcgcctcggctggggtgttggcggccgtgatgacaaccgaggggttcagggagctcaagctggactgcccctcacttctgatcgagatcctggagaactttggaaaacgcagcgaggccgatgaggaataa

SEQ ID NO: 11415 - DNA, 1185 bp, Oryza sativa
  Clone ID: TFbOSC900359j.C1.o12.fg
atggcgagcagcagctcgccgtgtaagctcgtctcttgcggcgacaaccgccacttcatgttccgggttgacggggcggcgatacgccggcccgtcgggcgcatagtcaaggagacctgcgaaatcggcaatggctacacatgcgaagcatctcttttcgtgccgtcattactgggtgagagaaaggtgatgatgattctggccgtgacggtaaacagcgaccgagctcagtcgttggcgagagcgcacaaggtgttcattgacatggcactcttggacgataccaagtcgcctgttcttccgccgttcgccagatcggtgatgtcgccgtccgccgctgcaggtagcagtcctaagctgccgccgcccgtcgccgggagcaacctagctgctagctgcaaactggtagcctcgagggatcacctcttggccaactgtgtaaaaggcggcatcctggcggcgttgtgctgggttgtctttgttccctcgtcgccgcggtcgccgtactcgttgttagcccactgccttgccaccatgtcaaacggtcgagacctcaccgacgtctgcttcgacgtcgacggcaagagtttccacgcgcaccgcctcataatggcgcgtcagtcggaggtgtttagggcagagctacttggctccatggccgagagcaagatggagtgcatcaccatctccgacatgagcgcctccaccttcaagcacatgctccactacatctactgcaacgacctgcccacctgtgtaaaagacacagacgatcagtcctcctggatcttcgaattgcagcacctgctcgtcaccgccgatcgatacggagtggatacgttgaaggatttgtgcgaggacacgctctgcgctgacatcaccacggacacggtgacatcaacactggagctggcggagacgagatcatatccgaagctaagaacgtcctgtcttgtattcctatcgaatacacaaaatttcgccgaggtggcaacgactaaggagtactataatctgatacagagctacccgagtgtgctgtccgagataaggaacaggtttaagagaccacggccgtctctgatgctagctccgtcaaccgtcaccgaaaatcaaaacaagagaccacggctgtctcctaagctaactccatcagccgacaccaaagatgaaaacaacccttag

SEQ ID NO: 11416 - DNA, 873 bp, Oryza sativa
  Clone ID: TFbOSC400305j.C1.o24.fg
atggcgcgcgcaaagacggtgtcgaagtgcatcacggagacggcggagggaagccacgtgttcagcatcaccgagtacagccagaagagggggatgggcgtcggcaaaggtgtcgaggtgcacgcgtcctccgacctgaggctgctcgaccacaccaccggcctgtctacttcagtgacaaagacattgcccaaagcatcggcgtatctccgcgacgatcgcctcgacatcgagtgtgttgtcactgtcatgaaagagccacgggtgtctcagaccaaatcttcccccaaagtcgcggtgccgccgtcagacatcgcggcgcatcttggcaagctgctggaatcgaaggaggcggccgatgtcacattctatgtcggggaggatacctttgcggcgcacaaggtcgtgctcgcgatgcgatcaccggtcttcaaggcggagctctttggcccgatgagggaggcgggggcacaggtcttacccatcaaagacattcagcctgatgttttcaaggccctgctccatttcatctacactgattcattgtctatcattgatgatcttgtgggagatgaccgtggtgaaatgattcggcacttgctcgtggccgcggatcgttacgccatggagaggctgaagctgatatgtgaaagtgacctctgtgagaatcttaatgtgcagactgtggcagctaccttggctctagctgatcaacatcattgtgcgtcactcagggatgcttgcattgagtttatgtcctcttcttcaatggatgatattgtggcgacacaggggtttgtagatctcaaaacaaattgtccttcagtcttggtggatgcatttgtgaacatgagtatgctcaacaaaaggtag

SEQ ID NO: 11417 - DNA, 804 bp, Oryza sativa
  Clone ID: TFbOSC934j.C1.o1.fg
atggcgtccatgtacaggcttccaaggaacgccatctgcgctgcgtgctatgaaggtgccaaggccatcatcgccttcttcaacgacgacgacgacgagcacgccgatgctgatcaaggctcggtgaagcccagcagattgacaaagctcaatagcacaaccaagggattgagagatgcgtgggaggaggtgaagcagatgcgatgcagagaggaggagaccaagcagagggcatcgtttctccagcaaggcttcgcggcggcgtggaaagacggcatccacaccgacatcgccgtcaggcctggaactgggcccccaatccaagcccataaggccatccttgcgaccaggtcggaggtgttccgccacatcctcgccggcgacgacgactgcaaggcccccgccggcgactctctgtcgctaccggagctgacccacgacgagctctcccacctcctcgccttcctctacacgggctccctggcgacgtgcacggaggagcggcacctgcacgcgctgctggtcgccggcgacaagtacgacgtgccgttcctccggcgagcgtgcgaggcgcggctggcggcgggggtggaggcgggcaacgtgctgcggacgctggaggtggcggagctgagctcgagcgcggcgctcaaggagcgcgccatgggggcggtggtggagcacgcggaggaggtggtgttctcgccggagtacgaggagttcgccgtcaggaacgccgccctttgcgtccagatcacccgcgctctgcttgccaataaagcatttcccgccaagacgccttaa

SEQ ID NO: 11418 - DNA, 1206 bp, Oryza sativa
  Clone ID: TFbOSC400049j.C1.o25.fg
atgtcgttcgctggcgtatctttcatctgcgacggcgtgcacgtgtgttcttctccggccaatggcgccgccggcagcgccgcctatgggtaccacctccttgtcatcaacaactacacgcgcacgaagcaagccatccccaatggatttcgcatcaagtccggcaagttcaagctaggaggccacacttggcacatcaagtactgccccaacggcgaccgatcgaccatctcgggcttcgtctccttccacctcgttcttgattgtgacggcggcgatggcgccgtggcggcggagcccgtgaatgccaagttcgagttcagcttcgccgaccaggtcgcgaagcatcaggcgacgcggctgcgcgcgaccaaggtgtgcgagttctcccgcgactgcagcgcgtggcacgtcgggcggttcgtgcggagggaggcgctggagcggtcgaggtatctcgtcgacgactgcttcacggtcaggtgcgacatcatggtcgtccacgccggcgccggcgccaatggcgtggccgccgccacggcggctccatcgatggccggcgcggtggagagcttcggccgcctcctggacacgaagcttggcgccgacgtggcgttcgaggtcggcggcgagacgttcgccgcgcaccggtgcgtgctcgcggcccggtccaaggtgttcgacgctgagctcttcggccccatgaaagaaggcacggcggcgagcgtcgtgcggatcgacgacatggacgccgatttgttcaggggactccttagcttcatctacacggacgaattgcccgagagagaggaccacggcggagaaaaggagacgagctctgacgacgacgacgacgacgacgacgacgacaatggtgctcaatcggaccaaaaacacaaacaatttacatggctgcagcaattgatcgtagccgcggacagatacgatctgcagaggctgaagcttctgtgcgaggaggagatgtacgaccacataggcgagaagacggtggagaccatgctcatcctcgccgatcaccaccattgccgcgtgctcaaggacgcatgcttgggtttcctcgggtctcatggcaacctgcaaaagatgatggcggctgatggcttggatcgtgtgatcaagaacttcccctctcttaccaaagagattatcggcagatttgcagtcgtcatggcaaacaaatcttag

SEQ ID NO: 11419 - DNA, 1188 bp, Oryza sativa
  Clone ID: TFbOSC569j.C1.o1.fg
atgtcgacggcgacccccacgcccaacgtcgtcgacggcgactgcggcggcaccccgccgtcacggtcagcctccaccatcatcgcggcacgaaccctccatgtgctcacgattcatggctactccgacaccttgaaatccaacgtcgaccctagccagcacctgctcctttcctctccgttcagcgctggaggacacacctggtgcatccgctactgcccaatcgggtgcactgaggaaagcaaggacttcatctccatctacctcgttctcgaggacaccatcaccgacgtagtatcggcacaggttacgttcagcttgctcgaccaacaggggaacccgatgccatctcacaccctcacaaccccactgcttaaattctctcttcaaggcactctacctaaggccctggggtataacagcttcatcagaagagacgacttagagcgatctggacatctcaaggacgattgctttgccattggggtccatgtggttgtcaccaaggaagcagaaccgtcatccatcaccgtgccaccatcggacatgcacctgcattatggcgatcttctctcgagtgaagaacggtacgccaccgatgttgagttcctagttggcggcgagaccttcaccgcgcatcgattggtgctcgcagcacgatcacctgtcttcatggtggagctttttgggccgatgaaggagggtactactgtaaacaagatacatatatttgatatggaggcgcaagtattcagggctttacttaagtttatctacacagacatgttgccggagatggatcaagaagatgagaccgcaatggttcaacatctacttgttgcagcggataagtatggcttgcataggctgaagatgatctgtgtagaaatattaagtaaccatattgatgcctactccgtggcaaccatcttggtgctagctgagaagcactattgctatggtctcaaggaggcatgctttgagttccttaactcctcagcaatattgtccgcgattgtaaatacaagtgactttctgtatttgatccaaagctgccctgatgttttggaggacataagtttcaacatcgttgctcgtcaattggagagagcaattttcctatcagaaaaccaagaaggccaaatcaacagcgtagaaatcagaattaattcggtcatgacaaattga

SEQ ID NO: 11420 - DNA, 159 bp, Oryza sativa
  Clone ID: TFbOSC569j.C1.o2.gm
atgggagtcgtcaaatcgtcagcagttgtgttcttgatggagtcggatcaattaaaggaaatttatccagaagagtccgagttcaaggaggatgcggcatggatcaaattgactggcacgcccgcacctcaccaagatttggacctgcactggagctaa

SEQ ID NO: 11421 - DNA, 741 bp, Oryza sativa
  Clone ID: TFbOSC401835j.C1.o31.fg
atgtggtgccagtcgtgcaaggaggagtacgaggaggaggacgccgggacgtgcaaggagtgctacgaggaggcgagcgagacggaggaggagctcaagcgcgagatcgacgacctccgctcccgcctccacttcctccgcctcccttccccttccctcgacgcctcctccctctcccactccgacctcctcctccacgccatccccgccgatgcgcccgcccgccccgacacccccgccgtccccgcccaccgcgtcatcctcgccagcagatctcctgttttcagagctatgcttgagaacgagatggaagagagccggagtggcatcatcaaaatatacgatgtgtcctacgacgtccttcgtgctttcgtccattacatgtacacagcagaagctctccttgacgagcagatggcatctgatctcctggtgttggctgagaagtacgaagtgaagaacctgaaggcctactgtgagaaattcttaacatccaaagtgagcaacgacaatgccatcacgcattatgcgtttgcgcatcgccacagcgcgaagcagctgctcgagacatccctggcagcgatcatggacaacatgtcaacgctggcagatcgggaggaatacaaggagcttgttgagaaggacccaaggcttgttgtggagatatatgaagcctatctgaacagacaagtgaacactgctgctgggaaggagacagattccagtagtaggaaggggtaa

SEQ ID NO: 11422 - DNA, 1767 bp, Oryza sativa
  Clone ID: TFbOSC401916j.C1.o9.fg
atggactatttcacggggacggggactatcgtggtctccgacgacagcctctacgccgccttcggctacggcgaccccttcggcttcgccccgcgcgcgaggcccccgatccgttccctgcccttcgccgccggcggctaccagtggtgcctctggttccaccccaccaccttcgccggcttcttcggcttcggcgtcgagctcctcaccgccggcgccaaggccagggcgtccttcgagttcggccccgtcgacgccgcctcccacaacgtcatcgtgcggatgccgcccttcctcttcgaccacccccaccaccccatggtcatcatggtctggcccaaggccatgctcgccgaggaggcgacactgttcgtccgcgaccacgccgtcgtgttccgggtcgacgtcaccgtcgtcccggacgagccgctgcctccggacgccggcgtcggcgacgacgacgtgctgccgccctcggacatgctggcccagctcggcaacgtctacgacaccaaggagggcgcggacgtgacgttctccgtcgacggcgagctattcgccgcgcaccgggtcatcctcgccatgcgctcgccggtgttcagggcggcggtgtacggcgagatgagggagagcggccgcggcggcggaccgatcgccatcgacgacatgcgccccgacgtgttcgacgcgctgctccgctacatctacaccgacgccctccccgccgccgccgacgacgacgacatggaggcaacgtggagcgacctcctggtcgccgccgaccggtacggcgtggagaggctgaagctgatctgcgagcgcgcgctgcgcgggaggctcgacgccggcaacgtcgccgacatgctggcgctggccgaccggcagcactgcgagacgctcaaggatgcttgcatcaagttcatggcgacgtcggggaagatggaggaggtgaaggcgagccagggattaataaagatggtggccgatagagaaacgggagccaaagaccaaatcggcgtctaccttgagctcatcaccaagggaaccaaggcgagagcctcctacaagctcagactactcaaccatgtcaccgcctgtccttgcttgtggtacacctgcccactcaaaatctatgactctatcgatgataacaaatctttcacctggggaaccaagaaattcgctgacaggagcaagctagaagtcgcatcggagtatctacaagacgttcgcctcgtaatcgagtgcgatgtcatgccattagtaaggatcgaagcgatcgcggaaatcatccgatcaccttcttctccttggtcgcaactgtcagaagacattggcaagctgctagagatggagaccggacggagccgacgtgagcttcaaggtcaacgctccactttgaacaccattgatcgtgtcgctagcaccataagacgggccaatgagagggaagagaaatatctcggtgaagaagagaggaaggagttgatcaagcatctgctcattaccgtggatcgctatgctatcgaggggttgaagacgatgctcgaagacggactctgcaaggtccttagcttaggcaacgtcaaggagatgtttgccctaactgatcagcatgattgcagcatattgaaggatgtgtgttttgaatttatcacctcctcatcggtccatggattgggcgatgtggctttgagtgaagggtatgagagcctacgagaatcttgtcttgctgccatagtagatgccttacagcgagtacaatag

SEQ ID NO: 11423 - DNA, 1110 bp, Oryza sativa
  Clone ID: TFbOSC400049j.C1.o7.fg
atgtcccccgccgtaggccgtggcaacccgccgtcgcggtcagcctcctcctccaccatcgtggccgagacggcgaccgggtatcacctcctcaagatcaacggctactccctcaccaaggccaccacccccaccggctcgtttctcccttcgagcccgttcaccgtcggcggccaccgctggaacatcaaatactaccccaatggagatgacgtcaagaccgccgattacatatctttctttctcgtactagaagaagaagagaccaacatgggtttgacggtgcaggccaagttcaagtttagtttcgctaaccaggtgaagaagcaaccttcgctgaaatacaggcccataaagacatttaatctcgaggattcttgtggttggggctatgtggagttcatcaaaagggtagatctcgagaagtccgatgatcttagggacgattctttcaccatccggtgcgacattgtcgtcgtccgtgagatccgcaccgaggagacgaccgagatactccccgtcgaatcctttgtacccgtgcccccgtccgacatggaccagcagttcggcgacctgctggagaccgagaagggcgcggatgtggtgtttgaggtcggcggccagacgttcgccgcgcaccggtgcgtgctcgcggcgcggtcgccggtgttcagggcggcgctctacggctcgatgaaggagggcgacactgatggagtcgtgcacattgaagacatggaggcgcaggtgttcaagctgttgctccgcttcgtgtacaccgactcgttgccggagatggagacggaggaagacgtcgtatgccagcatctgctcgtcacggcggatcgatacgacctgcacaggctcaagctgatgtgcgagaacaggttatgcaagtacattggtgtaagcacggtgtcgaacatcctggcactagctgatcagcaccactgcgacgggctgaagaaggcgtgcttcagttttcttggctcaccggcgaacctgagtgctgtcgtcgccagcgacggcttcaagcatctgagcaggagctgcccctctcttatggaagaactggtcgttatgcttgcacttccgcctagtcatgcttag

SEQ ID NO: 11424 - DNA, 363 bp, Oryza sativa
  Clone ID: TFbOSC405157j.C1.o3.gm
atggcatcgctgtacgggtcgatgagggagcaccgcgcgccgcggatcgccgtcgacgacatggagccggaggtgttcgacgcgctcctccgcttcgtctacagcgacacgctggcgctccccggcgacctcggggaaggcgagtacaaggagatggtgcggcagctgctggaggcggccgaccggtacgccatggacaggctcagggtgatctgcgagctcatcctctccaggagcctcgacgccaagaccgtcgcggcgacgctcgccatggctgaccagcacagcactactgcgacgcgctcaaggatgtttgtgttcagttcatggccgttgggttggatgaccacaattaatgattga

SEQ ID NO: 11425 - DNA, 1503 bp, Oryza sativa
  Clone ID: TFbOSC400049j.C1.o3.fg
atggccaccgccgcctgcggcgagagcccttcgcggttgggctccgcctccgccatcgtcgccgacacggagaccaggtaccacctcctcaagatcggctgctactcgcgcaccaaggcgacgacccccaccggctccttcctcagttccggccagttcaccgtcggcggccaccgctggcgcatcaattactaccccaatggggaaagcgccgactccgcggattacatatcgctttacctcttgctagacgacaaggccaccaatagcagtgtgaaggtgcaggcacagttcaagttccagattagttccaccgaccaggtgaagaacacaccttcattggcatccacgaatgtaaatacatatggtgaggattctagctggtcttggggtcacagaaagttcatcaaacgggaagatttcgagaagtccaatgatctcagggacgactccttcaccatccggtgcgacgtagcggttatcggagagatccgaactgagaagacgaccgagatcccatcagccacaacattcgtcactgtacccccgtctgacctgaaccagcagctcgtcgacctgctggagaccgagaagggcgccgacgtggtgtttgaggtcagcggtgagacgttcgcggcgcacagatgcttgctagcagcccggtcgccggtattcagcgcggagctctacggcttgatgaaggagggcgacaccgccggagtcgtgcgtatcgaagacatggaggcgcaggtgttcaagctgttgctccgcttcatgtacaccgactcgttaccaaagatggaggaggaagacgtcatgtggcaacatctgcttgtcgcggcagatcggcatgatctacagaggctcaagctgatctgcgaggacaggttgtgcaactacattggcgtcagcacggtgttgaacatcctggtgcttgctgatcagcatcactgcgacgggctgaagaaggcgtgttttagttttcttggctcactggagaacctgagtgctgttgtcaccggcgatggcttggagcatctgagcaggagctacccctctcttatgaaagaactatttgttgtgatggcacttccaccgaatcatgttctgaacctttctcatcaggtatactatgaaaaccaaaacttcaatgttttactgcttttgatcaagaatagtgacttgactggagttaatttgaagaaaacaggctggcagggcccgtcacttgtgtctgaatatgatgtatcatattcttcaggggatccaggaaaattgccaccaatcgagcgtgtgactgtggagaatgctcaaggggtggatcactgccccgtttcagcttccggcagagagtggtgctcagcttgtggactggtggctgatggcaaggagcgtaatgcccggatcttcgagcagagatcgcgcacagcaggtcagctatttagtggcatcagagagatcatgatctggaaggaggctggaatttttcggcaatgtgattag

SEQ ID NO: 11426 - DNA, 982 bp, Oryza sativa
  Clone ID: TFbOSC401879j.C1.o6.np
cggcgcagacggtggcgagcacattggcattggccgaccgccatggctgccgcgggctcagggaagcctgccgaggattggtggacgaagagatcctcgccgccgtcgtcgggggtgatgaagccgaaccccttggtggcgtcgaaccacttcaccgtccccttcaccctctccgacgccatctcgacctcgccctcgccctctcgccgccgccgccgccgcaacccaaaaccctagaaaccctagatcgtcccaggcgttcccggcgtgggggcacctgaggttcatgcggcggcgcgagctggaggagatggggttcgtccgcgacgaccgcctcaccatcgagtgcgtcgtcaacgtcgtcctggaccccgtcgtcaccgccggcgacgcgccggagctcgaccatccgccgtcgaacatcctcggccacctcgccgggctcctcggcgacaagggcaccgccgacgtgacgctcgtcgtgcggggcgaggagttcgccgcgcaccgggcggtgctcgccatgcgttcgccggtgttcaaggcggcgctctacgggccaatgaaggagtccacggacgcgaacgccggccgcgtcgccatcgacagcgtcgagccggcggtgttccgggctctcctccacttcatctacaccgacacgaccgccgccatggacgacctcgacgacgacgacgacgacaaggcgcagatgatcatgcaccttctcgaggccgccgaccggtacgacgtcgagaggctgaagctgatctgcgagctcatgctctgcaagagcatcgccgtggacaccgtcgcggcgacgctggcaatggcggatcagcaccattgccagaagctcaaggaggcgtgcatcgagttcttggccacctccaagaagatggaaggcgtcatggaaagccaagggtacgagaagatgaagctatcttgcccttctttcatggtggatttgtgggagataataggc

SEQ ID NO: 11427 - DNA, 1036 bp, Oryza sativa
  Clone ID: TFbOSC31366j.C1.o2.gm
atgggtcaatgcgccatgtctcacacgcgctctaccaccgccggcgccgccggcggtaagccgccgatcgcgccgccgccgacgtcctccgcctccgccattgtcgccgacacggccagcgggtaccacctcttcaagatcaacgactactcgcgtaccagggacatcttccccaccggcagtgccctcaagtcccgcgcgttcaccattggcggccaccaatggcgcatccattactaccccaacggcaacacggaggagtgcggcgagtacatctccctgtttcttcatctcgacgagattgtcaccgacaagaacgtgtacgcgcagcacgggttccgtttattcgacgagtttgccggtgataatgatgacgatgatgaactgcagccttcctccatcgctgacctcgggcaggtcagtacctttggtggcaacaacattgggttgggacgactgaggtttatcaaaagggaagagttggagaaatcgaagtatctgaagaacgactccttcaccgtcagatgcgatgtcgtcgtcaccaagcggatccgctcggaggagacgccattggtggtgaggacctctccaaagccaaaggtggcgaggctcgtcaccgtgccgccgtccgatctgcaccggcatcttcaggacctcctctgcgccgagaagggcgccgacgtggtgttcgaggccggtggcgagacttttaccgctcaccggtgcgtgctcgcggcccggtcaccggtcttcagcgcggagctgtttggatcaatgaaggagagcgacaccacggtggtcatccgcatcgacgacatggaggcacaagtgtttagggccttgctccgcttcgcgtacaccgactcgttgccggagatgaaggagaaagacgaaggcgccatgtgccagcacctgctcgtcgcggcggacaggtacgccatggagaggctcaagctggtgtgcgaggagaagctatgcgagcgcatcgatgtgagctcggtggcgaccgtcctggcgctagctgagcagcaccatt

SEQ ID NO: 11428 - DNA, 390 bp, Oryza sativa
  Clone ID: TFbOSC400299j.C1.o36.gm
atggtcgccgccgccgaatttccgtcctacgtctccgtgccgccgtccgacctgcaccgccacctcggcaagctgctcaccagtggggacggcacggacgtcactctcgaggccggcggcgagacgtacaaggcgcacaggtccgtgctcgccgcccgctcgtccgtgctcaaggcggagctcctcggcccgatggcgcagccgcggagcaccgccgccgccacgccaacgcgcatcaacgacatcgaggcgccggtgttcagggcgatgctgcacttcatatacaccgaccacctgagctcgaccatggcgaccgacggcttcgagcatctcaccacaagctgccctgccattctcaaggagctcatgtccaagcttgttgttcactga

SEQ ID NO: 11429 - DNA, 1401 bp, Oryza sativa
  Clone ID: TFbOSC400294j.C1.o19.fg
atgacttacaaacctgtcagagatgagttgtctatgccaggtgttcacccgtcacatcagggtgaccgagtgtccggccatgagaaagacgacctgcagagctctggagtctggaggtctagctctttactgaacatgttgtccatagctcaaacgctgaaaatagcaagagatcggtctagcttaactcatcacgcctctactattaaacattgcaagaccttcagaatgctccatccatctccagaatcacatcctaccttcagaatgacagacaactgcaacactttctccaccattgtcgcggaggccgtgagcgggtcacatgtgatcaagatagctgggtactcaagaatcaaggtgttactccgcaacggtgagtccctgacatccatccctttcagcgttgcaggccacagctggaccatcagattctaccccaacggtgattccgcggagagccaagattacctatcgttctatctgatccttgactccgccaattcctacgacgtgaaggtgattttcagcttcgagttgcttggcaagaatgggagatcagtgtcgtcttacagcttcactacagatctccgcaccttctcctacaaaggctcattgtggggatacaacaagttcattcaccaaacggtattggaagaatcgtcagcccatttaagagacgattcgttttccatcaggtgtgacatcaaagtgttcaaggagatctacagccaagaaaccaagggtgttcatagcaagtttgtggaggttcctccaagcaacctgcatcaacatctaggcaacctcctagacagcatggatggatcagacgtggtcttcgaggtcggcgaggagagattctctgctcataggtgcgttcttgctgctcggtcatcggtcttcaaggccgagcttcttggcaccatgaaggagaaagccgatggagccattcaagtcgatgatatggagcctggagtgtttaagtctttgctgcatttcatttacaccgattccctggacacgatggctcaagaagatcagagcagagacgaagcaagcgaggaggaggatttggtgatggctcagcatctacttgtcgcagcggaccggtacaacgtcgagagactgaagctgatatgcgaggagaagctatgcgagagcattgactccagcatggtggcaaccagtttggcgttagctgagcagcacaattgcaatgggctcaaggaagcttgctttgagttccttgcatctccttccaacctactggagatgatggcaagcgatggttatgaccatcttaaaaccagctgccctgctgttctcaaggagctcactacaagatttctgcctccggaaacgaaagcatcagaagagataaccattggtctatataattag

SEQ ID NO: 11430 - DNA, 1842 bp, Oryza sativa
  Clone ID: TFbOSC900305j.C1.o6.fg
atgacatcacatggggagctcaaagacatgtttgtaaagattcttcacttttcacagaaagtgatatccaatgacaagatattgaaagcaatgacatcaaatgggaagctcaaagacatgtttgcaaagattcttcactcattgcctgcaaattatggaaaggaaaagcacaataatgtggagaatggcattacacttgttggggcatcacgtgaaattctcatcgatgttgtatggaagaaagtgatattcaatgacaagatattagaagcaatgacatcaaatgggaagctcaaagacatgtttgcaaagattcttcactcattgcctgcaaattatggaaaggttaaaatgaaaagcacaataatgtggagaatgaagagtttaattattgtcaccattcaagggagtaaatacaagtatcttgaaccactatctttgatcatggaccagcttagtacaatgttctactgggctgaagatcgtttacatcctcggcagggtgaccgagtgtccggccatgagaaagacgacctgcagagctctggagtctggaggtctagctctttactgaacatgttgtccatagctcaaacgctgaaaatagcaagagatcggtctagcttaactcatcacgcctctactattaaacattgcaagaccttcagaatgctccatccatctccagaatcacatcctaccttcagaatgacagacaactgcaacactttctccaccattgtcgcggaggccgtgagcgggtcacatgtgatcaagatagctgggtactcaagaatcaaggtgttactccgcaacggtgagtccctgacatccatccctttcagcgttgcaggccacagctggaccatcagattctaccccaacggtgattccgcggagagccaagattacctatcgttctatctgatccttgactccgccaattcctacgacgtgaaggtgattttcagcttcgagttgcttggcaagaatgggagatcagtgtcgtcttacagcttcactacagatctccgcaccttctcctacaaaggctcattgtggggatacaacaagttcattcaccaaacggtattggaagaatcgtcagcccatttaagagacgattcgttttccatcaggtgtgacatcaaagtgttcaaggagatctacagccaagaaaccaagggtgttcatagcaagtttgtggaggttcctccaagcaacctgcatcaacatctaggcaacctcctagacagcatggatggatcagacgtggtcttcgaggtcggcgaggagagattctctgctcataggtgcgttcttgctgctcggtcatcggtcttcaaggccgagcttcttggcaccatgaaggagaaagccgatggagccattcaagtcgatgatatggagcctggagtgtttaagtctttgctgcatttcatttacaccgattccctggacacgatggctcaagaagatcagagcagagacgaagcaagcgaggaggaggatttggtgatggctcagcatctacttgtcgcagcggaccggtacaacgtcgagagactgaagctgatatgcgaggagaagctatgcgagagcattgactccagcatggtggcaaccagtttggcgttagctgagcagcacaattgcaatgggctcaaggaagcttgctttgagttccttgcatctccttccaacctactggagatgatggcaagcgatggttatgaccatcttaaaaccagctgccctgctgttctcaaggagctcactacaagatttctgcctccggaaacgaaagcatcagaagagataaccattggtctatataattag

SEQ ID NO: 11431 - DNA, 1791 bp, Oryza sativa
  Clone ID: TFbOSC412646j.C1.o23.fg
atggaggataaggtgctacccgagtggtatagtaaagaagataacggtgagtacctctcgctcttcctcgagctggtccgcgaatccacttccaacaatgtcagggccatttttgacgccttcttggtggaaaaagacgacgagccatcttccacccacgcagacaggggcgtgcatgttcacccaaccaatggctataccgcatggggatggccacagttcgtgaagcgaagcgatctcgagtcgtcgtcgtcgtcgtacgtggtggatggcaaggtcagaatcatgtgtgtggtcatcgtcatacgagacaacaccgtgcccgtgccaccgtctgacattggtgcccatctcggtggcctgctggaccgcggggaagggacggatgtctccttcctcgtcgacggcgagacgttcccggctcaccgtgccgtgctcgccgcccgctcgccggtgttccgtgccgagctccttggttccatggcggagtccaagatgtcctccatcactttacacgacatcgagcctttgacgttcagagctctacttcggttcatctacaccgacaagttgcctgccgacgacggcggtgatcagctcaagatggcagcaatggcgaccgatgagctattccagaaattgcttgcagctgctgataggtatgatttgagcaggttaaagttgatgtgtgcgcagaagctatgggaggcagtgtcagtggacacggttgcgacgacattgatccacgctgagatgcatggttgcccagagctgaagagtagctgtcttgacttcttcgtgcaggacaagaacttcaaggagaccgtgctaactgagggctatgtgcaattggtgcagcgttttccctcgattaaggatgagatcagaggtcgcaccgaaaggaagaagggcggaggctgcctgctagcggggagaagggcgaggcgcggcaaccatcgggttgggaagctggcgagcatgcgcggagagagggaggaggcggggaggccgatgaatgggacggggaggccggcgagggggcgaggaggccgacgagtgggatggggaggccggcgagcatgcgaggagagggagaaggcggggaaaagggcggagggtgatagccatcgggtggggaggccgatgaacgggacggggaggtcggcgtgcgcgcgaggagagggagaaggcggggaaaagggtggagggcgacagccatcgttgcacggagggggaggaggcggggaggccctcagcgcgtcgatcctggtggcctcaactccccgcgtcttcacccgcgacgccgccggtagtctccatcctgacaacagcgacgctgccggtgtccatcctactgcttctgccacacccttgataatgggtgctagaaagctatgtgtagctttggtctttgggctgctggcagcagacgtgatggtaacaagcatattgaaggggtcgtttgttttgatgttggtgcccaaaagctttgaatctgaccacgcaagggttcgtggccagcaacaaccgaaagtttgccaagggcttatggccggcaacaccgcaacaggagactgccagactggagacggggagaggcgtgtgaggctcagagaggcttgggcgttcaggcgttggcgattagaggatagaggcggccctggcgtgccggtggccagccggccactcggccaggcgcccggcgacctggcgccatcgacgcggagagccggagaggagacacgtcgcggtcgcggagttagggagtcactcgtggaagcggaatcgtga

SEQ ID NO: 11432 - DNA, 1113 bp, Oryza sativa
  Clone ID: TFbOSC410511j.C1.o2.fg
atggcgtccaactctccggcgacctccgacgccgccaccggcgacgtgccggagccgagcaggtcgtccagcgtcgtcaaggcaatgtccgggtaccacgtgctcaagatggaggggtacgccgccggggtcaagggcctcggcgttggcaagttcatcgactccggcagcttcgacgtcggcggccatcgctggtgcataagatactaccccaaacgcagcccggcctcccccggcgacggcgactggatatccatctacctgaacctgtgtagcacggccgccgccatcggcgacgccaatgcaagtttcaccattagtctcctcgaccaggacgacgacgagcatcagccggtggcggcgcacagccggagctgctcctcaacggttaccttctcctccgccgccaccaaggcttggggtttcccccgattcgtggagaggaagacgttggaggagtcgccatacctgagggacgacagcttcgtcctccgctgcgacgtcaccgtcttcaaggagaccatcatcgagccagctgctccgacgccgctcgtcgccgtgcctccgccggacatgcaccggcatctcgggagcctcctctccggcgggcatggggcggacgtcacgctccaggtcggcgacgagacgttcgcggcgcaccggtgcgtgctcgccgcccggtcgccggtgttcatggcggagctcttcggcccgatggcgacgagccgtcacaacgacagggagacgatccgtgtccacgacatggagccgagggtgttcgaggccatgctccacttcatctacaacgactcgttgcccaaggtagacgacgacgaggtggtagccatggcgcagcatctgctcgtcgcggcggacaggtacggcatggagaggctgaagctgatgtgcgaggacacgctgtgcagccacgtcgacgccagcacggcggctacggcgttgacgttggctgagcagcatcactgtgaggggctcaaggatgcttgcttcaaattcatggcggatcctgataatctcaaggtcgtcatggagagtgacggctatctgcatctgacaaggagctgctcttatgttcttaagaagttggctacttga

SEQ ID NO: 11433 - DNA, 843 bp, Oryza sativa
  Clone ID: TFbOSC401965j.C1.o5.fg
atggcgacaacgacggcgacgacacttgcggccagcgccggcgacggttcttccccgccgtcgcggtccaccgtcatgaccatcgcggcgcaggcttatcacgtactcaagatcaacggtgcaagggggttcaaaaacttcattaggagagacgaattagagcgatcggaatatctcaatgatgactactttgccattgctgcccatgtaatcatcccaaaggaaaagccatctgtcgtcgtaccaccgtcgaacatgcatctgcattatggtgatctcctcgtaagcaaagaaggcaccgatgtcaagttcctggtcggtggcgagatgtttgcggcgcaccggttggtgctggcggcacggtcactggtcttcaaggcagagcttttcgggccgacgaagaaaggcaccatagatgcgatacagattgacaacatgaaagcacgagtgttcaaggctctacttgggttcatctacacagacatttggccagagataggtcatggaaaagacaatgtagctatggctcaacagttgcttgctgctgcagacaggtatggcttacagaggttaaagtttgtctacgaagataagttgtgcaaccacattgatacatactcagtgtcaaccatgttggtgctagtggagaagcaccattgttgcaaactcaaggaggcatgctctacgttccttagttccatgagccctcctattgttgaagatccaaattccagcatatttggtagtgaattgaagaagacggtttcttcttcagagaaccatggaagtcaaattaaccgtacagatattaggattcaactgtggcaaaatgcagatgtctag

SEQ ID NO: 11434 - DNA, 1065 bp, Oryza sativa
  Clone ID: TFbOSC401879j.C1.o12.fg
atggagacagtaagaggaacgcaccggtttacatttcacggctacagcttgtgcaagggcggcggcgccggccggtgcattcgctccggcaccttcaccgtcggcggctacgactggtgcatctgcttctacccggagggccagggcggcggcggcggcgaccgggaacacgtctcggtcaagctcaggctggtcacccgctgcgccacggccaccgcgttctacgagctccgcctgctcgaccaggacaccggccgcgccgccgccgtcgcccgggcctccggcgcgcccagggtgttcgcgtcgagcaatcccggcacagcgtgcttcggccgccgcgcgttcatggagcggagcaagctggaggcgtcgcccgcgtgcctgcgcggcgacagcgtcgtcatcgactgcgccgtccgagtcgtcgtccacgaccccgtcgtcgccgccgtgcggcgccgcgaggcgccggacgacgtcccgccgtcgaacatactccggcagctggtggcgcaggtggagtccgagggcgccgacgtgacgttcgccgtgcagggggagacgttcacggcgcaccgcctgatgctcgccgcgcggtcgccggtgttcaaggcggagctctacggcgccatgaaggagaaggacgccgaccacgtcatcgccatcgtcgacgtgcagccggccgtgttcaaggccctcctccatttcatctacaccgacgacatgccacccgacctcggcctcgccgccgctgacgacgacgacaccgacagaatcgacatggcacgccacctgctcgtcgccgccgaccgatacgccgtcgagaggctgcgggtgatctgcgagcgcgtgctccggcgaagcctcggagtcgagacggtgatcgacacgatggcattggccgaacagcatagctgcggcgagctcaaggaagcttgcctcgagttcatcgattctcatagcaagcgaatcgtggagagtgatggttacaagaacctcaagagggcgtgccctttgctcgtcgcagacatgtgggagaggatcgtcctatcacgtctagagtaa

SEQ ID NO: 11435 - DNA, 2091 bp, Oryza sativa
  Clone ID: TFbOSC900182j.C1.o6.fg
atgagcttgcttgaaaattcagtagattctaacctacaaatccatcgaacgactaataataggaaggcggcgctggcccgcgaggtccgcacgcaggtcgacgccctccaccggtgcttctcctggcgccacgccgaccgcgccgccgccaagcgcgccacccacgtcctcgccgagctcgccaaaaacgaggaggttgtgaacgtgatcgtagagggcggcgccgtgcccgccctggtgtgccacctgaaggagccgcccgcggtggcggtgttgcaggaggagcagcagcctcggccgttcgagcacgaggtcgagaagggggctgccttcgctctcggcctcctagcagtaaagcctgaacatcaacaacttatagttgacgccggtgccttaccactgctggtgaatcttctaaaaaggcacaaaaatgctacaaacttgcgggcagttaacagtgttatcaggagagcagctgatgcaatcaccaatctagctcatgaaaatagcaacatcaaaacttgtgtcagaattgaaggcggaattccacctcttgttgaattgctagaatcacaggatctcaaggtgcagagagcagctgcaggggccttgcggacgctggctttcaaaaacgatgaaaacaaaagtcagattgttgattgcaatgcgttgccaactttgatattaatgcttcgatcagaggatgctgcgattcactacgaagcagttggtgtcattggaaacttggttcattcatccccaaatatcaagaaagaggttctcaatgcaggggccctgcaacctgtaattgggttattaagttcctgttgtacggagagtcaaagagaggctgctttgttgctagggcagtttgcttcggctgattctgattgcaaggtccatattgtgcaaagaggtgcagtccgtccgctgattgaaatgctacagtcagctgatgtccaacttagagaaatgtctgcttttgcccttgggaggcttgcccagagaagttcatttgtttcccaggacacacataaccaagcaggcattgcatataatggtggtttggtgcctctactaaagcttctagactcaaaaaatggatctctgcaacataatgctgcatttgccctttacggagttgctgacaacgaggactatgtgtccgacttcattaaagttggaggtgtacaaaagttgcaagatggagaatttatcgtgcaggccacaaaggattgtgtagctaagacccttaagaggttagaggagaagataaatggacgagtgttaaaacacttgctttatatgatgagagtaggagaaaaatctgtgcagaggcgggttgctctggccctggcacacctctgtgcgcctgaagatcaaagaacaatttttattgataataatggccttgagttgcttcttgatcttctggtttcggtgagcctgaagcatcagctagatggttcagtagcactatacaaattggccaacaaagctgcagcactttctcccatggatgctgcacctccatctccaacaccacaggtttatcttggtgagcaatatgtgaacagttcgacactttcagatgttaccttcttggtggaaggaaagcgcttttatgcacatagaattgcattacttgcttcttcggatgcatttcgtgcaatgtttgatggcggatatagggaaaaggacgcgagagacatagaaattccaaatatcagatggaatgtgtttgaactcatgatgagatttatctatacaggttcagtggaagtaactagcgatatctctcaggatcttcttagagctgctgatcagtatctattagaaggcctcaaacgtctgtgtgaatatacaattgcgcaggatgtgaatgtagacaacgtttctgacatgtatgacctatctgaagcttttcatgcaatgtcactcagacatacatgtgtcctatttatcttggagcagtttgaaaagatttgcgtcaaatctgggtcaagccagctgatccagcgtgtcatcccagagctccgcaacttcttcgctaaggcgctaaggccaagccacaggaatgcgcagccatga

SEQ ID NO: 11436 - DNA, 1149 bp, Oryza sativa
  Clone ID: TFbOSC423269j.C1.o4.fg
atggcgacggagtgcacgacgtcgacgagcacgacggcgacggtggaggggcggcacaggttccgcgtcgccgggtacggcgccaccaagggcgccgcgcccggccaccgcgtggcgtcggggaccttcaccgtcggcgggttcgactgggccgtcgtgttctacccggagggcgtcacggccgccgacatggacttcgtctcggtctacctcgagctcaagaacgccgccgccgccgctggcggcggcggaggcggcgcggtggcgcgcgcgttctacgacctcaggctgatccacccggccaccggcgagccgcggtccgtgcgctggcccatggacggctcgacgtcgcgcgtgttctcccaggcgttcccggcgtgggggcacctgaggttcatgcggcggcgcgagctggaggagatggggttcgtccgcgacgaccgcctcaccatcgagtgcgtcgtcaacgtcgtcctggaccccgtcgtcaccgccggcgacgcgccggagctcgaccatccgccgtcgaacatcctcggccacctcgccgggctcctcggcgacaagggcaccgccgacgtgacgctcgtcgtgcggggcgaggagttcgccgcgcaccgggcggtgctcgccatgcgttcgccggtgttcaaggcggcgctctacgggccaatgaaggagtccacggacgcgaacgccggccgcgtcgccatcgacagcgtcgagccggcggtgttccgggctctcctccacttcatctacaccgacacgaccgccgccatggacgacctcgacgacgacgacgacgacaaggcgcagatgatcatgcaccttctcgaggccgccgaccggtacgacgtcgagaggctgaagctgatctgcgagctcatgctctgcaagagcatcgccgtggacaccgtcgcggcgacgctggcaatggcggatcagcaccattgccagaagctcaaggaggcgtgcatcgagttcttggccacctccaagaagatggaaggcgtcatggaaagccaagggtacgagaagatgaagctatcttgcccttctttcatggtggatttgtgggagataataggcaggaagatgacctcttattctgttattcccaatatctatgcaagagacaaggactaa

SEQ ID NO: 11437 - DNA, 2068 bp, Oryza sativa
  Clone ID: TFbOSC100059j.C1.o4.np
ctattgaggcgattaatgctggtcatggagtcgaggcgtctcagctttccggtcgatcggccgcgagtccactctgtcggcttgtcttcgccaccgccattgctgataacaacaacgacttcaccgccggcctgcctccgtcgccgccgagtggtgcctccgtctacacggctggcctattatgccgccgctgttgggcgtctacgacttcaccgccggcctgcctccgtcgccgccgactggtgtctccgcctacacggctggcctattatgccgccgctgttgggcgtctacgacttcaccgccggcctgcctctgccgccactgactggtgtttttgcctatacggttggcggactccgccgctgttaatgggcttcatcatctacaccactggcttggttccactagcgctgactggtgtttttgtcaccattgatggactgctttattcccacatcggctacttctgctgtcatcgagggaatacgacaaagctaagtcatcatttatttcattctttatatgatattttgtcttttcctttgcctcactacatcaacttcaccaccggctcgcctcgaccgccggcgattggtgtttccgcctgcacggctggcctttatgccgccgttgttgggcgtctacgtcttcaccgaccggccgcctcgtccggcgccgactgatgcttccgcctgcacggctggcctattatgccgccgttgttgggcgtctacgtcttcaccgaccggcttgccttcgccgccgccgactggtgttcccgcctgcacggctggcctttatgccgccgttgttgggcgtctacgtcttcaccgaccggcttgccttcgccgctgccgactggtgtttccgcctgcacggctggcctttatgccgccgttgttgggcgtctacgtcttcaccgaccggccgcctcgtccgccgccgactggtgcttccgcctgcacggctggcctattatgccgccgttgttgggcgtctacgtcttcaccgaccggcttgccttcgccgctgccgactggtgtttccgcctgcacggctggcctttatgccgccgttgttgggcgtctacgtcttcaccgaccggcttgccttcgccgctgccgactggtgtttccacctgcacggctggcctattatgctgccgttgttgggcgtctacgtcttcaccgaccggccgccgcatccgccgctgactggtgtcactgcctgcacggctggcctgttataacaccaactgatgctaccttcttcacggtgccctcacctctacgtctggtttatacagctaccactactgatggacatcatcgtcttccgttgccgactggttatgccgccgccgactagtgcttttatcttcacaactgcgcgtcttcgctaccagtttgcttctgttgccgccgacttgtgttcacttcatcacggcgatgcaactttgtcatcatggtggagcgacttcatctttattatcttcggcactggcaaattctattgctgctacttcgcaagttttactacttcaccaaccacgacgtctttgtgaacctcgacatctcggcatgcaatgccatgatattttactacaacaagtgactctccaatattcaggatttctacttggacaccttcaacacatatcttcaatcaagcaatgactactcgacgacaagaagctataattctcgactctatgttcagttgtttcccaactaaccaaagaacattctacttcaacaacttcaaatatttcggtttagacgagttgggcaacaacatcaactctcctccaattatttgtcttcacggttggcctactacgcaactgccgatagaggatctcatcgttatcatcggctgctacatcgctattgactggatcaccgacatcgtcatcttcatcaacatcttgtcaagcctcatcaacatagcctactctgctgccgttgatgggaaacttcatcatcatagtcagctatctctgttgccgctaatcatcattaccgtcggatgcgtttgtcgccgccgattattttcttcatcttca

SEQ ID NO: 11438 - DNA, 323 bp, Oryza sativa
  Clone ID: TFbOSC100059j.C1.o5.np
atgataaaaatcagattgagtttccccctgactgatttggatcaagtcagagaagaggagcttgaagaagtggtcgacggaaaggaagtgaaaactcccgaagcgaaaacgaagtcggcgactcatgaagttaattccatcgtgctcgttgataggaaactcgacgcaacccctacctggcgcgccaactgtcgaaacatgaattcggcaataataaaacggggtagcgcacgagacctaaaagtggatggatgtggagacaaaggatttagacaggttcaggccctctcaatgagaggtaataccctactcctgtttgggga

SEQ ID NO: 11439 - DNA, 1068 bp, Oryza sativa
  Clone ID: TFbOSC400305j.C1.o22.fg
atgaagcggcaccagatggagtcggtgccgaggacggtctcgacggtggtgcccaacacggcggaggccacccacgtgttcgacatcgtggggtacagccagatgaaggggaggggccgcgaggagcacgtcacgtcggggaccttcgtcgtcggcggcctccactgggccatcctcctcttcccggacacccacgtcatcctcctcgacgacgaggaagacaacgtcaccgccttcctcgagctccagagccaggggggaagcaaggtgcgggcgtgctgcgacgtcaggctggtcgaccagaccaccggcctcgcctcctctgctgcgccggcgcagccggatgccaagacattcaaggtgttcaatgccgatgaatccaacagggtcagctgtctcaagatgaagaggaccgaattcgaggcgccgccgtatctcgtcgacgatcggattaccctggagtgtgtggtcactgtcaagaaggagccgagggtgtcgagagctagaccagtcccgaggatcaaggtgccgccgagcaacatgatgcagcaactcggcgatctgctggagtccaaggagggggcagatgtggtgttcgatgtcgcgggggagaccttcccggcgcacaagcttgtgctggcgatgcggtctcctgtcttcaaagcggagctatgcgggccgatgagggagagcgggacagagcctatcagcattgtggatatgcaaccggttgtgttcaaggccctgctccagttcatctatactgattggttgccgtcaattcgtgatcttgagggagacgataacagcgagatgatccggcacttgcttgtcgccgcggacagatatgctgtggacaggctgaagctgttgtgtcaaagcatcctttgcaagaatcttcgtgttggtaacgttgcaactacactggctctggctgatcaacatcattgtggcatgcttaaggatgcttgcattgaatttatgtcatgtccaaacatgttggatgatgtagtggcatcccaagggtttgtggatcttgaaaacacagctccttctctcgtcgcttag

SEQ ID NO: 11440 - DNA, 903 bp, Oryza sativa
  Clone ID: TFbOSC405158j.C1.o2.fg
atggagacggcgccgtcatcgtccatgtcaccggccagcggcacgtacgtcttggacgtccacggcttcagcggcctgaggaggcagcactgcggcggcggcggctgcatcgtctcgccgacgttcaccgtcgccggcctcgagtgggccatccggtaccacccggagggcgacgccgacgaggtgaccgacgacgtggccgtgttcgtcgtgctggtcaccaaggacgccacggcgtgggcgcacgtcgaattccggctgctcgaccaggccgccggcgagatggtcaccttcttcggggagaaggatccgatcttgttcgactccggcagcgaggacctgtccacctggggcaccggagagctcaccgccaggagcttcctagacggctcgccatacgtcgcaggcgactgcctcaagatagagtgcgccgtcgacgtctgccgcgaccgcctcacgttccaccacgacacgccgccctccggcgagccgttccgccagtaccccgccgacgacgagccggccgacgtcaccttcaagatcgccggtgagaccttccccgcccatgtctccgtgctcgccgcccgtgctcccggcctgctcaccaacacgacgtcgcaggcggcaaccatcaccatcgacgacgacgacgacgacacgccggcggcggcggcggcattcggagcgctcctccacttcgcctacaccgacacgctccccgtggcgagcggcctcgacggcgccggccacacggcgctgctggggcgcctcctcgtcgcggcggggcggtacggcatggcgaggctgggggcgatctgcgagcgcgccatgtgcaggagcctcgacgcggggacggcggcggacacgctggccatggccgacggcacggcttcgacgcgctga

SEQ ID NO: 11441 - DNA, 1035 bp, Oryza sativa
  Clone ID: TFbOSC401879j.C1.o11.fg
atggcatcgtctcgccccatctcggagagcaccatcacgaggtcgacgtgcgcgacgcggacggcgcgcgccacgcaccagttcgagatcgtcgggtacagcctcaagaggtgcctcgccgccggcgagttcgtccggtcctccgccttcgccgcctgcggctacaggtggtccgtccgcgtctaccccggcgggttcgggccggcgcaccgggagttcgtgtcggtgttcgtcaagatgatgaccaacaggggcaaggcggcggcgcggttcgacctccggctgatcgaccgcgccaccgggctgccccgctcggtgttccgggcggcgcagccagtggtgttcgactactccgtcaagcacaagaagtgcaagggcaagcggggcacccgcgcgttcatgcggcggcgcgacctcgagtcgtcggcgttcgtccgcgacgaccgcctcatcgtcgagtgcgtcatcgacgtcgtcgtcgccaacggcggcgacgacgacacggcggccgcggcgtcccccctcgccggcgtgccggcgccggacctgtcgaggcacctcggcgagctgctggagcgggcggacggcgtgggcgcggacgtcacgttcgacgtcagggggcaacccttcgccgcccaccggatcgtgctcgccatgcgctcgccggtgttcatggcatcgctgtacgggtcgatgagggagcaccgcgcgccgcggatcgccgtcgacgacatggagccggaggtgttcgacgcgctcctccgcttcgtctacagcgacacgctggcgctccccggcgacctcggggaaggcgagtacaaggagatggtgcggcagctgctggaggcggccgaccggtacgccatggacaggctcagggtgatctgcgagctcatcctctccaggagcctcgacgccaagaccgtcgcggcgacgctcgccatggctgaccagcacagcactactgcgacgcgctcaaggatgtttgtgttcagttcatggccgttgggttggatgaccacaattaatgattga

SEQ ID NO: 11442 - DNA, 996 bp, Oryza sativa
  Clone ID: TFbOSC400239j.C1.o24.gm
atggatatcgggccgcatagcatccagctgatcgcgccgccgtccctctatcacgccgcctccgctgccgccatgggtgatcaccgcgacccggctttccccgcggcggcgggcggctgccggctgcccaagacgtcgtcggtgagcgtcacggagtccgtcaccgcggtgcacgatttcaaggtgacgggttactcgctgatcgaggggctgggcatcggcaggtacgtcagctcatccaccttcaccgtcggcggcgtcgactgggccgtcaggttctaccccgacggctccaccgtcacctgcctcgggaacgcgtcggcgttcctctactactgcggcagggagaaggaggtcaggaccaggttcaccctgaatctgctcggcaaggacggcaaattgtcgcaggtgaccaattcctacatgaagcacaccttctccccggcgagtgacaattggggattcatcaaattcgccgagaaatcgaagctgcagagctcgccgttcctccacaacgactgcctgaccatcaggtgcttgctgaccgtcgtcagggaatcccacaccaaggatgttgaggtcaattctgttgttgtcccaccgtccaacctgcataccgattttgagaacatgctccaggatggtgaaggttcagatgtgacattcaccgtgggtggccaagagttccgtgctcataaatgtgttcttgccttccggtccccggtgttcaaggccgagcttttcggtccgatgaaagaaaatggcacgcaatgtatcaagatcgacgacatggagcctgaggtttttgaggctcttcttcacttcatttacacagataggctgccagatagctgcagagatggcaaggctgcagcaatgcagcacttgctagttgccgcggatcgggacagccttaccgaaattgctcctatggaggaattcttcatcactcacagaataagctgtggagaaatcgacgccaggagcttcgtgtga

SEQ ID NO: 11443 - DNA, 2157 bp, Oryza sativa
  Clone ID: TFbOSC400049j.C1.o33.fg
atgtcgtcgccgtcgtcgcagcagccggcgtccgccatcaaggcgcccacgacgagcggctaccaccgcctcaggatagactactaccgcagcctgggatcccccactgggtgggcgctctcgtcccgcgacttcgtcgtcggcgggcggcagtggagaatctcctactaccctaacggcaaccgcccggagaacgccgagttcatatcagtgttcctgtgcctggacagctcttctccgaagccggcgatgctgcaggtgacgatcaccttcgacgatgaggccaagaagcagtcgcagcttcgtaaggcccccgtgatcaccattgcaccgggagcttgttggggatatcacaggttcgtgaagagggatgatcttgcgaggtcgaagcggatcaggcccgacgggttcttcacgatacggtgcgacgtgtccctgatcgaccacttcacggcgcaggaggacgagccggtgttcgtctcggtgccaccttccgagctgcggcgcgacctcggcggcctgctcgacaccgggagcggcggcgacgtcgtgttccaggtcggcggcgaggccttcaccgcccacaggggcctgctcgcggcgcggtcgccggtcctcgccgccgcgctctacggcccaatgatggaaggcggtggccttcaaggcggcgtcgctatcaagatagacgacatggatcctctcgtgttcaaggcactgctcaggtacgcctacaccgactcgctgccgccgcagatgcagcagggcgagctcgaggaggagggacgcgccatggcgcagcatctcctcgccgcagccgatcggtacgggatggaacggctgaggctgctatgcgaagctcagctttgcaagcacatcgaggtggccagcgtggcgagtatcctgatcttggccgaccaacacggatgctccggcttgaagaacgcttgcttcgagttccttaagagccctgggaagtttgcagctgccatggcgacacaagagtacgattacctgaagacgaaccactgtgctctggcggatgaggtcgtcaagggaaaccaggcaaaatggatgctagctactgttgaaactttcatgaggcaccgactgaactctaagagcattttagagactgctacaagagaaattgcgctccacgcctccacatcaaatgagacaccccctgtgtttctcgacctggaggaatcccttcgggccaagggcgatatgacgctgcgcgaggaggccacattgaaggtcttgaaggtggtcgcgaccctgggcaaggccatctccaccggggcgatcgccgccgtggggtattatgttcccggcattgttggagctaaatttggtgaaccatctcttcctcggctaccaagattcgccatggctgctgtcacttcatggtttgctggaaaggtgatgtattatgcaatcttgcaaggaagtactgaattcattttgaaacatggagaagaacgcatgaagatggagctatctaacataatactcaataagcacagtgatgataaaacactggttgaagctgtaaaaacgcagttctttgctgagcatctgtttagtgatcagtatcaagataggacacttttcaggtggcatctacgccgtacttatgttgacagcgcctttatggaaagggtgaaggagatcgaagtgaagagctcaaatgatgggcctggattaatttctggacagagaattataagcactagaccatttggagacctcatggaggacccactggcgtgtatacttggttctccagacagcaacatggaaagcaacaagtctgctgagcacacgggtactatcgtgaagagaagggagattgcttgcccacctgcagttctggttgaaccaatcaggttgcaacctaatgtgcccatctgcagtttgttagcacgatcgcgaacagggtcaaatttggaggtgaacccggtgattcttgacctggaggaatctctactggccaaggggaacatgacgcttgaggaggaggtcacaatccgggtcagcaagatgaccgcgagcgtgttcaaggtcttcgccaccgcggcgtttggtgcgtcgagttattatgccctcggcctcggtgagctttctctgcatgcgcgcgcccgtctcgatctgtga

SEQ ID NO: 11444 - DNA, 1797 bp, Oryza sativa
  Clone ID: TFbOSC9666j.C1.o2.fg
atgcctttccattcctcggctacaatcaatctccgtacctcgtacctcgagccggtggcgtcgcgcacgtacggtggcaacgtgcacaggttcccgagccccaggggttcttcctcgtggggattccacaagttcatccgccacgacgagctcgagaggtcgggccacctcaccggcgaccgcttcgccgtccgctgcgacgtcaccgtcatgagggccacggagctccgcgtcgagccggcgtgcctcgccgtgccggagccggacctgcgcgcccacctccgccgcctcctctccaccggcgacggcgcggacgtcacgttcagggtcggcggcggcgagacgttcgccgcgcataggtgcgtgctcgctgcccggtcgccggtgttcaaggccgagctctgtggtcgtggcggcgcggccgccggtagatgcgtcgacgtcgacgacatgggcgccggggagttcggggctctgcttcacttcgtgtacacggacacgttgctggagatggcctcgcgcgacgtgccagccatggcgcggcggttgatcgcggcggccggcaaataccaagtggagaggctgaagctggtatgcgaggacatgttgcgcaggcgcgtcgacacgagcatggccatggcgacgacgacggattcggcagctaccaccgacgatcagcttagccagcgtccatggctgacgcagcttttcttcaagtttgcatcacgcatggtcggtggcatggtcgtcgacgcgttcacacctgagcctcccactgccgccgagaaatccggcgacgcctcgccgtcgctatcgccatcgccgtcgtgctcgaccgtcgccgtctccgaggcgagtggtcaccacgtcctgaggatagagggatacaagaggacgaagatgatgatggcaaccggcgaacacctcaactccggcgagttccacgtcggcggctacacatggcgtctccggtactatccaaataggtacgaccaggagttctccagctcgatatccttcgctctggtgcggaccggccgcgacgacgacgatgtcgtcgtccgagcacgcgtcaagatcagcttgctcgacgtcgccggcgagccggtgacacggtacagccacagcgacaacaagtgcacgttctacgagggacatgatctctgggccatcaagagcttcatcaggagggttgatctggaggattccgggcatctcgacgacggcggcggtggcggcgactccttcgccgtccggtgcgacctcaccttcaacgtcccggacatccgcgtcgacgtcgacgacgcggccgccgtcacggtgcccgccgtgccgccgcctctcctgcatcgccacctcggcgacctcctcgcctccgaggcggcggccgacgtgaggttcaatgtcgacggcgaggcgttcgcggcgcaccggtgcatcctggcggcgcggtcgccggtgttccgggcggagctgttcggctccatgcgggagcgcgccgcgagggccatcgtccgcgtcgacgacatggacgccgacgcgttcgcggcgttcctgcacttcgtctacaccgacgagctgccggagatggacgacgatggcgaggaggcggcggcggtgatggcgaagcacctgctcgtcgccgccgacaggtacggcatggagaggctgaagaaggtgtgcgaggacgtgctgttcaggcacgtcgtcgtggccacggcggcgacatcgctggcgttggccgagcagcatgactgccccgagctcaaggacgccatcttgaggtttaagctctag

SEQ ID NO: 11445 - DNA, 924 bp, Oryza sativa
  Clone ID: TFbOSC34061j.C1.o16.fg
atggctagcagttcgacatcgtcgagatgcctgacggcgagcgtcaccgggacgcacaacttggaggtgacgagctactcgctgctcgaaggcatgggggtcggcaagttcgtgagctcgaccaccttctccgtcgccggctacgactggaacctccgcttctaccccgacggcatcacggacaacgacagaaaggaaggctacggggctgtttggatgcttgcttcagtttaccaaatttctatagctaaggaacatgcaattcgccggattcggttcactggcaacgacagcttcaagatcgagtgttcgctgaccgtcataagcgagtctcgcgctgaagacgtgagcacgatcccagtcccgccgtcgaacctgcaccagcacctcgccggcatgttgcacggcgtcgagatcgcggatgtggagttcagcgtcggcggcgagccgttccgcgcccacgcgtgcgtgctggcggcgcggtcgccggtgttcagggcggagctcctcggaccagctgctgcacggagcatcaagatcgacgacgacgacgacatggagcccgcgacattcaaggcgcttcttcacttcatctacacggatcacctgccgaacgactccggattcggcaaagacgcggcaatgcagcggcgtctgctggtggctgccgatcgctacggggtggacaggctgagggcgatgtgcggggtcaagctgtacaagagcgttagcgttgggacggtcgtggattccctggaattcgcagagaagcaccactgcgcgcagctcaaggatgcttgccttggattcatggcttcacctaacgttcttggtgtcgtcaggaaaaccgatggattcaagcgtctcgtggagggctgcccttgggtcttgaaggagattttagacaaggtgcctagattctga

SEQ ID NO: 11446 - DNA, 1149 bp, Oryza sativa
  Clone ID: TFbOSC401668j.C1.o19.fg
atggaacatcggggaacgcgcggcgagcacagcccggtgcgcatgaaacatctcgctgccaacagagaaggagatgtccgagccattggcgctgcccaccatgatgccgagttggttccccaggttggaaggtggcactgcaataggttcgttgtggttgcgcagaatgatgaggccacatatgaatgtaaccacatagcgagagtcaagttcactcagcttgacgaagcgccaccaggcatcaaagcggaagccctgggatgccttgcttaccagcagactcctctgggaatgttgcacggctggtattccaccttgtgctcgatgaaattggagacgagatccatcacacatggctgggtggggacgccgaaggctggggtgggagatcgggagatgaggatagtgacgggacagcgtcggaggctgggaatgcttctcgttggagagcgtaggagccgggggggggggcagccgtgcgagccgccgaagacgagggaggagaggtggggtggggaaatttcgctggagatgaagaagaggagtagcggaggaggtgggggttggggagtacggatggcctcgtcggcacggtgccggcggcgcgcgcgagggttgggggatggagcggccgcgatacacatgtgccgggtggaccacttgaacggctccgacgtgttcttcttcgtcggtggcgagacgttccatgcgcaccgggccctgcttgccgtgtgctcgccggtcttcaaggctctgctccttagctccacggcggaggcagcagcctgcagcatcaccctgaacgacatcaagccagcgatgttcgaagctttgctgcacttcatgtacaccggcgacttcctgccagcgggagcccactcgtcgtcgcctgacagcagcgacaccaacaccgacacgctccaccggctgctcgcggcggcgcacgagtataagctcgacaggctgaagctcatgtgcgcccgaaaactcgaggagagcttgtcggtggagacggtggcgaggacactgggctatgccaagatgtgcggctgctcggagttgaagagcaagtgtctcgacttacttcttcttggcgaagaagaacatcaaagcattggccacacatggctacttctggctctggcataa

SEQ ID NO: 11447 - DNA, 1275 bp, Oryza sativa
  Clone ID: TFbOSC400432j.C1.o4.fg
atggacgacgacgccggcgacgcctcgccgccgccggccgccgcgggggttggcgccaccgccgcccagtcgcgggacatggcggcgtcgccgaccagctcccgctccgtgacggagacggtgaacggctcccaccgcttcgtgatccagggctactcgctcgccaaggggatgggcgtcgggaagcacatcgccagcgagaccttctccgtcggcggctaccagtgggcggtctacttctaccccgacgggaagaaccccgaggacaactccgcctacgtctccgtcttcatcgccctcgcctccgagggcaccgacgtccgcgccctcttcgagctcacgctgctcgaccagagcggcaagggcaagcacaaggtccactcccacttcgaccgctccctcgagtccggcccatacaccctcaagtaccgcggctccatgtggggttacaaaaggttctttcggcgaaccgctcttgagacgtcggactttttgaaagatgattgcttgaagataaattgcactgtgggtgttgtggtgtcgactattgattactccagaccacactctatcctggttccagactctgatataggctatcattttggtacgcttttggacaatcatgaaggggtcgatgttgttcttagtgtgggaggagagagatttcatgcacataagttggtgttggctgcacgatctactgtatttagatcaaaatttttcgatgatgaggatggggagaagaatgagcctggtgagaatgatgatgtacaagagattgttattgatgatatggaaccaaaggttttcaaggcaatgcttcattttatctacagagatacacttgttgatgataacgagttgggtgggtcaagctctgagggctctatcttcgatacattggcagcgaagttgttggctgcagcagacaagtatgacttagcaaggctaagattgctatgtgaatcttacttgtgcaaagccatttctgtggctacagttgcaagtactctagcattggctgatcgacaccatgctatggagcttaaagctgtttgcctaaagtttgctgcagaaaacctttcagctgtaatccggaccgaaggattcgattacctcaaggacaactgcccatcacttcaatccgagatactgagaactctcgccggctgcgaagaggagtgcagcagcggcggcaagagccagagcgtgtggggtcagctctcggatggtggtgacacgagtggccgtagggttaggccaagaacctaa

SEQ ID NO: 11448 - DNA, 1218 bp, Oryza sativa
  Clone ID: TFbOSC400049j.C1.o10.gm
atggtggtcgagcaacgccccaaccaccaacgcttggggcgcattcacggcgccaaggacggtgccccgctggctccaaggatgttgcttcaagtgcttgggcctaagggtttccggccatgccgcccgccgcccgccgcccgccgcctgagcccgccgcggtcggactccacctccaccatcgtggccggcacggcggccgggtcccacctcctcaagatcgacgggtactcgctcaccaaggggacccccaatggctcgttccttatctccagccagttcaccgtcggcggccaccgctggcgcatcaggtactatcccaacgggttctcatccagctccgccgatttcatttcgcttttcctcgtgctagacgagaaggtgaaggtgcaggcgaagtcggacttccagatcagttacaccggccaggtggatgagccaccgtggttggcaaccatgaaagcggatactttcgatggtgcgggctttcggtctttcggctatgaaaagttcgtcagaaggtgtgactttgagaagctcatcagggacgactctttcaccatccgttgcgacattgttgtcatcgacgagatccgcgccgaggagtcgaccgagatcaccaccaccacagccgccgtcgtcaccgtgcccccgtctgacctgaaccagcagctcggcgacctgctggagagcgagaagggcgcggatgtggtgttcgaggtcggcggccagacgctcgcggcgcaccggtgcgtgctcgcggcgcggtcgccggtcttcaaggcggagctctatggcttgatgaaggagggtggcaccgccgccggagccgtgcacatcgaggacattgagccgcgcgtgttcaaggtgctgctccgcttcatgtacaccgactcgctcccggagatggaggaggaagacgtcatgtgccagcatctgctcgtcgcggcggaccggtacaacctcgagaggctcaagctgatctgcgaggagaagttgtgcaggcacattagcgtcggcacggtatggaacatcctgccgctggctgatcagcaccactgtgacgggctgaagaaagcgtgcttcgatttcctcggctcactggcaaacctgagtgctgtcgtcgccagtgatggcttcaagcatctttgcaggagttgcccctctcttatggaagagctggttgtcacgctggcacttccagggagtcatgcttag

SEQ ID NO: 11449 - DNA, 1077 bp, Oryza sativa
  Clone ID: TFbOSC9665j.C1.o2.fg
atgtctaccaagaaatccggcgccgccgacgtccagccatcgccgtcgtcgtgctcgaccatcgtcgtcaccgaggcgagcggccaccacgtcctcaagatcgatggttacacgaggacgacgatgatggtcgccaccggcgaacacctcgactccggcgagttccacgtcggcggctacgcctggcatctccggtactaccccaacggctacgaccaggagttctcgagctcgatatccttcgctctcgtccggaccgccggcgccggcgacaatgtccgtctccatgcgagagccaagatcagcttgctcgacctcgccggcgagccggtggcacggtacagccaacccgtcgacaagtgttccacctccaaggcaagcgatccatgggtttgcaagagcttcatcgagagggatgagctggagaagtccggccatgtcgtcggcgaccgcctcgccgtccggtgcgacctcaccttcaacgtgcaggaccgcctggtgagggagctcgtcgccgtgccgccgcccctcctgcgccgccacatcggcgagctcctcggcgacgccaggacgtccgacgtgaggttcaaggtcggcggcgagacgttcccggcgcaccggtgcgtcctcgcggcgcggtcgccggtgttcagggcggagctcctcggccccatgagggagcacgccgcgacgaccatccgcgtcgacgacatggacgcctccgtgttcgccgctctgctgcgcttcgtctacaccgacgagctgccggagctggacggcggcagcgcggcggcgatggcgcagcacctgctggtggcggcggacaggtacgacatggagaggctgaagaaggtgtgcgaggacaggatggtcaggcacctcgacgtcggcacggcggcgacgtcgctggcgttggccgagcagcacgattgccctgagctcaagaaggccatcctgaggttcatggcgtcgccggcgaggttgaaggcggtcatggcgagcgatgggtatgagcacctggtgacaagcttcccctccatagccacggagattcttgcaatgtttgctgcacattga

SEQ ID NO: 11450 - DNA, 1257 bp, Oryza sativa
  Clone ID: TFbOSC401824j.C1.o49.fg
atggagagagtgttgatggcatgtcttgagctggattcttcacaattcctactgaatggggatggcagtgtgatcggcagcccatttgatatccagcttgagtgcaatagcttcacaggctccaaagctgttcaagatcatagccgatatactcttccttcacagtgcactaatgcccctgatccacctccattacccggaacttcttatggcacacacagaacttccaggaatgcaaaggcttgcaggtgtgtccctgaagagatccaggatttctgggacaggatgttcttcgaagcgtatcaatatgatctccgtgttttgacggaagatggcaatgagatcatgtcacattcctgcgttgttggtattaaatctcctgttctaagagctatgttggaagaagctaaagtacaaggtggcatccgacacatcctgatacctggtgtaccatcagaagcagtacatgttttcatcagatttctttattcctcgcgttttgagcagtatcagatgaagaggtatgtacttcatctgcttgtactctcccacgttttctcagtaccatctctgaagagagtctgcatcaaccaactggagacatctttgctttctcctgagaacgtggtagacatactacaacttgctagactgtgcgacgcgccgcggctctccctcgtatgcactcgtatgatcatcggagatttcaaggctatcactcaaacagaagggtggagagtgatgagacaagccaacccaagcctggagcaggagctgcttgagtccctcgtcgaagaagatacaaaaaggcaagagagagcaagaaggctggaggagaataaggtttatctgcagctacatgaagctatggaagctcttattcatatatgtcgagatggatgcaggacaattggccctcgagatcaaacgctaaagagcagtcaggccgtttgcaggtttcctgcctgcaagggcatcgagctgctcctgcgccatttctcggcgtgcaaaatgcgggtgcctggtggctgcgctaactgcaagcgcatatggcagcttcttgagctgcattctcgcatgtgctctgcacttgaaacttgccatgttcccctctgtaggcatttcaaggagaaaatgcaacatctgagcagaaaggaggaggccaagtggaatcttttggtgtccaaggtgttggagagcaaagcaacaaccagttccatctcagaaaggagaaaatttccatccctgaaaacatag

SEQ ID NO: 11451 - DNA, 708 bp, Oryza sativa
  Clone ID: TFbOSC401315j.C1.o10.fg
atggatggaacggacgtgacattcgacattggtcaggacatattctcagcgcacaagtgcatactcgctgctcgttcatctgtcttcaaggctgagttctttggcgccatgagtgccaaagcccataggaccatcaaaattgaagatatggaagctggtgtgtttagatcactactgcatttcatctacactgacgctctgcctgagacggctttagatgttgtgatgactcagcacttgcttgtcgcagcagatcggtacaatgtagagaggctgaagctgatttgcgaggagaagctgtcaaagcacattgactccaacatggtggctaccactttggctctagctgagcagcatagctgccacggattgaaggaagcatgcttcaagttccttagttctgatgccaatcttgagaggatgaaggccagtgaaggttatgagcatttgaaggttagttgcccatttgttctcaaggaacttattgcgagattcatctctccggaaatggaagctgcaagggaaataaccatggatcttcaaaacttgaagatttgggttgaaacttttgatagtttgtgttataattttgagaattataagaagttctggagatccaataaagataccagaaaaggaaaggaaatggtgttctgcacccatggacggatctacagtagaaaggccggtgtcaggcgacaccgataa

SEQ ID NO: 11452 - DNA, 1098 bp, Oryza sativa
  Clone ID: TFbOSC400305j.C1.o15.fg
atggggacgggatccaagaagaagaagacggtgtcgtggtgcacgacggaggtatcggagggcacgcacgcgttcaagatcgtcggctacagcctcaacaagggcatcggcgtcgggaccttcatccggtcgggcaccttcgccgtcggcggccacgattgggccatccgcctctaccccgacggagtcaccgaggattccatggactacgtgtcggtgtatctggagctgatgaccgagaacgccaaggccatggcgttctacacgctgggcctggttgatccggtcaccggagggatccgctgcaattggtcccgatcatcgccgaggctgttcgattcctccgattcgagccgtttcgggccaagatccccactcttcataccgagaagtgatctggagatggaggaatctggctacattgtgaatgatcgcctcacggttgaatgcgaggttactgtcaccaaggggccgcaggtgtcaagaaccattggttgctctgaaatcggcgtgccaccttcagagctatctgaacattttgggaagctgttggaggaggaagaggatgtagggagggatgtggttttcagtgtcgagggagagtccttcgccgcgcacaagctcgtgctcgccgcgcgatcgcccgtcttcaaggcggagttttacggggagatgattgaaaggggcacattttccatagatatcaaggacatgcagccttctgtcttcagggctctcctgcatttcatctacactgatgtgttgcctgctgacattggcgatcttgagggagatgattatgtcgaatttatccggcatctagtcgtggcggcggatagatatgccatggataggttgaagttgatgtgccaaagcatccttggaaagtatgttgatgtgaagaacgtggcgactacgctggctttagctgaccagcataactgtgataagcttaaggatgtttgcattcagtacatttgctctctggatgaggttgatgctatggtcaggaccaaaggctatgcaaatctcaaaagaagttgcccttctgtgttggcagatttatttgagaagacaagcaagttccgtgcttcttga

SEQ ID NO: 11453 - DNA, 903 bp, Oryza sativa
  Clone ID: TFbOSC401879j.C1.o10.fg
atggagacggcgccgtcatcgtccatgtcaccggccagcggcacgtacgtcttggacgtccacggcttcagcggcctgaggaggcagcactgcggcggcggcggctgcatcgtctcgccgacgttcaccgtcgccggcctcgagtgggccatccggtaccacccggagggcgacgccgacgaggtgaccgacgacgtggccgtgttcgtcgtgctggtcaccaaggacgccacggcgtgggcgcacgtcgaattccggctgctcgaccaggccgccggcgagatggtcaccttcttcggggagaaggatccgatcttgttcgactccggcagcgaggacctgtccacctggggcaccggcgagctcgccgccaggagcttcctcgacggctcgccctacgtcgccggcgactgcctcaagatcgagtgcgccgtcgacgtctgccgcgaccgcctcacgttccaccacgacacgccgccctccggcgagccgttccgccagtaccccgccgacgacgagccggccgacgtcaccttcaagatcgccggtgagaccttccccgcccatgtctccgtgctcgccgcccgtgctcccggcctgctcaacaacacgacgtcgcaggcggcaaccatcaccatcgacgacgacgacgacgacacgccggcggcggcggcggcattcggagcgctcctccacttcgcctacaccgacacgctccccgtggcgagcggcctcgacggcgccggccacacggcgctgctggggcgcctcctcgtcgcggcggggcggtacggcatggcgaggctgggggcgatctgcgagcgcgccatgtgcaggagcctcgacgcggggacggcggcggacacgctggccatggccgacggcacggcttcgacgcgctga

SEQ ID NO: 11454 - DNA, 1116 bp, Oryza sativa
  Clone ID: TFbOSC23856j.C1.o1.gm
atggcaaaccattgcaacaacacctcctctgtcacggttgctgaagttgcaagagggtcgcatgtaatcaagattgatggatacttaaggaccaaggagctgatggagaatggcaagtatgtttcatctatcccattcagtgttggaggtcatagctggttcatcacatacttccccaatggagttaacacagagagtaaggattacctgtcggtttttctgaccattgattttgcttgcgccgggggcgtgaaggcaaccttcagctttgcattgctagacaagaatggtagatcagtgcaattatacagcaaattgtaccctttacacaccttcacggaaaaaggttcagattggggccactctaagttcatgaagaaaactgatttggaacgctcagtacatttgagcaacgattcattctccatcatgtgcgatttgactgtcatgaaggatatctgtagcaaagaaaccacacaaaagcagtttgtggtggttcctcctagtgacctgcaccagcatctgggagacctcctcttgaagaacatggatagtacggacgtgacgttcaacgttggtcaggatatattctcagcgcacaagtgcatactcgctgctcgttcatctgtcttcagagctgagttctttggcgccatgagtgctaaagcccgtaggaccatcaaaattgaagatatagaagctggggtgttcagagcattgttgcatttcatctacactgactcactgcctgagactgctcaaaatattgtgatggctcagcacctagttgtggcagcagatcggtacaatgtcgggaggctgaagctaatatgcgaggagaagctatcaaagcacattgactccaacatggtggctaccactttggccctagctgagcagcacagttgctatggactcaaggaagcttgctttgagttccttgcttctcgctccaatcttgagaggatgatggccagtgatgattatgagcatctgaaaatcagttgcccgtctgttctcatggagcttgttgcgagccgtgcgccgccgccgctctggtcatcgtcgtcgctcgggaaggccgccgtcgggttcgccaagtcatcgccgtcctag

SEQ ID NO: 11455 - DNA, 1062 bp, Oryza sativa
  Clone ID: TFbOSC401315j.C1.o11.fg
atggcaaaccattgcaacaacacctcctctgtcacggttgctgaagttgcaagagggtcgcatgtaatcaagattgatggatacttaaggaccaaggagctgatggagaatggcaagtatgtttcatctatcccattcagtgttggaggtcatagctggttcatcacatacttccccaatggagttaacacagagagtaaggattacctgtcggtttttctgaccattgattttgcttgcgccgggggcgtgaaggcaaccttcagctttgcattgctagacaagaatggtagatcagtgcaattatacagcaaattgtaccctttacacaccttcacggaaaaaggttcagattggggccactctaagttcatgaagaaaactgatttggaacgctcagtacatttgagcaacgattcattctccatcatgtgcgatttgactgtcatgaaggatatctgtagcaaagaaaccacacaaaagcagtttgtggtggttcctcctagtgacctgcaccagcatctgggagacctcctcttgaagaacatggatagtacggacgtgacgttcaacgttggtcaggatatattctcagcgcacaagtgcatactcgctgctcgttcatctgtcttcagagctgagttctttggcgccatgagtgctaaagcccgtaggaccatcaaaattgaagatatagaagctggggtgttcagagcattgttgcatttcatctacactgactcactgcctgagactgctcaaaatattgtgatggctcagcacctagttgtggcagcagatcggtacaatgtcgggaggctgaagctaatatgcgaggagaagctatcaaagcacattgactccaacatggtggctaccactttggccctagctgagcagcacagttgctatggactcaaggaagcttgctttgagttccttgcttctcgctccaatcttgagaggatgatggccagtgatgattatgagcatctgaaaatcagttgcccgtctgttctcatggagcttgttgcgaggttcctccctcagcaagagaaataa

SEQ ID NO: 11456 - DNA, 1086 bp, Oryza sativa
  Clone ID: TFbOSC400049j.C1.o28.fg
atgggcgcctcggcgtcgtcgtccgccggccgcagcaagccgccgccgccgccgccgtgctccagctcgggcgtcgccgtgagcacgtctcgcgggtaccacctcttcgagatccgcaaccactcccgcatcaagtcgatgaccccgctgggccgcggcgagacggcggaggccgccgactacgccgccgtctacctcgactatgtcatcgacagctacccgcccaagtccgtcaccgcctacttcctcctacgcctcgtcgacaaggtctccaacgacctcatggacccgccgcccgacgacgacgtgcgcgccgccgcggtgcacgagttcagcgccgggcagaacagctggggctactacgcgttctggaagaaggacgagctggagagctcggggcgcatcgtggacgacgtgctcaccatccggtgcgacgtcggcgtcgtcggccggtacgccacggccaagacggacgccgccgccgccgccgcctccgtggcgtcgtccgtccacgtgccgccggccgacctggggcaccagctcggcgccctccgctcgcgcgcggtgggcgccgacgtgacgttccaggtcggcgccggctccggcgcgcgacggttcggcgcgcaccggtgcgtgctcgccgcacggtcgccggtgttcgaggcggagctgtacggcccgatggtggagcgggacgccgggcgcgtcatccggatcgacgacatggacccccaggtgttcgacgcgttgctcgacttcatgtacaccgacgccctgcccgggatgaggaagcgcgacgcggtggccatgtcgcagcagctgctcgtcgcggcggacaggtacgacctgaagaggctgaggctgctgtgcgagcatgagctgtgcaagcacgtgaacaagggcacggtggccagcatgctggcattggtcgaacagcaacgccctagctgccaggggctcaagaaggcatgctttgagtacctccgaaaaacaccgaaagttctacgtgaaatcatggcgacggaagcgttcgatcaccttgtgaatgagttgttattgtccaacaagcttgccatccgtgaatga

SEQ ID NO: 11457 - DNA, 1146 bp, Oryza sativa
  Clone ID: TFbOSC18902j.C1.o3.fg
atggcagctgccagcaccaccgatcaaggtgtagccgttatcaacgacagcccactgtgcaagctcctctcttccggcgacggtcggcacgtcacgttccgggtcgactacgcgggcgcgaggcgacccgccgtcgccggccgtacgctgtgcacgacgtgcgccatcggcgacagcggcgcgtacaggtgtgaggcgttcttcaggctgctgatcgggcggagaaagctggtcgccttctccgtgggtgtgtccggcccacgctaccgagacgtgcacaaggtggtggtcgatctcgtcctcgtcgacaatgccaggtcggtggccctgcagccgcctacgagatccatggctatccaggccgccgccgggagcaaccaaggagggtgcgggttgctcgtctccaaggattacctcgaggagaactgcgtgcaggatggcgtcctggtggcggtgtgctccgtgctctttctcccggagttgccaccttgcctatggctggactcgctaggccaccgtctcgccgccatgtcgaacaagaaggacagtactctcaccgacgtatgcttcgacgtcgatggcgagaggttcaacgcgcaccgcctggtgatggcggcgcagtcggaggtgttcaggagcttgctgttcggctccgatgacgccgagaccaagacggagaccgcagtcgtcaccatcgacggcatcagcgccaccaccttcaagcacatgctccactacatctactgcaaccagctaccgccaccggccaccggcgacggtgacgacgatgacggcgaggcagaccatgtcacgaggatcgccgagctgcagcggctgctcgtcgcggccgacgcgtacggggtggaggcgctgaggcaggcgtgcgaggacacgctgtgcgccgggatcaacatggacacggtcgcctcgacgctggcgctgacggagaaggggtcgtacccgaagctgagggggtcgtgcctcgagttcctgtccaacacgcagatttactcggtggcgaccaacgacgagtgctacgaggtggtgcagagctacccggacgtgctgacggagatacgggacagttgtctaatatattatcgttatgctactttcgtcgttgttactgagttagaggatttgtga

SEQ ID NO: 11458 - DNA, 1146 bp, Oryza sativa
  Clone ID: TFbOSC900359j.C1.o10.fg
atggcagctgccagcaccaccgatcaaggtgtagccgttatcaacgacagcccactgtgcaagctcctctcttccggcgacggtcggcacgtcacgttccgggtcgactacgcggccgcgaggcgacccgccgtcgccggccgtacgctgcgcacgacgtgcgccatcggcgacagcggcgcgtacaggtgtgaggcgtccttcaggctgctgatcgggcggagaaagctggccgccttcgccgtggttgtgtccggcccacgctaccgagacgtgcacaaggtggtggtcgatctcgtcctcgtcgacaatgccaggtcggtggccctgcagccgcctacgagatccatggctatccaggccgccgccgggagcaaccaaggagggtgcgggttgctcgtctccaaggattacctcgaggagaactgcgtgcaggatggcgtcctggtggcggtgtgctccgtgctctttctcccggagttgccaccttgcctatggctggactcgctaggccaccgtctcgccgccatgtcgaacaagaaggacagtactctcaccgacgtatgcttcgacgtcgatggcgagaggttcaacgcgcaccgcctggtgatggcggcgcagtcggaggtgttcaggagcttgctgttcggctccgatgacgccgagaccaagacggagaccgcagtcgtcaccatcgacggcatcagcgccaccaccttcaagcacatgctccactacatctactgcaaccagctaccgccaccggccaccggcgacggtgacgacgatgacggcgaggcagaccatgtcacgaggatcgccgagctgcagcggctgctcgtcgcggccgacgcgtacggggtggaggcgctgaggcaggcgtgcgaggacacgctgtgcgccgggatcaacatggacacggtcgcctcgacgctggcgctgacggagaaggggtcgtacccgaagctgagggggtcgtgcctcgagttcctgtccaacacgcagatttactcggtggcgaccaacgacgagtgctacgaggtggtgcagagctacccggacgtgctgacggagatacgggacagttgtctaatatattatcgttatgctactttcgtcgttgttactgagttagaggatttgtga

SEQ ID NO: 11459 - DNA, 1896 bp, Oryza sativa
  Clone ID: TFbOSC547j.C1.o9.fg
atggcgacggcgagcatcgcgtccaatgtcgccggcggcggctgtcccaccccgtctcggtcagccgccgcctccaccgtcgtcacaacgcaagcctatcacgtgctcaagatcgatggctactcccgcaccttacaagtccactgttacagatctctcagttccttcccgttcaacgcgggagaccgcacttggtacatctgctactacccacacggaaagaacgacattagcaaggacttcatctctatctacctcgttctctatgacgccatcgccgaggctgtcatggtgcaggctaccttcagcctgctcgaccagcacgggaaaccagtgccgtctcacacccacgccacccgactgttgagcacttcgaaccaagacgacatggctaacaacctagggtttgaaaccttcattgcaaagggcgacttggaaaaatcgggacatgtccaagacgattgcttcgctatcggggtccatgtggtaatcaccaaggaaacgccgccacccatcatcgcggtgccaccgtcgtcggacatgcacctgcattacggcgatcttctctcaagtaaacggtgcgccgatgtagagttcctagttggcggcgagaccttcgccgcgcacagattggtgctcgcggtgcgctcgcctgtctttgtggcggagcactttgggccaatgaaggagggtgtaaacgtaaacgacgtgatagagataaatgacatggatgcacaagtgttcaaagctctacttaacttcatctacacggatacgttgctagagatggatcaagaagaagatgcgacaatggctcagcatctacttgttgctgcggacaaatatggcctagaaaggctaaaggttaaatgcgaagaaaggttgagtaaccacatcgatgctgactctgtagcaaccctcttggtgctaaccgacaagcacaattgtcgtggtctgaacaaggcgtgcatcgagttctttagctccccaacagcactggctaagatcatagaaacagatgaatttcagtatttaacccaaagccatcctaatattttggaggatataatttctaacattgttgcttctcagttggagaaggcaattttctctccggaaaatgagggaggcaaaattaacaaggtagacattaggattcagccatggcaaaattcaaatgcccgatgtggcaaagcggcgggtgcagactgcagaggccggcaggcgaggcgggagagaggagggcggcggcgcgaccttgcggcggagcgcgaggacgtcgataccgcagatgtcgacgccgtcgaggagcacagcacccggcgcaggctcccagaggcggttgagcgcgcggagcagcgtggacttgccgctgccgctgggcccgatgacaccgacgaccacccctcgcggcacgtccaggtattgacggtcagatattatgatttaaggacsgtcaacacccgccccccccgccgccaccaccggcgtcccttcttccccgacgccgtccacgaccaggaggtgctccctgacatcatgctcttcaattcaatcgttgatcgcacatgtcagcagcacgtacactggaacacaaagctgacgcagaagagacgaggtgtactcgctcacctgaagctgagcccatcggagagacagcggagaagaagcaagcaggagagcggagaggagaggaagacgaagatagaaaaaacggaaatagcgggcgtcgactgttcaatcgtcgtcctcctttctgctccttccgccggtgaagatgaacgaggcatcgacgcctcagagaaaaacccccaccacacagagcatccaggcagcactgataggaagaggcctggctggagctcgacagccgacgatgaagacctgcagccgtag

SEQ ID NO: 11460 - DNA, 1344 bp, Oryza sativa
  Clone ID: TFbOSC413709j.C1.o6.gm
atgagcgacggggcgcgcgtggaggcggcgccgcggctcgcgcaatggcgcgtcgacgtgctcccctgctacacctaccgcaagtccgagcccttccgcatcggcctctggaactggtacctatctgtggagagaaataacaagcaaacttgtgttaagaagaccatagttcatccaggaatttttgacaagccgctgaaacacgaaggttttgtgtgggcaattgatagtactgttacaggaagatttgtgattgagatagagtttcttgacctgaaaattgcagatccatcttacaattcccttactggctctaattctgcattccagggtggtgaaccagcctcaatttgggcttcccaccaaatcaagaaatcttcagacaacactgcactgtcatccttggcgagaatgctgcaagaaggcatcctcaccgacatcacaatcaacgctaccgacggcagcattatggcccaccgtgcaatcctggccagccgttcccctgtcttcaggagcatgttctcgcacgacctcaaggagaaagaactctcaacagttgacatctctgacatgtcccttgaagcatgccaggccttcctcaactacatttatggtgacctacgcagcgaagagttcctcacccacaggttagctcttctcagagctgccgataagtatgacatctctgatcttaaggaggcatgccatgagagcctgttagaggacatcgacacgaagaatgtgctcgagaggcttcagatggcgcacttgtaccgattgcaaaagctcaaggatggctgcttgagatttctggtagatttcagaaaggtgtatgaaatgcatgacgatttcaaggtgttcctccagacagcagacagggatatcatagctgaaatcttccaaggcactggagcaacgacggcggcggtgctcgggctgagctccacggcctcctcgccgatggcgacccacgcgcggcgagcggcggaggcgcgggtgtggcgcggcggcctgcgagcgacggagacgcgggagtggcggcgcgcccccacgcgacgtgacggccccatctccctcgatggtcgcctcgccggaatagtactaagggcacgcagccgcaactcgtcgccgcaccggttgaatccgcgtagctcgagcggtagcggcgtctacgggagcggcggcggaggtgggcgcgctgatgagaccgccggtcttaagggcgacccttacgcggttggagtcgatgccgtcatggagttccccggcagcccgtcgtacggccccgaccgcgtcatctacctccgcccgctctccggtgagttccccggctactacggctga

SEQ ID NO: 11461 - DNA, 1080 bp, Oryza sativa
  Clone ID: TFbOSC400049j.C1.o17.fg
atgtcccctgccgcctgccgcggcaacccgtcgcggtccgcctccgcctcggccgtcgtggtcgacacggccaccgggtaccacctcctcaagatcgaaggctactcgctcaccaagggcatccccaccagcttgagcctcaaatccagccagttcaccgtcggcggctaccgctggcgcatcgattacttctccaacggagactgcgcggactccgccgattacatatcgctttttctctcgctggacgaaagggccaacaaggatgtgaaggtgcgggcgagctggagattccagatcggttacactggcaatgtggataagccgccttcgttgtcaacggcgaaagcatgtactacttttggtgttggacctgatggttcttggtcttggggttatgacaggtttattagaagggaagattttgagaagtccgacaatctcagggatgactctttcaccatccggtgcgacattgccgtcgtccgccgattccgcgccgaggagacgaccgagatactccctgtcgaagcctttgtgtccgtgcccccatccgacatgaaccagcagttcggcgacctgctggagaccgagaagggcgctgacgtggtgttcgagtcgccggtcttcagagcggagctctacagctcgatgaaggagggtgacactgctggagtcgtgcgcatcgaagacatggaggcgcaggtgttcaagctgctgctccgctttgtgtacaccgactcgttgccggagatggggaatgatgatgaagacgtcatgtgccagcatctgctcgtcgcggcggaccggtacaacctggagaggctcaagttgatctacgaggagaagttgtgcagctacattagcgtcgacgctgtatcgaacatcctggcgctggctgatcagcaccactgcgacgggctgaagaaagcatgctttcattttctggcctcaccgggaaacctgaatgctgtcatcaccagtgatggcctcaagcatctgagcaggagcttcccctcacttatggaagagctggttgccatgctggcgcctctgctgagtcatgctttagtgatttag

SEQ ID NO: 11462 - DNA, 1179 bp, Oryza sativa
  Clone ID: TFbOSC415318j.C1.o9.fg
atggccgccgcctcaaatgtgcccccgtcgtcttccacaagcagcagctcaccacacaacaccacatccacgcactccactgagctggtcaagggtacgcaccggttcaccgtcgccggattcagcctgcagaagagaaacggcgccggacacttcgccaaatcaggctccttcgatgtcggcgggtacagttgggcggtcatgttctacgctgccggcgagaaggaggaagatcaaggacatgtgtccgtgttcctcgagctgcaaagcaccggcgtagagaaagttacggtgaagtacacattcaacatcagtggcagctcgttgctgtcggcagggtggggtgatttcaagcctagcagcaaatgtcgtttggggttcaacaaattcatggagatcgaaaccgtggaggatgtgtacctgatgaacgactgcgtgacgattcactgcgccgtcgaggttgtcagggagaagaaggccagagcaaccgtgagccgccgcatcgcggtgccgccgccggccatctgccgtcatctcgagcagctgctggagagcaagaaaggctcggaccttacggtccaggtcggagagagtaagtacgacgtgcacagggcggtgctcgcggcccggtcgccggtgttccgcgcccagttcttcgggccaatggcggcggcgaacaggcgcgccagcggcggcggcggcaggtgcgtgcgcgtccatgacatgagaccggcggcgttcgaggccgtgctccacttcgtctacacggacacgttgccgccggttaaggaggaagagggcttcctgacgaacaactccgcgagccgccgccacctcgtcaatctcagggacgcggccgccggatgctcgaagggagaggtgagggtgatggtccgcgagtggctggcggcggcggaccggttcggcctggagaggatgcggctgctgtgcgaggacgcgctgtgcgagagcataggcgtggcgaacgcggcggcgacgctgcggctggcggaccggcaccactgcgcgctgctcagggcgttgtgcatggagtacatcgcctcgcccggcatgttggcggccgtgatggcaacaaaggggttcaaggagctcaaggtggcatgtccctctcttctcatcgagatcctggagaaggttggatgctgccgttcggaataa

SEQ ID NO: 11463 - DNA, 1116 bp, Oryza sativa
  Clone ID: TFbOSC401762j.C1.o46.fg
atggccaccgcgcccaccgtcgccggcggcaaactgctgcgttccgcctctgcgattgtaggcggcacggagagcggccagcacctgctcgagatcaacggctactccagcatcaaggacgccgtctccatcggcaactgcgtccagtctcggcatttccgcgttggcggccacgattggtacatccgctactaccccaacggcttcaactcgaacgtttccgattgcatatccatctacctcgtcttggacggccacgaggcccacgactactattacggtcgctcaatcgtgagagcagagctcacgttgagcttactcgaccaagaacgggagccagtgacatcctacatctacagccatgggttgcaaattttcgatggctacggccgctatcggggatctctgcgtttcatccagaaggccgtactggagagatcggagtacctccgggacaaccgcttcacgatcaggtgtgacatcacggtcatgaagaatcccgaggcaaaggacactggcggcaggcgggtaaccctgccaccgtcggacctggcccggcacctcggcggcctcctcgccaccggagtgggcgccgacgtgacgttcgaggtcgacggcaagacgttcttggcgcatcggaatgtgctcgcggcccgatccccagtgttccaccaagagcttttctccctaacggagaaggggaatgccgcgactggcggtgccggtgtcatcatacgcgtcgacgacatggaggcgcaggacttcgaggctctgctccacttcatatacaccgactcgttgccggagatgaaaggtggagacgcagtggcgatgctcccagacctggtcgcggcggctaacaggtataagatggagagactaaggttggtctgtgaagataagctatgtgagtatgtaactgtgagaaccgtggcagccatgttggcgtttgctggggaacaccaatgccccgagcttgagaagaagtgcttgcagctactcgaagatccagcaaatttgaggaacatcgtggagactgaaggtcttgagcatctgacgaaaagctacccctttgttttgaaggatctaattgccatgtttgctacaaaaccgtag

SEQ ID NO: 11464 - DNA, 825 bp, Oryza sativa
  Clone ID: TFbOSC2852j.C1.o2.fg
atgggtgatcaccgcgacccggctttccccgcggcggcgggcggctgccggctgcccaagacgtcgtcggtgagcgtcacggagtccgtcaccgcggtgcacgatttcaaggtgacgggttactcgctgatcgaggggctgggcatcggcaggtacgtcagctcatccaccttcaccgtcggcggcgtcgactgggccgtcaggttctaccccgacggctccaccgtcacctgcctcgggaacgcgtcggcgttcctctactactgcggcagggagaaggaggtcaggaccaggttcaccctgaatctgctcggcaaggacggcaaattgtcgcaggtgaccaattcctacatgaagcacaccttctccccggcgagtgacaattggggattcatcaaattcgccgagaaatcgaagctgcagagctcgccgttcctccacaacgactgcctgaccatcaggtgcttgctgaccgtcgtcagggaatcccacaccaaggatgttgaggtcaattctgttgttgtcccaccgtccaacctgcataccgattttgagaacatgctccaggatggtgaaggttcagatgtgacattcaccgtgggtggccaagagttccgtgctcataaatgtgttcttgccttccggtccccggtgttcaaggccgagcttttcggtccgatgaaagaaaatggcacgcaatgtatcaagatcgacgacatggagcctgaggtttttgaggctcttcttcacttcatttacaaacccccgataggctgccagatagctgcagagatggcaaggctgcagcaatgcagcacttgctag

SEQ ID NO: 11465 - DNA, 1715 bp, Oryza sativa
  Clone ID: TFbOSC9673j.C1.o1.fg
aattcaaagctttaagagtgttggatctagagagcagtgtgaaattgcaaaactctgatcttaacaacgtggtggatctatttcagttaagttacctgacggagtcggaaaaatgcaatctctacaggaactgtcaggaattatacattccgaaatgctgtttccaaaggatcccagattggatggcttcaatgaataatctctacaggctatgcatcaggtctaagcaagtgacaaagcaaatcctccagatccttggagacttgcctgcattgctagacctggagctgcgttcagaatcagatgatcccatggaaattctcattatcagcaaatgcatattccgatgcctgaagatcttccgtctgtatggatcgttcgtcggcctgatcttcgaggatggatccatgcagaaggtcagagaaatctcggttgttgttagagcacacaaggcaaaatctgcattcgctgatcatcctgatcttggcattcgcaacctcacctctcttatggatctcaatgtatggattaattgcgagggagctagggttcaagaggtgaaggtgttggaagctgccattgcagatgcaaccgctctacttcccaaccatccgacaccacatttcttcagagaaaatgaagaaaatatggtgaaagattatcttcccaaccatccgacaccacatttcttcagagaaaatgaagagaagatgtacgttccaaactctcgtctcatgtcgtgtgcttcgctgctctccgccgccatccgccgcggcgtcgccggctgccgtgcctcgccgccgtccgcctccgccatcgtgtcgcggccggcgaccgggtcccacatcctcaggatcgacgggtacaccaacacgaagagcatcctcgccaccggcgagtccgccacgtcgaggaggttcgccgtcggcggccacagcttcgtcatgcgatactaccccaacggcctcgacgacggctgcgccgactccatctccctcttcgtcgacgtcgccggcggcggcggctgcggccggagcggcatcgccggccatgcccggttcagcgtgctcgaccacgccggctcgccggcgcgccgcaccgacgacgcctcgtcggaggctctcgccgccggcgccgacgctggcgtcgtcgtgccgccgtccgacctgcaccggcacctcgctgagctcctctggagcaaggaaggcgccgacgtcgtcatcgagctagacggcggcgacggcgagacgacgacgttccacgcgcaccggtgggtgctcgcggcgaggtcacccgtactcaaggccaagctctccgcctcgccgtcgtcgccggcgacgctgcggctcgccgccatggacgccgacgcgttcagggcgctgctccacttcatctacaccgacacgctgcccgacgacgacgacgatgacgacgccatggcgcggcggctgctcgccgcggcggacgcgtacgggatggagaggctgaggctgatctgcgaggacaggctgcgccgccgcgtcgccatgggcaacgtcgccgtgacgctggcgctggcggagcagcaccattgccgcgcgctcaaggaggcttgcgtcgagttcttgtcttctccgggcaacctcaaggcggccatggctaccgatggcttcgagcatctgaaggcaacatgtccttcagttttgactgaactcgtcatgaaacaattagtttag

SEQ ID NO: 11466 - DNA, 1062 bp, Oryza sativa
  Clone ID: TFbOSC3760j.C1.o3.fg
atgggttgctgcttctcggtgatcgacgacgacggctacgagcacgacgacgccgtgtcgggctcggtgaacgaggtgccgagggtgaccggcgtgcaccagttcacgatccggcagtacagcggcgtcaagggcaagggcgtcggcaattccgtcctctcccggaacttcaccgtcgccggccgcgagtggttcgtccgcttctaccccgacggctacaacagcgacacgtccgaccacgtcgccttcttcctccagtccctctaccggccatcgtgcggctccgtgtaccacgtcgagttctccttcgcgctgctcggcggcggcggcggcggcggcgccgtactccacgacgtgcggatcgatcgcccgtgcaggttcgacaaccgcaacaactcgtggggcatccgcaagtacatcgcccgggagcagctggagggcgccgccctgggcgccatccacgacgacgcgctgacggtgcgctgcaccatgcacgtcatccagcgccgccgcggcgccggccggcccgtcgtcaccggcgccggcggccccgtccgcgtgcccgtgccgccgtcgtgccacgccaggaacgccatggagttcctcctcagcggcgacgccccgttcgacctggagatccacgtcggcgacgcgacgttcggggcgcaccgcctcgcgctcgccggccagtcgctctacttccggaagctcctctacggccaggtcgggaacgaggcgagctcgccggcgatccgcctccgggagatgagcccggaggcgttcggcgccgtgctccactacgtctaccacgacagcctgccgccggaggcgaacaagggccggaacgcggctgccatggcgcgggaggtgttcgaggccgccgacatgtacgccatggagaggctgaagctgatgtgcgcgagcaacctgtgccgcttcatcggcgacgacaccgcgagcggcatcatggagttggcaaaagcgcactcgtgcgatccgctcaagaaagcgtgcgaaaattacatgaaacgcagaaggattccattcaaccctgatagctga

SEQ ID NO: 11467 - DNA, 721 bp, Oryza sativa
  Clone ID: TFbOSC31354j.C1.o1.fg
accccaagttcatcaggagagaagatttggagaaatcggagtatctcagggacgattcgttcaccatccggtgcgacatcatcgtggtcgacaattaccgtgccgaggacgccagcagcggcgctgccggcttcgtctccgtgcccccgtccaacctccatagccacctcggcgacctcctcaagaacgagaagggcaccgacgtagtgttcgaggtcgccggccagaggttcacagcgcaccggtgcgtgctcgcggcacggtcaccggtcttcaacgcggagctctttggcatgatgatggagagcgacaccaccaccaacgatgccatccaaatcggtgacatggcggcgccggtgttcaaggcgttgctccacttcgtgtacaccgactcgttgccggagacgatggaggagagggaggacaccatgtgcgagcatctgctcgtcgcggcggatcggtacaacctggagaggctgaagctgatctgcgaggaaagattgtgcaagtacattggcataggcacggtgatggacatcctcgcgctggctgatcaacaccactgcaaggggctgaagaaggcgtgcttcgattttctcaggtcgccggcgaacctgagtgccgtcaccggcagcgaaagcttcgagcatctgagcaggagcttcccctctcttatgaaggagcttgttgacattctaggaacttcacataattatgcttg

SEQ ID NO: 11468 - DNA, 465 bp, Oryza sativa
  Clone ID: TFbOSC900229j.C1.o20.gm
atggggaattggagcggtggatgcagggagaaatttcgtgaagtttttgagtggaaggacgcggatgtggcgttcgaggtcggcggcggcggcggggtgagattcgccgcgcaccggtgcgtgctcgcggcgcggtccaaggttttcaaggcggagctcttcggcgcgatgaaagagggcgacgccgcatgcgtcgtccgcatcgacgacatggagccgcaggtgttcaggacgctgctcttcttcgtgtacaccgactcgttgccggagatgagaaaggaggaggaagaagccatatgccagcgtctgcttgtcgcagccgaagtgtacggcatggagaggctcaagctgatatgcgagagcaagttgtgcaagtacattgacgtgggcacagtggcgtccatcatggcgttggttgaccagagctgcccgttcatcacggaggagttgattggcatgctctga

SEQ ID NO: 11469 - DNA, 1083 bp, Oryza sativa
  Clone ID: TFbOSC402103j.C1.o15.fg
atggcgggctcctccccgtcggctgcggcaagcggcggcggctgcgaagcggtgccgagcacgtcgaccatcgtggccgagatggcgacgggctcgcacgtgctcaccgtcgacggctactccggcaccaaggggctcgccgtcggcgtgcacgtcaagtccggcacgttcgtcgccggcggccacagctggcacatcaagtacttccccaacggcgccaccgacgagacctccgagtggacgaagggcgccgccgcgaccgtcaaggcgcggtgcaagctcaccctgctcctcgacggccgcgacgggagggcggcattgccgccgccgccgccgttcaccaagagctgcgagctccggaccttctcctccggcaagggcggctccgatcagtggggccacaagaagttcgtgcggcggaaggagctcgaggacccgtcgaagcgtctcctccgccatgaccgcttcagcgtccggtgtgacgtcaccgtcgccgtggggatccgcaccgacgacaccaccgcgaagctcccgccaccgtccgacctgcaccgccacctcggccgcctcctcaagacgaatgcgggcgccgacgtcacgttcgacgtcgccggccacaagttcgccgcgcaccggtgcgtcctcgccgcgcggtcgccggtgttcatggcggagctcctcggcccgatgaaggaggaggacaccgagagccacgtcgtggccatccgcgacatggacgcgagggcgttcaaggccatgctccacttcatctacaccgactcgctgcccaatgtcgacgacggcggcgaggcggcggccatggcgcagcatctgctcgcggcggcggacaggtacgacatcgagaggctaaagctgatctgcgaggacaagctaagcggcggcgtcgacgcgaccacggcggcgacgacgctggcgctggcggagcagcacggctgctgccggctgaaggaggcgtgcctcaggttcatggcgtctccggccaacctcaaggcggccatggcgagcgatggcttcgagcatctggctaagctgcccttctctcctcaaagaattagttgctaa

SEQ ID NO: 11470 - DNA, 1098 bp, Oryza sativa
  Clone ID: TFbOSC405423j.C1.o13.fg
atggcgggctcctccccgtcggctgcggcaagcggcggcggctgcgaagcggtgccgagcacgtcgaccatcgtggccgagatggcgacgggctcgcatgtgctcaccgtcgacggctactccggcaccaaggggctcgccgtcggcgtgcacgtcaagtccggcacgttcgtcgccggcggccacagctggcacatcaagtacttccccaacggcgccaccgacgagacctccgagtggacgaagggcgccgccgcgaccgtcaaggcgcggtgcaagctcaccctgctcctcgacggccgcgacgggagggcggcattgccgccgccgccgccgttcaccaagagctgcgagctccggaccttctcctccggcaagggcggctccgatcagtggggccacaagaagttcgtgcggcggaaggagctcgaggacccgtcgaagcgtctcctccgccatgaccgcttcagcgtccggtgtgacgtcaccgtcgccgtggggatccgcaccgacgacaccaccgcgaagctcccgccaccgtccgacctgcaccgccacctcggccgcctcctcaagacgaatgcgggcgccgacgtcacgttcgacgtcgccggccacaagttcgccgcgcaccggtgcgtcctcgccgcgcggtcgccggtgttcatggcggagctcctcggcccgatgaaggaggaggacaccgagagccacgtcgtggccatccgcgacatggacgcgagggcgttcaaggccatgctccacttcatctacaccgactcgctgcccaatgtcgacgacggcggcgaggcggcggccatggcgcagcatctgctcgcggcggcggacaggtacgacatcgagaggctaaagctgatctgcgaggacaagctaagcggcggcgtcgacgcgaccacggcggcgacgacgctggcgctggcggagcagcacggctgctgccggctgaaggaggcgtgcctcaggttcatggcgtctccggccaacctcaaggcggccatggcgagcgatggcttcgagcatctggctagaagctgcccttctctcctcaaagaattagttgctaatctcgctgtttaa

SEQ ID NO: 11471 - DNA, 1125 bp, Oryza sativa
  Clone ID: TFbOSC900390j.C1.o2.fg
atgtactccataaccgccgcgccggcgacggtgtcccacctcgtcaggatcgacggctactcccgcaccaagaacctccgcaggggaaggttcatcgaggccatgaacttcaccgtcggcggccaccgctggttcatccggttctaccccaacggccacggcccccgcgatgtcggcgtcgtctccgtctacgtcggcatcgcgggcgcctaccgccgcggcggcggcgacgccaagccggtcatcgccgacgccaggttcagcctcgtggaccgcgacgggaggccggcgccgccgtcgttcgtccagggcatgcccgccgtcgacttctccgggaacgacttcgggatgaacatcaagagggcggagctcgagacgtcggggtttctcaaggacgacggcttcctcgtccgctgcgaactcggattcgtcaacagcgccggcgacggcgacggccgcagaggggttcagatcaaggaggggatcaaggtgccaccgcccaacctgcaccgccacctcgccgatctcctctggaagaaccaatccagcggcgacgtcttcatcgaggtccaggggaagacgttcacggcgcaccggtggatgctcgcggcgagatcgccggtcatggcggccgagctctcgtcatccgactccgacgacgcggcctacaccgacgccgacgccaccaagaacacaatgatgacgctgcgcgtcgacgacgacatggacgccgagacgttcagggcgctgctccacttcatctacaccgacgcgctgccgccgccgccccagccccgcgcccgcgacacgaaggagaaggaggacgaggcggcggcggccgaggcggcgaggcggctgcacgcggcggcggcgaggtacgggatggagaggctgcagctgatgtgcgaggacgcgctgtgcaggagcctgagcgtcctcacggtggcgtcgacgctggtgttcgcggagaagcacggatgccgcgtgctcaaggcggcgtgcctggacttcctctcgtgcaagaggaagctgaggcaggtgacgaggctggacgatgacttccgtctgctcaccaccacttgcccttccgttatcaaggagctcttcgcgcaggtcttgaagtag

SEQ ID NO: 11472 - DNA, 1080 bp, Oryza sativa
  Clone ID: TFbOSC547j.C1.o6.fg
atgacgacgacgacgatcacgtccagcgtctgtgccggtcctccgccgtcgaggtccaccaccaccatcacagcggaacgaacctaccacataatcaagatcccggggtactccagcaccttgaaagtcggtcatggccaggccctccgtacctctccgttcagtgcgggaggtcgcacctggtatatcagctactacccaaacggagggcgagaaaccaacaagcactgcatctctttcttcatccatcttgacgatgacacggtcaatgacgatgtcatggcgcaggttacgttcagcttgctcgaccgacacaggaatccagtgcggtcacacactatcaccaccacattatataacttctcggtgcctaatagtagcgcgcttgggttcgaaaacttcattagaagggacgagttacaacgatcggaatatctcaatgacgactgcttcgctatcgcggttcgtctggtcatcacggaggaaccatcatccttcacggtgcccccatcgaacatgcacctagattatggtgatcttctatcaagcaaagagggcaccgatatcgagtttgtggttcgcggcgagacatttgccgcacacaggttggtgctagcggcacggtcgctggtgttcaaggcggagctattcagaccaatggagggaggcaccacggatgtcataaaaattgataacatggatgcacaagtgtttaaagctctgcttgtttttatctacacggacacttggccagagatagatcaagatgagacgactatggttcaactactcgttgcagccaataagtatagcctatcaagactgaagataatgtgcgaagataggttgtgcagctatattgatacaagttcagtggttaccatgctgatgctagcagacaagtaccaatgccatggtctcaagaaggtgtgcttcaatttccttgcctcttcgagagcattgtctttggccatgaaagcagataatttccggtgtttaatccagggctgtcctactatgttgaaggatttaatttacaacatcgttactcatcaattggaaattaaattatcagtgtag

SEQ ID NO: 11473 - DNA, 5418 bp, Oryza sativa
  Clone ID: TFbOSC400049j.C1.o26.fg
atgtccttcgccggcgtctctttcatatcggatggcgagacgacgccgtgttcttctccggccaacaatggcgccgccgccggcagcacgtacgggtatcaccttcttgttatcagtaactactctcacaccaaggaaaccatctccactggcgactccatcgagtccggccagttcatgctaggaggccacacttggcacgccgagtactgccccaatggcgacgactcgaccaactccgactgcgtgtccttctggctcgtccgtgacgacgatgacgacgacgacgacgatggcgacgacgccgtgaaggtgcagccgctgaaggtcaagttcgagttcagcttcgccgagcaggcggccaagcacgaggcgaggcgcgtgctcgtgtccatggcgtgcgacttctccggcacctccggctggtgcgacacgcggttcgtgcggagggaggtgttggatgttagcagtaatcttgtgtgccacggtttagccacagtacgccgatcgctggggaaattcctaacaattggtatcagagcacggtttaggaagtggactcgtgaccgcgcattggaaggcgtcttcatgccgcgtcgtcgctcgtcgtcaccgatcgtgcgcactcctcatgactccggcggccgcgccacgggcagcggcgggggtgaccgcgggctggtgatccaccgcgtggtgaaagaaggaggcggctcggtgaactacccgctgctgaccaagaccaactacaacgactgggcgctactgatgaagatcaagctgcaggctcgctgcctgtgggcggcgatcgagcccgacggcgtggacgtccctctacatgaggaccggatggctcttgacgctatctgcagtgccgtgccgccggagatgattggcaccctggcgaccaaagcgtcggcccgggaagcctgggaatgcatcaagacaatgcgagtcggcaacgaccggattcgcaaggcgagtgcacagaaagtgcgctctgagtatgaatcgcttgcgttccgcggtgacgagaccgtggaagatttcgctctacggctcacaaccatcgtcaaccaacttgcaaccctcggtgatcctgaacctgctgataaagtcgtcgaaaagtaccttcgggtagctcgtcccaggttcaatcaactcatcttgtctattgaaactcttctcgatatctctactctgtccatggaggaagttactggcagactgaaagccgctgaggattctgggcaatcctcgttgcacaccgccgatgggaagctgtacctaactgaggaggagtgggctgaacgtcagaagaagaaggatcaagaggcaaagcggggtgactcgggcagctctggcggccgcggcaagcgccgtggcgggagagggcgcactggtggcggcgggactgcgagccccgagagcacgaactctggttcggcgcgcaagggagacaaatgccgaaattgcggcaaacttgggcactgggcgaaggactgcaggagcaagtccaagcgcgaagaacaggctcacgtcgcccaggaggatgaagaagagcacaccttgatgttgctcaccggcggctgcgttgacacggtcgacgcggcggcgccggagggcgacacgcccacaccgccccaccaagccgtggtggaactcgtggagatgaaagtatttgcagcgctcgacgacgcggctgaccatgatcccgggcgctggattatggattccggagcgtcaaaccatatgacgggcagcaggatggcgttcgccgacctcgacacgaacatcaccgggaacgtgcgactcggcgatggatccgtggtccggatcgcaggacggggcacaattctctttgcctgcaagaatggtgagcaccgcactctgtcgaacacctattatcttccccgtcttactgccaatattatcagcattgggcaattggatgagaccggcttcaaagtgctggcggaggatggcatcatgcgggtctgggatgagcagcggcgtctgcttgcccggatccctcgcaccccagggcgactgtacatgcttgacatcaacctggcgcgcccggtctgtttggcggcacacgccgacgaagacgcgtggcgctggcatgctcgcctcgggcacataaacttcagggcgctctgcaagatgggcaaggaggagctggtacgtggtctaccatgtttgtcgcaggttgatcaggtttgtgaggcctgtctcgccgggaaacaccggaggtcgccgttcccgcggcaggcactttgccggtctgacgagccgctggcgctgctacatggagatctctgtggaccgatcacgccggcgacacccagtggcaaccgctatttccttctactcgtcgacgactacagccggtacatgtgggtcgccctcctctccaccaaagatgcggcgccggctgccatcaagcgtattcaggcggcggcagaaaggaagagtggacgcaagctccgcgcgttgcggacggatcgcgggggagaattcacgtctacacagttcgccgagtactgcgccgagctgggaatgcggcgcgagctcacggcgccctactctccgcaacagaacggcgttgtcgagcggcgaaaccaatccgtggtgggcacggcgcggagtatgctcaaggcgaaggggctgccaggtatgttttggggagaggcgataaataccgccgtgtatctgctcaacaggtcgtcgtccaagggtatcggcggcaagaccccgtacgcgctgtggaacggcgttccgccggccgtgcaccatctgcgcacgtttgggtgtgtggcacacgtgaagacgaccaccccgaacctgaagaaactggatgacaggagtcgtccaatgatctttgtcggctacaagccggggtccaaggcgtatcgcgcctatgatccggctactcggcgtgttcacatctcccgtgacatcgtcttcgacgaagcggcccagtgggactgggatgctgaggcggccgctgatctcgacaccgacttcgtcgttgagtacaccacggtgtaccatcctggctcgctgtcaggaacacgccaagacgctggggagccgcctgctcgatcttcatcatcgccgcgaacgccatcagactcaccgacagccggccgaacaccttcggtgcatggcgatgcgctggcggttgaatttgtgtcgccaccaactggagcagctgctaatcttgatgcagaccacgacgacgcaccactccgtttccgcacgatggacaatgtgctggggccggccatgctgccaggtctcgctaatcgtgaggtccaggaagagctgatgatggtgagcggagaagaaccggcaacgttcggtcaagctgaacgcgacgaggattggcgtcgggcaatgctcgatgaaatctcttcgatagaggagaacaagacctggaggctcgtcgatctgccttcgggacatcggccaattgggctgaaatgggtgtataaactgaagaaagatgctcagggcgtcgtcgtcaaacacaaggcgagattggtggcaaagggctacgtgcagagggctggaattgactttgatgaggtattcgctcctgttgctcgtcttgattctgttcgtttgttgctcgctctcgctgcgcaggaaggttggatggtgcatcatatggacgttaaatcagcgttcctcaatggggaactgattgaggaggtgtatgttgttcagccaccggggtttgagatcgatggacaggagaacaaggtttacaggcttgataaggcgctgtatggtcttcgccaagcacccagagcttggaacaccaagctagactgcacactgaagaaacttggcttcaagcagagcccgttggagcatgggctgtacgcgcgcggcgatggcagtgggcgactgctcgtcggtgtgtatgtggatgatctggtaattgtcgggggtgatagtggcatgatcaagggattcaaagagcagatgaaggctgaatttaagatgagtgatcttggtcctttgagtttttatcttgggatcgaggtacatcaagaagctggaatcatcactttaaagcaagcagcgtatgtgtcgcgtattgtggagaaggctgggctcaccggctgcaacccctgtgcaacaccgatggaaccacgtctaaagctgagcaaggaaagtgcaggatcgctagttgatgcgacagaatacagaagtctagtgggaagcttgcgctatctggtgaacacccgaccagaccttgcatattcggttggttatgtcagtcgtttcatggagaaacccacggacgaacacttggcggcagtgaagcgcatcataaggtatgttgctggtaccattcatcttgggtgccgctatgtgaaggaaggtgaaggaggactgcagggttacagtgacagtgatatggctggagacattgacactcgcaagagcaccacaggagtaattttctttctcggcaaaaatcctgttagctggcagtctcaaaaacagagagttgtagcactctcctcctgtgaatctgagtatattgcagctgcaacagctgcatgccagggcatttggcttgcccggctcctcggtgacctcaggaatgcagcaactgaagtcgtcgatctcagggtggacaaccaatccgctctggccctgatgaagaaccctgtttttcacgatcgaagtaagcacattcaaacaaaatttcatttcattcgtgaagccgtggagaatggggaaatcacaccgagttacatcggcacagaagggcaacttgcagatatcctgacgaagccgctttctcgaatcaagtttcaggagctgcgggaacaaattggtttagccacagtacgccgatcgctggggaaattcctaacattggagcggtcgaggtatctcgtggacgactgcttcacggtcaggtgcgacatcgtcatcctcgccggcgccgccgccgctcctcctccgtcatcgtcgttgttcggcgcggtggagagcttcgggcgcctcctcggcagggaggagggcgccgacgtgacgttcgaggtcggcggcgagacgttcaccgcgcaccggtgcgtgctcgcggcgcggtccaaggtgttcgaggcggagctcttcggccccatgagagaaggcgcggcggcgagcgtcgtgcggatcgaggacatggacgccgaggtgttccgtggacttcttagcttcatctacaccgacgtgctgcccgaccaaggagacctcggcgacgaagcgcacgagtggcacgacgacgacgacgacgacgagggaggaggagattgcgacatggctgcagaaactgaccgtagccgcggacagatacgatctccagaggctgaagctgctgtgcgaggaggagatgtacgactacattag

SEQ ID NO: 11474 - DNA, 918 bp, Oryza sativa
  Clone ID: TFbOSC400049j.C1.o18.fg
atgccctcctccgccaacggccatggcaactcgtcgacgcggtccacctccgccatcgtggtcgacagggtgaccgggcaccacctcttcaagatcgacggctactcgttcaccaaggagacccccaccggcacgcccatcgcatccggcgagttcaccgtcggcggctaccgctggagaatcgagtactaccccaacgggagaggcaagaaatccgccgattacataccgctttacctctcgctagacaagaacaccagcggggaggtgaaggtgaagtaccagattgagctggccgatagggtgaagaagaagaagaagcaaccttcgctgatatccaagccatttatgaggaggagaaaattcgaaaagtctaaatatctcagggacgactgtttcaccattcggtgtgacatagtcgtcatgcgtgagattcgcactgaggaagcaacatttgtgtccgttcccccatccgacctgaagcagcagctcggagacctcctcgagaccgggaagggcgccgacgtggtgtttgaggtcggcggcggcgagacgttcgccgcgcaccgtttcttcggctcgatgaaggagagcgacgccgccgccggaggagtcgtgcgcatcgaagagatggaggctcaggtgttcaagctgttgctccgcttcgtgtacaccgactcgttgccgaagatgaaggaggaagacgtcatgtgccagcatctgctcgtcgctgcggatcgttacaacctgaagaggctcaagctgatctgcgagaagaagttgtgcaagtacattggcgtgggtaccgtggcgagcatcctggcactggctgatcagcactactgcgatgggctgaagaaggcgtgcttcaattttctcggctcatcggagaatccgccggtggcttcgataatctga

SEQ ID NO: 11475 - DNA, 2475 bp, Oryza sativa
  Clone ID: TFbOSC401547j.C1.o15.gm
atggcgacgcggctgcggtggtggcggcgacgggcgacgcggctgcggtggtgcgtcaagttcggctgctccaccacgacggccggctcgttcccggccgacgggctggtcgggctcagcggcgacgcggtctcccacgtgacgcagctcggcggcgaggcgtcgctcgaccggagattctcctactgcctcgtcccgcactccgtcaacacatcgtcggcgctcaacttcggcaccctcgccaacgtcaccgagctcggcgcagcgagcacgccgctcgtcgccggggacgtggacacgtactacaccgtggtcctcgacttcgtcaaggtcggcaacaagacggtggctttggcggcgagctcccgcatcaccgtggactccggcaatgcaaaaataagctttgttactcctgcaaattgcaagaagcaaaccgaacaagcgattccggacttgacgctggagttcggcggcggcggcggccgtgcggcggtggcgctgaagccggagaacgcgtccgtgacggtgcaggaggggacgttgtgcctggcaatggtggcgacgacgaagcagcagtcggtgtccatcctcgggaacctggcgcagcagaacatccacgtcggctacgacctcgacgccggcatggtcaccttcgccaccgccgactgcgcggggaacggccggccgacggagcagacgagcggcgggcaggcgcgctgcgggagaggaagatggcgccgacggggagggggacggggggagcgaggatgtcgacgccgtcgtcgtccatggccgcagttctcacgcccgcgccgtcagcggcgtcgccggcgggagtgtgtgagcgcggggcagcggcgggcaaagcaggcggtggagggcagagcgggcacgacgccgaagacagcttcttcccgcgccggcgccaccggccgcctctcccttctcaagcgtcgccgccgccgccgcctcccttatctcgtgtcgtcgtcgtcgtcgccgccgccgcagccgcctcccgggcctctccgagggtccgaccccgaggtcgcacgcgccgccaccggctgccggacctcctccccacccgccagccgccctgcagagaggagagaagtgagagggagagacgaggaagggagagaagaagaggaagagatgacctggcattctgacatgtggggcccacatgggtctcacgctgactcggccaccacctcagacaaaaccggggtcaaaacaccggaggatctaaacaccgtcgccttccacggcaatccctctaagcctggcgatcctccttcttatacttccccctaccttccctctgcctcacaccctatccaaacccgggatgccgggaccctaaaccctagttccaatgccttcggcggggtctccagagttggagaagaaggcgtcgccggagctgaaggagaagagctgagcaagatggggccggaggcggcgcgggagacgaaggggagcttggcggcggcgtttggcttcctgggcactagcggcggcgagccgagagcggcgcctccccgtcggcggctaccactgggagctccgctacaccgccagcctcatcgccgactccaaccactgggtcgccctcaagctcgtcctcctcgccgcgccgacgtcaaggccgcgctccgatgccgcctcatcagcaatagtgccaccacctctgccgccgtcgacggccacgtgtcgcacgcgttcaagcgcgccggcgagagctccgcgtgggtcctgatccttcgccggagcgccctggaggcgtcgggggccatcgtcgacgacgccttcaccgtcgagtgcaccatcacggtgatcacggagatacctgacaatgtcgctgcggcggcgccggcagcgccggcgaatgttctgcccccgttctccggccgtggtctgtccttgagccatcacctcggcgagctcctgcgccgcgggacgggggcggacgtcacgctggtggtgtccggcaagtgcttcccggcgcacagggcaatactcgcgtcgaggtcgccggtgttcatggcctccttgttcggcgacatgaaggagaagagctcccggagcgtcgagatcagggacatcgagccacaggtgttcggagcaatgctcggcttcatctacaccgactcggtgccggagctcgatcaacaagacggcgtcgtcgtcgcgcagcacctgctggcggcggcggacatgtgcgggctcgacgggctgaagatcatgtgcgaggagaagctcatcgctggcgccaccgtggagacggcggcgacgacgctggcgctggcggagcagcatgggtgcccgcggctcaaggcgaggtgcgtcgaggtcgtcgccgcgaacctcgacgccgtcatggcgaccgagggttacaagcatctcatggcgagctcgccgctggtgatgaatgatctcctcagggctgtgcgtggaaggaagagctga

SEQ ID NO: 11476 - DNA, 1377 bp, Oryza sativa
  Clone ID: TFbOSC412646j.C1.o22.fg
atggcggaagccaagatgtcacgcataaccatacacgacgtcgagccggtgacgttcagagccatgcttcggttcatctacaccgacgaactcgaggagaaggactccatggcaaccgatttgctccagaatttggtcgcggtcgcggataggtatgatctaagcaggttgaagctgatgtgtgcgcagaagctgtgggagaaagtatcggtggaaaatgtcgcgacaatgctgatctacgccgagatgcacggctgcccggagctgaagacgagttgcctcgacttctttgtgcaggaggagaacttcaaggtggccgtgctgaatgagggttatgctcagttggttcagcattttccatccgttattgatgaaattaaaggcaggcctgtaggtggaccaggcggcctcgtagatgagagcaaggctaataatatagtcgacgtgttggctataagcgccagatttaatgcagcggctgaaccgaagagacgaggctcaggtgatcgaagagctcagcgcaaacccagagagatcacagctgcagtaacaataacgcgggaaatcaaactgctactcattttgatgacaaacaaggagaattactgctactcgaaactcgaggagttcgatcacactgtactgatcactttgatcagtgtatataatcaggattatgggagttggatactgttcgaatcgatagatagatacatctccgactcaatccctctcgcgattgcgttctggtttgcagctccatatgctggcatgccggactctggttctctcgagctcatactagattacgaggcgaccaaccactgtgccatcctcgtcgacggcgagacgttccccgctcaccgtgccgtgctcgctgcccgctcgccggtgttccgggcggagctccttggctccatggcggaggcgaagatgtcgtgtatcactctgcacgacatcgagcctgtgacgttcagagctctacttcggttcgtctacaccgacgagttgcctgcagacgacggcggcgagctcaatacgacagcaatggcgaccgagaggaagaagggaggaggctgcctactgatggggagaagggcggggagcggcaaccatcaggctgggaagctagcgagcgtgcgcggagagggaggaggcggggaggccgatgagcaggacggagagccgacgagcgggacggggcgaggaggccgacgagcgggatggggaggccggcgagcacgcgaggagagggagaaggtggggaaaggggcggagggcgatagccatcgggcggggaggccaatgagcttgcgtggagagggaggaggcggggaggccctcagcccgtcgatctccctatcctggtggccttga

SEQ ID NO: 11477 - DNA, 1215 bp, Oryza sativa
  Clone ID: TFbOSC400049j.C1.o6.fg
atgtcctcttccgccgccggcaactcgtcgcggtcggcctccacctccaccatcgtggctgacacggagaccgggtaccacctcctcaagatcgacggctactcgcgcaccaagggcacccccaatggcacggccatcgcatccagccagttcatcgtcggcggccaccgctggcgcatctactactatcccaacggggaccacaccgacaatgcagattacatgtcgttttacctcttgctcgacgaaaagaaaaacaccaagaccaagagcgtgaaggtgtggacgctgtttcagatttgtttcgcagaccaggcaaaggcgctgcctacactaacatccaaaacagtgagaacttttggtgatggttcttcttggtcttggggctattcgaagttcatcaaaagggaagatttcgagaagtccaaggatctccgagacgactctttcacaatccggtgcgacattgccatcgtccgcgagttccttgttgagacgaccgaggtgctcccgcccaaatcgttcgtatccgtgcccccacccgacatgaacctgcagctcggcgagctgctggagaccgagaagggcgccgacgtggtgttcgaggtcgccggcgagaggttcgccgcgcaccggtgcgtgctcgcggcgcggtcgccggtcttcggcgcggagctctacggcctgatgaaggagggcaacgccgccgtggtcgtgcgcgtcgaggacatggaagcgcgggtgttcaagctgctgctccgcttcgtgtacaccgactcgttgccggagatgaagaagaaggacgaaggcatcatgtgccagcatctgctcgtcgcggcggatcggtacaacctggagaggctgaagctgatctgcgaggagaagctgtgcaagcacattagcacgggcacggtgtcgaacatgctgttgctggctgatcagcaccactgctccgggctgcagaaagcgtgctgcaattttctcggctcatcggcgaacctgagtcctgtcagcaggggctggctctttgttatgaaacagcttgtgttaggatgctgcaatgcatggagacttgctgttgtacaccctgtctcggtgtcttggcttgtactatcactatcaggcagagctgcagaggtatatgaccttagtaattccatgaaatttacgagtcatgaacatcatcctaaggaggcacgtggagcaatcgcctga

SEQ ID NO: 11478 - DNA, 546 bp, Oryza sativa
  Clone ID: TFbOSC31360j.C1.o1.fg
cagctcgtcgacctgctggagaccgagaagggcgccgacgtggtgtttgaggtcagcggtgagacgttcgcggcgcacagatgcttgctagcagcccggtcgccggtattcagcgcggagctctacggcttgatgaaggagggcgacaccgccggagtcgtgcgtatcgaagacatggaggcgcaggtgttcaagctgttgctccgcttcatgtacaccgactcgttaccaaagatggaggaggaagacgtcatgtggcaacatctgcttgtcgcggcagatcggcatgatctacagaggctcaagctgatctgcgaggacaggttgtgcaactacattggcgtcagcacggtgttgaacatcctggtgcttgctgatcagcatcactgcgacgggctgaagaaggcgtgttttagttttcttggctcactggagaacctgagtgctgttgtcaccggcgatggcttggagcatctgagcaggagctacccctctcttatgaaagaactatttgttgtgatggcacttccaccgaatcatggttaa

SEQ ID NO: 11479 - DNA, 1047 bp, Oryza sativa
  Clone ID: TFbOSC423270j.C1.o1.fg
atggggacggtggagggccaccaccggttcgcgatccgcgggtacagccgcctgagggcgctcctcgccgccggcgagtacgtccggtcggccgccttcaccgtcggcggctacgactgggccgtcgtcttctacccgcgcggcgccacgcacgccgaccgcgaccacgccgccgtctacgtccagctcctgaccgaccgcgccgccgccgccgccaccttcgacctccgcttcgtccgcgccgactccggccggccgctgtccgtgcacccgccgctcgccgcgccgaggacgttcagcaccgtactccgctcctcctccgccgccatgtacggcgtcaaggtggaggcgatacaggcgctccaggccaactacgtccgccgcgaccgcctcaccatcgactgcgccgtgcgcgtcgtcgggaagccgcgggtgtccgccgccgcgccgctgacggcggccgacgtcccgccgccggacctcgcggcgcacctcggccggctcctcgacctcaagtcccacgccgacgtcacgttcgacgtgcggggagtgcagttcgccgcgcaccgggtggtgctcgccatgcgctccgccgtcttcgccgccgagctgttcggcccgatgcgcaacaacgccggcggcgccatcaaggtcggcgacatgcagcccgccgtgttcaaggtccttctcggcttcatctacaccgacacgctcgccgccatggacgacctcgacgccgacgaggacgacaggcgagagctcgcccgccacctgctcgtcgccgccgaccggtacgacatgggcaggctgaagctcatctgcgcggacatgctcgcgaggagcctgacggcgcagacggtggcgagcacattggcattggccgaccgccatggctgccgcgggctcagggaagcctgcgtcgagttcgtcatcgccatgggtatgaacgatgaggtggtgataagccggcatcctgaccagctcagctgtatctcgctcttcaaatacttcttctaccagatcggcagcttactcaaaatccactaa

SEQ ID NO: 11480 - DNA, 1155 bp, Oryza sativa
  Clone ID: TFbOSC401916j.C1.o2.fg
atggtggcgtcggcgtcacggctgagaccgtcgagcacgacgaggacggcatcgagttgcaagccagagacagcacggggaactcacgttttcaccatacacggatacagcctgcaagcagtcgatggtgccggcagcaacaaagccagcttcatccgctccgcggctttcgacgtcggtggattcgactggtgtctccgctactaccacaacggcaacatcgagtccgacgacgactacatctccgtcttcctcgagcttatgaccaaggacgccgaggtgagaaccatctttgacatcaggatgttggatcaatataccgacgactcgtcttgcgttctggtctcgactacgaacaacacacggagagtgttcggcacgactaatttcaaaagcaaatgtctcgtgtggggtagtaagaatttcatcaggaggagtgagctggagggatcggtttatctgcgcgacgaccgacttatgattgagtgcaatctcaccgtcatcaagacaccactggtgaagacggaggagagagccgccatgccaggtgatatcatccacttccaagtgcctccgacaaacttgtccagggacctgggcaagttgctggaggacaatgtcggagccgacttgagcttcgaggttggaggagatgttttccccgctcatagcgtggtgctagcggcgcgatcaccggtgttcatggcggagctttacgggccgatgagggccaagagaggagagcggatagccatccaggatatgcaacctgttgtgttcaaggctctacttcattttatgtacacggactccttctctcctgctattaatgatgatctcagtagagatgaaaggcaggagttggctaagcatctgcttgtagctgcagatcgttatgctgtggaaggattgaaaaccatttgtgaaaaggcactctgcatgagtcttagtgttgataatgtggcaacaattgttgccctagctgatcagcacaattgcggaagattaaaagaagcgtgtgttaaatttatcgcctcatcaaatagattggatgatgttgtggagactgaagggtatggtcgcctcaaaacatcttgcccttctatcctactggatgtaatcgagatggcaactaagtctcgcaaaattaattag

SEQ ID NO: 11481 - DNA, 1059 bp, Oryza sativa
  Clone ID: TFbOSC418633j.C1.o5.fg
atggagaccccgacaaatctcaccaacacaatatctgcagttcacctgttaaaaatcaatggatattcagtaaccagagcacttggttgttcagagtatatctcgtcgaggagattggctgcaggtggatatgattgggaagttctttactatccacgctattatgagcatggtgtgtactggatagcacttcgacttatgtttatgagcaaggaatgtaagcatgaggtgaaggcagctcttaaatgtcagttagtacatgaggcacaaatttatctgccatccggaagtaaaagtgtatcctctaaatatacagggcaacgagattgcgggccagcgctcctgcttgtaaaacaagatgatttgccaggatccaattatttcatcggggattcctttgttgtggagtgcaccatcactgtgttaagagagccacaggaagctgtgactaatgtttctccaaatgtttccaatccatgctgtgacttgcaaatgcaccttggtgaactcttgctgagtgaaaagggggcagatgtcacgtttgttgttgcaggtgaatctttcttggcacacaagatcatcctcgctgctagatcccctgtcttcatggctgagttctttggacccatgaaggagagtagctcacagtgtgtggagatcaaggacatagaggcatcagtcttcaaggccatgcttcatttcatttacactggtacatcaccggagcttgatcagcagcatgtcgtcagtgactcggagcaggacatcacaacaatgacacagcatttgcttgttgctgcagacaggtatggattggacaggctcaaactgatctgccaagataggctccacgatgacatcaatgtggagactgttgcgacaactttggctttcgcagagcagcatagctgtacacagctgaaggacaggtgcatcgagttcatcatctcttctcgtgcaaatcttgatgctgttatggcaacagagggttataagcttgtgatagcaagctgcccgtcggttctaagtacccttctgagggcagcggttgggagatag

SEQ ID NO: 11482 - DNA, 1845 bp, Oryza sativa
  Clone ID: TFbOSC400049j.C1.o53.fg
atggcgacaacgacgacgatgacacttgcggccagcgccggcgacggttccccttcgtcgcggtccaccgtcacgaccatcgcggcgcaggcttatcacgtactcaagatcaacgggtactccaacaccttggaagccggccgccaccacgccctcagctcctgtccgttcagcgcaggaggccacacctggcatgtcagctactacccaaacggaggccgcgacagcaacaagaactgcatctccatcttcctcgtgcttaaggacatcgtcaccgaggaggacgtgatggcaaaagttacattcagcctgctcgatcgatacgggaatccggtgccgtcgtacacctatcacacccaattacgtaacttttcaacatctcctagtagggcaaagggtttcgaaaactttattaggagggacgaattagagcgatcggaatatctcaatgacgactgctttgccgtcgctgtccatgtgatcgtcccaaaggaaaagccatctattgtggtaccaccgtcgaacatgcatctgcatttcgttgatctcctcgtaagcaaagaaggcactgatgtcaagttcctggtcggcggcgagatgtttgcggcgcaccggttggtgctggctgcacggtcaccggtcttcaaggcggagcttttcgggccgacgaagaaaggcaccatagatgtgatacagattgacaacatggaagcacgagtgttcaaggctctgcttgacttcatctacacagacatttggccggagataggtcatggagaagacaatgtagctatggctcaacggttgcttgctgctgcagacatgtatggcttacagaggttaaagtttgtctacgaagataagttgtgcaaccacattgatacaggctcagcgtcaaccatgttggtgctagcggagaagcaccattgttgcaaacttaaggaggcatgctttacgttccttagttccatgagccctcctattgtggaagatctaaattccagcatatttggcagtgaatcggagaagacgaagtacagatatttgagaaatgagaagcgggctcacacgtatctagaacgtaacagtggagctggtgacaaggtgtttctcgacaagtgcatcttggtctcagtttataaaggagtgaaacttatgtttggtaagcgaggtgggactacgtgtgcactagcgcagtggctgcaccgtatgggcctcgaaattcagcaagagaaaggacccgcaggccgcagctcatatgtgcgccgtgctccggcctcatcgtcctatgctggctgctgctgctacgatgccaccggccagcggaacgcgttggcgttctggaaggtgcggttcgatcgggcgcgaggacacgtcgtacgtgtgatcgatgctgatcacggcagtgggcgcgacggttggttctcgatcgaggtggcacggcatacggtcaaggatgagatcgtcggcttgagacgccatgtatgctgccgctcacccctcgtcggctccgctggctggccgcgtacctcgagggcgcgtacgacgtattacgacgtacgcgccgacaaatttacgtacgcgcgcgcgagcgacacaagccccacggcgaggcagctgcacgcactgcctcccgccaatcggcgcacagggcctcgcaccgacgacgaagaacgtcgacggccagggcaccatgcaccgacgcgtactgcgtcaccatatgtacgcgggcagaagtctcgtcgactcgttgctgtccgcggtggaaatgagcagtacacctgggagctggaattggaacagttggtctggcacgacaacggtctggccgcaaattcatattga

SEQ ID NO: 11483 - DNA, 951 bp, Oryza sativa
  Clone ID: TFbOSC900229j.C1.o24.fg
atggcgtcgcgatccgcctccatcgtccaagccaacgtcacgagcgggtacaacctcctcacgatcgacggctacatggccaccacgccgatacccaccggagtgtacatgacgtcgagcgcgttcgccatcggaggccatcaatggcgcatcagttactaccccaacggcaagaactccggctgcgccgactacatctccttcgacctcatcctcgacgagaatgtcgccgcgccgcttcacgagcgggagcgcggcgaggggccgagccggttcgtcaagaggagaatcttggagaggtcgaggaggaggcatctgaagaacgattccttcatcgtccgatgcgacgtcgtcgtcaccgagttccgcccggcggaagtggcgcccggcagcgtcgatgtcgacgggccgccgtccgacctgcaccgtcacctcggcgacctcctccgcggagaaactggcgccgacgtggtgttcgaggtcggcggcgagaggttcgccgcgcaccggtgcgtgctcgacgcccggtcgtccgtcttcgacctagagctcttcggcgcaacgactgcgaaggaggtcgtcgtcggccaaagcaccggcatcgtccgcgtcgacggcatggaggcgcgggtgttcaaggcgttgctcttcttcgcgtacaccgactcgttgccggagatgatgacgacgacgaagaagaagatggaggaacaagcagccggcgacggcgacgacaggtacgacattgatgcgttcacagtggggaaggtcatcgcgctcgcggagcagcatgattgccgtgttctaaggaaacttgcctcgatttcttcatgcgtcgtcctggattttagaaggatgtactgttgggcaccggcgacggcggctccatcagctgctccttttcttttagacaagagttgtttgaaggcctcatcaaaaagtggtagctga

SEQ ID NO: 11484 - DNA, 414 bp, Oryza sativa
  Clone ID: TFbOSC31363j.C1.o1.fg
atgaaggagggcgacactgatggagtcgtgcacattgaagacatggaggcgcgggtgttcaagctgttgctccgcttcatgtacaccgactcgctcccggagatggaggaggaagacgtcatgtgccagcatctgctcgtcgcggcggaccggtacaacctcgagaggctcaagctgatctgcgaggagaagttgtgcaggcacattagcgtcggcacggtatggaacatcctgccgctggctgatcagcaccactgtgacgggctgaagaaagcgtgcttcgatttcctcggctcactggcaaacctgagtgctgtcgtcgccagtgatggcttcaagcatctttgcaggagttgcccctctcttatggaagagctggttgtcacgctggcacttccagggagtcatgcttag

SEQ ID NO: 11485 - DNA, 1173 bp, Oryza sativa
  Clone ID: TFbOSC595j.C1.o1.fg
atgtctcacacgcgctctaccaccgccggcgccgccggcggtaagccgccgatcgcgccgccgccgacgtcctccgcctccgccattgtcgccgacacggccagcgggtaccacctcttcaagatcaacgactactcgcgtaccagggacatcttccccaccggcagtgccctcaagtcccgcgcgttcaccattggcggccaccaatggcgcatccattactaccccaacggcaacacggaggagtgcggcgagtacatctccctgtttcttcatctcgacgagattgtcaccgacaagaacgtgtacgcgcagcacgggttccgtttattcgacgagtttgccggtgataatgatgacgatgatgaactgcagccttcctccatcgctgacctcgggcaggtcagtacctttggtggcaacaacattgggttgggacgactgaggtttatcaaaagggaagagttggagaaatcgaagtatctgaagaacgactccttcaccgtcagatgcgatgtcgtcgtcaccaagcggatccgctcggaggagacgccattggtggtgaggacctctccaaagccaaaggtggcgaggctcgtcaccgtgccgccgtccgatctgcaccggcatcttcaggacctcctctgcgccgagaagggcgccgacgtggtgttcgaggccggtggcgagacttttaccgctcaccggtgcgtgctcgcggcccggtcaccggtcttcagcgcggagctgtttggatcaatgaaggagagcgacaccacggtggtcatccgcatcgacgacatggaggcacaagtgtttagggccttgctcttcttcgtgtacaccgactcgttgccggagacgaagaaggaggacgagtatgccatgtgccagcatctactcgtcgcggcggacaggtacaacatggagaggctcaagctaatgtgcgaggagaggctatgcagctacatcggtgtgggcacggtgacgactatactggagttggccgagcaacacaattgtgatggcctaaagaaagcatgctttgattttctcagctctcaggagaatctgaaagctgtcacggccggtgagggattggagcatttgagcaggaactgcccttcccttgtgaatgagttgattggcacgctcggcaacttaattcagtga

SEQ ID NO: 11486 - DNA, 711 bp, Oryza sativa
  Clone ID: TFbOSC1353j.C1.o1.fg
atggccaaacacgagcatgtctcttccaagcgtctcaccgtggccgggtatgcgtgggagatccactacaccccaggccacgatgcgcactggcactactgggtcgccttcaagctcgtcttcctcggcatcggcgagcaggcgcagcgcgccggcggcgacgacgacgacaacgacgctggcgccatcaaggcggagctggaggcgtcgggtttcatcaccggcgactccttcgccgtgcgctgcaccatcacggtgctcagcaagaacaccatcaactcggccgagccgtcccccgaccttcacctgcagctcggtgagctgctgcggagcgggagattcgccgacgtcgagttcatcgtttccggcgtgtccatcgcggcgcacaggtgcgtgctcgccgcgaggtcgccgtccctcgccgccgccgtcctgaaaggtggcacgaggaagaaggatgggtcggtgcgcgttgaggtcaaggacgacatgagagccggcgtcttcagggcgctgctccatttcatctacaccgacacgttgatggagctcgactggagagaggatggttctgatcccctgctgccgaggacgatggtgatgagcttgaatgaagccgcgggtcggtatgggctggagaggctcaagcagatttgcgagaatatgcttggatttgacgatgcttgtagtgcagattgtgctgtcatgtaa

SEQ ID NO: 11487 - DNA, 339 bp, Oryza sativa
  Clone ID: TFbOSC400049j.C1.o20.fg
atgaaccagcagctcggcgacctgctggagaccgggaagggcgcggatgtggtgtttgaggttgccggccagacattcgcggcgcggtcgccggtcttcagcgtggagctctacggtccgatgaaggagagcgaacccaccggggtcgtgtgcgtccaagacatggaggcgcaggtgttcaaagcgttgctccgcttcatgtacaccgactcgttgccgaagatggaggaggaggaaggcgtcatgtgccagcatctgctcgttgcggcggatcggtacaacctggagaggctcaagctgatctgcgaggagaagctgtgcaaggggaaactattttaa

SEQ ID NO: 11488 - DNA, 1050 bp, Oryza sativa
  Clone ID: TFbOSC567j.C1.o1.fg
atggcgaccaccgcacccaacgtcgtcgacagcgactgcggcggcaccccgccgtcacgcgccggaggacacacctggtgcatccactactgcccaatcgggtccaccgaggaaagcaaggacttcatctccatctaccttgttctcgaggacaccaccgccgacgtagtgtcggcacatgttacgttcagtttgctcgaccaacaggggaatccggtgccatctcacaccctcacaaccccactgcttaaattctctcttcaaggcactctacctaagggcctggggtataacagcttcatcagaagagacgacttagagcgatcgggacatctcaaggacgattgctttgccatcggggtccatgtggtcgtcaccaaggaagcaataccgtcgtccatcaccgtgccaccatcggacatgcacctgtattatggcgatcttctctcaagcgaagaacggtacgccaccgatgttgagttcctagttggcggcgagaccttcgccgcgcatcgattggtgctcgcagcacgatcccctgtcttcatggtggagctttttgggccgatgaaggagagtactactgtaaacaagatacaaatatttgatatggaggcgcaagtgtttagggttttacttaagtttatctacatagacatgttgccggagatggatcaagaagatgaggccgcaatggctcaacatctacttgttgcagcggataagtatggcctgcataggctgaagatgatctgcgtagaaatattgagtaaccacattgatgccaactccgtggcaaccatcttggtgctagctgataagcaccattgctatggtctcagggaggcatgctttgacttccttaactcctcagcaatattgtctgcgattgtaaatacaagtgactttcagtatttgatccaaagctgccctgatattttggaggacataagtttcaacattgttgctcgtcaattggagagagcaattttcctatcagaaaaccaagcaggccaaatcaacagcgtagaaatcggaattcggtcatga

SEQ ID NO: 11489 - DNA, 1377 bp, Oryza sativa
  Clone ID: TFbOSC26652j.C1.o3.gm
atgggtcaaaccacttccaagtctgccggcgacggtaagcccaaacccaaaaccacctcggcggcggcagcggcggcggccgtcgtgagcgagacagcaaccgggtcgatgaccatgaggatcgccggctactctcaaaccaaggggatcggcgtcggcaacagcatcaactccagcaagttccacgccggaggccacacctggtacatagcctactaccccgacggcgaccgcgaggagtactccgactgggtctccgtctacctctgcctcgcccggccagctgccggcgccgcggccgacgacgtcgtcgaagcgaaattcacgctcagtctactcagcgggacgtacggtgcggtggtcgaagagaagatctgcacggccaagaaattctccttcgccaatggctactggccaagttgggggcatacaagattcatcaagaggaagaagatggacagtcgattgtggtcgtgtctacatctagacggtcaaagtttctatatcagatgtaatatcaccatggatattatccgctgtgaggcggccaccacggcggtggcggtgccaccgccggacctgcaccggcacctcgccgccctcctcggcagcggggtgggggccgacgtgcgcatcagggtcggcggcaagctgttcgcggcgcacaagaacgtgctcgcggcacggtcgccggtgttcatggcggagctcttcggcaataatggcgggaaagatcagaaggaggcgaaggctgctgctgcggcaactggcaatggcgttattcggattgatgatatggatttgagggtgtttcgggccatgcttcagttcatctacaccgataccctgcctaagatcgacaagggagacacggcgttcatggctcagaatctgctcgtcgcggctcataggtatgggattgagaggctcaagtcgatcagcgtcgacatgatacgcaaagcggctagaacgatgaacctgatagccatgatcattagaaataatgatgaaggaatcgccacccagctgcgcacgcgcgggcggctgggcctccatctccccgatgctccagaaaagcctcatcgatgccggcgtctgttcgagctgacgctgtgctacttgtccctggactcgacgctgctaattcaagctgctggtgatgcatctacccgaagctgcgacctcgccgagatgccggacgtccttgatttgcaagcttcaccgcactggagcgggctaaccatggaggaggtcatcgggaagccgccctgccggagcgcgccgaggatcgccggagctgccaccgactgccaagatttctatccattcccatgccggaggtcaagtatcacgcatggcgtcgaaaccagcggatga

SEQ ID NO: 11490 - DNA, 1029 bp, Oryza sativa
  Clone ID: TFbOSC401965j.C1.o35.fg
atggcgacgaccctcgcctccggtgccggcgatgctcctggtttggaatggtacattcctggtttggagatagaactgtgcagccggggtggttgttcagaatggttgggcctatacaacagggggctgtcaggccctcctgtgatctttagttccggttgtgatacctggcacatcaactaccgtcgcttgggaagcagcgacagcagcagggattacatctccttctacctcgttctcgaagatcaggtcgtcgaggacgacaccgtgacagcacagatcacgttcatcctgcttgaccaagacaggaagaagccgttcatcctaagaaaggacctagcggaatcggaacatctcaaggacgactgcttcgccattggtgtggatgttgttattgttaccaaggatgaggtgtcgtctgtcaaagtgccaccgccgtcggacatgcaccggcattacggcgatctcctctcgagcaaactaggcaccgacgtcgagttcgtagttggtggcgagacgttcaccgcgcaccgtttggtgctcgcggcacggtcaccggtcttcaagatagagctctttaggacaacggaagagcgcaccaccccaaatgcgataccgatcaacgacacggatgcacaagtattcagggctatgctttctttcatctacacggacacttggccaaagatagatcaagagaacgaggcggcaatggctcaacatctgctcattgcggcggaaaggtatggcctagataggctgaagctgatgtgtgaagatagattgtgcaatggcattatcgatatgggttccgtgacaaccaatttggtgctagccgagaatcactattgccatagtctcaagaaggcatgtttggagttgctaggtccctggacaactctagctgagttcatggcaacggacgactttcggtatttaaccaaaagctgtcctggtattttgaatgacctaatttgcatcgttgctgctcgtgaaagggaaaggacaattttttttcttggggaataa

SEQ ID NO: 11491 - DNA, 844 bp, Oryza sativa
  Clone ID: TFbOSC401315j.C1.o1.np
caaatttaaattttaattcaaatttatatggtgtagcagtaagagaagaaggggaggtaaagtagtaaaggggaggtgcgggtgatcgcttggaaggggagggagcgatcacccgtccgttaggagtaccctgcagactacaaactggggctactccaggttcatcaagaaaagggatttggaacaatcggagcatctaatagacgattcatttactatcaggtgtgatcttactgtcatgaagggcttctctagcaaaggaagccactgtaagccgtctgtggaagttcctgcaggccgtctggacctgcatttgggcaacctcctgagtaataagaagatgaatggaaaagacgtcacgatctacgttggtaaggagagattcagagcacacaaatgcatactcgccgctcgttcgtctgtcttcagggcgttgttcttcggtgccatgattgcggaaacccctaggaccattgaaatcgaagatatggaagctggtgtgttcagattattgctacatttcatgtacaatgactcgctgccagagacgtggtctcaagatgcaatgatggctcagcacctgcttgtcgctgcggattggtacaatgttgggaggctgaagctgatatgcgaggagaagctagcaaagcacattgactgcaacatggtggcgaccactttggctctagctgagcagcatagctgccaaggactcaaggaagcttgcctcgaattccttgcttcaaccaaccaatcttgagaggatgatgagaactgatggttataagcatctgaaaatcagttgcccaattgttctcaatgaactcattgcgagattgctgcc

SEQ ID NO: 11492 - DNA, 657 bp, Oryza sativa
  Clone ID: TFbOSC411533j.C1.o1.fg
atggatcgtgtggacacagccttgccatgtttctcaagtcagtgtatgaatatatccttgcgcacactgtttccccctatttttacttttcttaaatatatattatatgccggtgatgacgacggcactatacccatcccgcggtcgaacctcaacggccagctcgacgacatcgcggaccgtgccgacggctcggacgtgttgttctccgtcggcagcgagacgtttcatgcacaccgcgccgtgctcgccgcgcgctcgccggtgttcaagatggagctcctcgggtccatggcggagtccaccatgccgtgcgtcaccctgcacaacatcgacccggccacgttcaaagctctactacacttcgtgtacatggacgccttgccgtcgccgaccgaggcggtacgcattggagaggttgaagctgatgtgtgcacagaagctgtgggagagtgtgtcggtggagacggtggcgatgactctaggctacgcgcctacgccgagaggtaccattgcccggagctaaagagcaagtggctcagcttcttgatggcggagatcaacttcaagaaggtggccgtcactgatggctactttcatcttaggcgggatttcccgttaattatcgaagagataaaaaagcggattgagagttaa

SEQ ID NO: 11493 - DNA, 774 bp, Oryza sativa
  Clone ID: TFbOSC416369j.C1.o3.fg
aaattcgatgataagctgtcaaacatgagaattggtcgacggcccgggcggccgcaaggggttcgcgttggccgattcattaatgcagctggcacgacaggtttcccgactggaaagcgggcacgtgtggacacagccttgccatgtttctcaagtcagtgtatgaatatatccttgcgcacactgtttccccctatttttacttttcttaaatatatattatatgccggtgatgacgacggcactatacccatcccgcggtcgaacctcaacggccagctcgacgacatcgcggaccgtgccgacggctcggacgtgttgttctccgtcggcagcgagacgtttcatgcacaccgcgccgtgctcgccgcgcgctcgccggtgttcaagatggagctcctcgggtccatggcggagtccaccatgccgtgcgtcaccctgcacaacatcgacccggccacgttcaaagctctactacacttcgtgtacatggacgccttgccgtcgccgaccgaggcggtacgcattggagaggttgaagctgatgtgtgcacagaagctgtgggagagtgtgtcggtggagacggtggcgatgactctaggctacgcgcctacgccgagaggtaccattgcccggagctaaagagcaagtggctcagcttcttgatggcggagatcaacttcaagaaggtggccgtcactgatggctactttcatcttaggcgggatttcccgttaattatcgaagagataaaaaagcggattgagagttaa

SEQ ID NO: 11494 - DNA, 810 bp, Oryza sativa
  Clone ID: TFbOSC31365j.C1.o1.fg
atggctactgccgtcagccgcggcaccgcctcctccattgtggccgacgcggtgaccgggtaccacctcctcaagatcgacggctactcgcgaaccaagggcactcccaacggtgcagccctcacgtccgaccagttcgtcgtcggcggccaccgttggcgcatcagatactaccccaacggggacatcgccatgttcgccgattacatatcatttcacctcatgctagatgaaaatgccaccagcacgaagggtgtgaaggttaaagcccagtttcagatttgtttcgccgatcagaagctcggcaaacttctggacaccgagaagggtgcggatgtggttttcggggtcggaggcgagacgttcgccgcgcaccggtgcgtgctcgctgcgcagtcgccggtgttcagcgcggagctctttggtccgatgaaggatagcgacagggcaggcgttgtccgcatcgacgacatggaggcgcaggtgttcaaggcgttgctccgcttcatgtacaccgactcattgccggagatggaggaggaggaagacaccatgtgccagcatctgctcgtcgcggcggatcggtacaacctggagaggctcaagctgatctgcgaggacagattgtgcaagcacgtcggcgttggcacggtggtgaacatcctcacgctggctggtcagcaccactgcgacgggctgaagaaggcgtgcttacattttctcggctcaccagcgaacctgagtgctgtcctcgccggcgacggcttcgagcagctgagcaggagctgcccctctcttgtgaatgagctg

SEQ ID NO: 11495 - DNA, 855 bp, Oryza sativa
  Clone ID: TFbOSC594j.C1.o3.fg
atggctactgccgtcagccgcggcaccgcctcctccattgtggccgacgcggtgaccgggtaccacctcctcaagatcgacggctactcgcgaaccaagggcactcccaacggtgcagccctcacgtccgaccagttcgtcgtcggcggccaccgttggcgcatcagatactaccccaacggggacatcgccatgttcgccgattacatatcatttcacctcatgctagatgaaaatgccaccagcacgaagggtgtgaaggttaaagcccagtttcagatttgtttcgccgatcagaagctcggcaaacttctggacaccgagaagggtgcggatgtggttttcggggtcggaggcgagacgttcgccgcgcaccggtgcgtgctcgctgcgcagtcgccggtgttcagcgcggagctctttggtccgatgaaggatagcgacagggcaggcgttgtccgcatcgacgacatggaggcgcaggtgttcaaggcgttgctccgcttcatgtacaccgactcattgccggagatggaggaggaggaagacaccatgtgccagcatctgctcgtcgcggcggatcggtacaacctggagaggctcaagctgatctgcgaggacagattgtgcaagcacgtcggcgttggcacggtggtgaacatcctcacgctggctggtcagcaccactgcgacgggctgaagaaggcgtgcttacattttctcggctcaccagcgaacctgagtgctgtcctcgccggcgacggcttcgagcagctgagcaggagctgcccctctcttgtgaatgagctggttgccatgctggcgcctccaatccctccatcgagtcatgcttaa

SEQ ID NO: 11496 - DNA, 1122 bp, Oryza sativa
  Clone ID: TFbOSC400049j.C1.o22.fg
atgtctttcgccggcgtgtctctcgtccgcgacgggaggctgcagtcgccttcgtcgtcagccatcacctccggcgccaccagcgggtactacctcctcgtggtcgaaggctactcgcgaaccaaggacaccgtccccaatggcgacttcatcaggtctcgtcctttcagggttggaggctatcgctgggttatcgactactaccccaatggcgaaagttcggatgatgccgattccatctcagtttctcttcagcttgatcaggatagtgaacggcctttcatggcgcattacgagtttagtttcatcgacgaaactgagagacaaaagtcgacacatatttgttcggaagcattattcgacttctctgatgacaatcgttggggctacaccaatttcattagaagggaggagctagaaaaatccaagcatctcaaggatgattgtttcaccatcaggtgtgacatcatcctgaagaaggacggcagcaacaccaccggcgacgacgtggcggcgccgctcgtcgcggtgccaccgtccgacatgcaccggcagttcaccgatctgctcctgaccaaggtcggcgccgatgtgacgttccaggtcggcggcgagacgttcgccgcgcaccggtgcgtgctcgcggcgcggtccaccgtcttcatggtggagctctttggccccatgaaggagggcgcaacgacagcaagcgtacatatcagcgaaatggtgcccgaagcattcaaggccatgcttgcattcatctacaacgacaccccgccgccggagacggaggaagacgaagacggcaaggtcgccatgtggcagcacctgctcgtcgcggcggacaggtacgatctcccgaggctgaagctgatatgcgaggagaagctgtgcggccacatcggcgtcggcacggcgaccaccatcctcttgctggccgacaagcaccattgccgcgggctgaaggaggcgtgcctggagttcctcagctctcctgcgaacctggaagaagtaatggagcatggcggattggaggacgtcgtgggaacatgcccgtcagttctcgtggagctcattgcgaagcttgctctgctcaggactcagagagattataagtag

SEQ ID NO: 11497 - DNA, 2085 bp, Oryza sativa
  Clone ID: TFbOSC400992j.C1.o38.fg
atggccgcgccgcccgtctcgggggatggggcggcggcggcggcccccgtggtggccctgggcgccgcgggggcggtgggggggccgaggccgtacgaggtggccgtcgcggcggcggagctccggcccgtggactgcaacctcgcggcgctgtgcgaccacgtgcaggcggaggggttcgggtccggggcgttctccgacgtcgtcgtcgaggccatgggcgccacctaccgcctccatcgcctcatcatctcccgcagcgcctacttcaggaatatgctacatggtccttggagggaggctggagctcccacagtggtgttgcatatagatgatccaaacattgactcagaagcaattgcaatcgcgttagcatatctttacgggcaacccccaaagcttaatgataacaatgcgttccgagtacttgcagctgcatcatttttggatcttcaggatttatgtacaatatgtaccgactttattatttctgagctttggacatcaaactttttgcaatatcagctgtttgcggagagtcaagactatggtagtcatggggaacgtgtcagaaatgcctgctggggttatctttgccaaagtgccacattggaactacgagaggtgctcccaaaactttcttcacaaactttgcatgcgctccttacatctgacgaattatgggtacctaatgaggagaaacggtttgaactagcattatatgcgttgcttgcaaaggtcactctgtctgatgtagaagttagtggaaatgaaaatttgaaccttacgtcaagctctgcgaattctgatcattccatgaggaagggaaagagtccaatgaatgaagctggtgaggagcagcttatggggtctgaattgcagaacttaaaattacatgacaacacagagactataagtgcccataacactagtgatattccagatatggtaatcccgcaggatagcacagcatactccattgagcaaaatgctgaggcttccaggaggaagatgcttctgtgtcacagagtacaagcaatagttgctgatacttgcacaaattgttgccttactggtaattcatgtgcttgtaaacaagcacatgtgagttcacatcatcactacaggcaagagcatgatcggagcagtgcttccggtactgtaggtaatatctacctcacagatgcccatggtgaaggaaatgctgtttttgggcctgtccgtgtcaatgtcagaggagcagttgatggacttgctggtattgggagaggaaattctaatgttcctggtgcagcttgggctcccacacgttacgtcttctctcgtgttccttatggacttggttcaagaaatggtcaacaaccattcgcaaatgatgaatcagaacctagagtcgactacaatggtgatatttcaggagatggtctgactgcattggttaatcttagccaagaaagcagtgcttctcatcatcagacagaaagtatatttgagacaggcattcaagttagatattctggtgctgcttctgtttcaaccccaggtggttcctctctccagatgcaagagtcaaaagagcatgaacttggatccaacttggaaactacagagaacacaactatctcgttggacatgaaaacaccacttagtcacttcccacctttccgctttggagttgagtttgaagatgtgcacaggctcgcagatagtcaggtgaagcattcgactgaagtattttatgcaggctctctttggaaggtaagtgtccaggcattcaacgacgaggatcctcatggacgtcgcacccttggactctttctgcaccgacgcaaggctgagcctttagacccattgaggaaggccaacatgtatgtagaccaccgggaaaaggtcactgctcggtatcagcttatctgtccatcgaagagagaggtcatgattttcggaagcctaaagcaggctggcacactcctacccaaagctccaaaagggtggggttggcgcactgccatattgttcgacgaacttggcgatcttctccagggtggatccctgagaattgctgcagtagtccagcttgtctaa

SEQ ID NO: 11498 - DNA, 1092 bp, Oryza sativa
  Clone ID: TFbOSC400049j.C1.o13.fg
atgtcccccgccgccgcatgccgcggcaacccgccgtcgcggtccgccatcgtggccgacacggccaccgggtaccacctcctcagcatccacggctactcgcgcaccaagggcacccccaccggctcgcccctcaaatccacccgcttcaccgtcgccggccaccgctggcgcatccactactaccccaacgctgaccgcgccgactcagccgattacatatcgatgtacctctttctagacgagaagagcaacgccaccaggagcgtgaaggcgctgtttcagattcgcttcgccgatcaggtgaaggcgcagccttcactggcgctccatgccgtaagaacttttggtgatggttcttggtcctggggctatgcgaagttcgtcaggagggaggttctcgagaagtccaaggatctccgagacgactctttcaccatccggtgcgacattgtcgtcgtccgcgagttcgtcgcggaggaggcgaccgagatactccccgctggatcctttgtatccgtgcccccgtccgagatgaaccggcatttcggtgacctgctggagaccgagaagggcgccgacgtggtgttcgaggtcgccggcgagagcttcgccgcgcaccggtgcgtgctcgcggcgcggtcgccggtgttcggagccgagctctacggcctgatgaaggagggcgacactgctggagtcgtacgcatcgaagacatggaggcgcaggtgttcaagatgctgctccgcttcgtgtacactgactctttgccggagatggaggcggaggaagacgtcatgtgccagcatctgatcgtcgcggcggatcggtacgacctacaaaggctcaagctgatctgcgaggagaagctgtgcaagtacattggcgtatgcacggtgtcaaacatcctggcactagctgatcagcaccattgcgacgggctgaagaaggcgtgcttcagttttcttggctcaccggcaaacctcagtgctttcgtcgccgacgatggcttggaccatctgagcaggagctgcccctctcttatgaaagaactggttgttgagctggcacttccgccgagtcatgcttag

SEQ ID NO: 11499 - DNA, 951 bp, Oryza sativa
  Clone ID: TFbOSC400305j.C1.o11.fg
atggtgtccaagaagaagaagacggtgtcgaggcacaccacggagtcggaggaaggcaggcactcgttcgagatcgtcgggtacagcctcaagaagggcatcggcgtggacgagttcgtcgaatccgccaccttcgccgtcggcggctacgactggtgcatccgcttctaccccgacggcaaaggcgatggtgccaaggactacatctcggtctacctcgagctcctgaccaaggactgcgccgtccgggcggcctacgacctgagattggttaatcttgccaccgggttgccaaagagtgtctactctgaaacaactcacaggatgttcaattctgaggacagtagcaaatttgctccgcattacgcgactttcatgcacagaagtcaactggagatggaagcgtcaggctacatcaaggacgatcgcctcacaatcgaatgctttgttaccgtcgtcgtccaggaatcgatggcgtctaataccgtgaaggcccatgaattaatcaaggtgccgccgtcagatatattggaaaattttggcgaattgttggagaagggggaaggggcggatgtgactttcgttgttgggggagagaaaatcgccgcgcacaagatcgtccttgcagcacggggcctcctgcatttcatctacaccgattcgttgccggacatggatgatctcagtgatgacgactactatgagatgatcaggcttttgcttgtggctgctgataggtatgccatggacaggatgaagttgcagtgcgaaagcatcctcggcgagcatcttgatgtgcagaccgtcgcaactacattggctttagctgatcagcacaactgcaacggccttaaagatgtttgcattgagtttatcgccactcaaaacaagatggatgatgtggtggcaactgaaggctatgctgaggacttgcccttctgtcttagttga

SEQ ID NO: 11500 - DNA, 561 bp, Oryza sativa
  Clone ID: TFbOSC2852j.C1.o1.fg
atggcgaacatgctgagggccgccgacggcgcggacgtggtggtgctggtgcgcgaccagccgttccgcgcccaccgctgcgtgctcgccgcgcggtcgccggtgttcagggcggagctcttcggcggcggccacatgagggagaggcggacgagctgcgtcgtcgtcgacgacatggagccctccatcttctcggcattcctccacttcatctacacggattccttgccagaaaacccggacacacctggcgatgatcaagattgcatggcgatgcagcatttgatggtggcagccgatcggtatggcctggacaggctcgtgctgatctgcgaggagaagctgtgccgcggcattgacgtgcagacggtggcgacgacgctggctttggcagagcagcatcagcgtgtagcgctcaaggatgcttgccttggtttcatagtctctcggggtgttcttggcgctgtcgctaggactgatgggtttaagcatctgctcacgacctgcccgtcgattatggtggacattttagacaaggttgccagcgtcatgagcaagtaa

SEQ ID NO: 11501 - DNA, 1224 bp, Oryza sativa
  Clone ID: TFbOSC401762j.C1.o64.gm
atggcggtggcggaggtggagacggctgcactcggtgacggcggcagcggcggcggcggcgggagaagaagagggagaggcggcggcggcaggagtggaggcggcggcgcgagggggcggaggcggcgctcggcgacgtggacagggcgagggggtggacagggcgagggggagggggaggcggaggcggcgcgcgagggggcggaggcggcgctcggcgacgtggacggggcgagggggaggggggcggaggcggcggcgcgaggccgcaaaccggtgcggtctgcctccaccatcatagccggcacggagagcggccagcaccttctcaagatcgacggctactcccacaccaaggacaagctcccgacccccggcagcaacgtcaagtcccgatctttccgcgtcggaggccatagttggcacatcagctactatcccagcggcaacgactcggacaaagctaactgcatctccatcttcctcaacctcgacgacgatgtagacgtgaaagctcagttcaacgggtgggggtttgtgagtttcatccggagggacgtgctggagaaatcggagtatctccgggacgactgcctcacgatcgtgtgcgacctcaccgtcttcatggagctgcagacggaggacatcgacgtagacaccgcaacgccgccgccgccgccgccgcctacggtggtggtcccaccgtcggacctgcaccggcacctcggaggcctcctcgccaccggggagggcgccgacgtgacgttcgaggtcagcgggaagacgttcgcggcacacaggctggtgctcgcggcccggtctccggtgttccgtgcagagctttttgggccaagcaaggagctgggtgccacgaccggcggcgcggtggatcacaccgccatacgcatcgacgacatggaggcgcgggacttcgaggctctgctccgctacatgtacaccgactcgctgccggagccagagacgacgaaaggaggaggggacgcggcggcgatgctcccggacctggtcgcggcggcgagcaggtacaagatggagaggctgaggctggtgtgcgagcacaaactgtgcgagtacgtgaacgggagaacggttgtttccatgcttgcattcgcccgggagcaccattgcgatggcctcaaggagaagtgcttgcgtttcctcgacgatccagtgaaagtgagagagatcgtgaaggctcgataa

SEQ ID NO: 11502 - DNA, 816 bp, Oryza sativa
  Clone ID: TFbOSC400049j.C1.o4.fg
atgtcctgttccgccattgtggccgacggggtgaccgggtaccacctcctcaagatcgacggctactcgttaaccaagggcacccccactggcacggccatcaaatccaacccgttcactgtcggcggctaccgctgttcatcaaaaccgaggatttcgagaagtccgactacctcaggcacgactcgttcaccgtccggtgtgacatggtcgttgtccgcaagatccgtgccgagaaggggaagactgacccacctcgccgagaccttcgtgtccgtgcccccgtccgacatgaaccggcagctcggcgacctgctggagaccgagaagggcgccgacgtggtgttcgaggtcgccggcgagaggttcgccgcgcaccggtgcgtgctcgcggcgcggtcgccggtcttcggcgcggagctgtacggcctgatgaaggagggcgacgccgccgtggtcgtgtgcatcgaggacatggaggcgcgggtgttcaagctgctgctccgcttcatgtacaccgactcgttgccggagatgaagaataaggacgcaggcgtcatgtgccagcatctgctcgtcgcggcggatcggtacaacctggagaggctgaagctgatatgcgaggagaagctgtgcaagcacattagcatgggcacggtgtcgaacatgttggtgctcgctgatcagcaccactgcgccgggctgaagaaaacgtgctgcaattttctcggctcatcggcgaacctgagtcctatcagcaggggctgcctctctgttatgaaagagcttgtgttaggatgctggtgcatccactga

SEQ ID NO: 11503 - DNA, 786 bp, Oryza sativa
  Clone ID: TFbOSC401315j.C1.o8.fg
atggcaaatgattgcaacactatctcctctgccattgtcgccgaagctgtgagcgggtcacacgtaatgaagattgatggatactcaaaaaccaaggcgctgatcaagaatgaagagtgtctgtcatctaccccattcagcgttgctggctacacctggaccatcagatactatcccaatggtcaatctacggagtgtagagaatacctgtcgttgtacctgtttctggactcttttgccagggacgtcaaggcaatttacagcttcaaactgctggacaagaatggaagaccattgctactgaacagcatcgccagccctgtcaaaaccttcaaacttagaggtaccggttggggctacccaatgtttatcaagagcaaggatttgaaagcatcagaatctctgagagacgactcattttccatccggtgcgatgtcacggtcatgaagcccatttgtagcaaggaaaccccggccatgcccaagccgtctgtggaggttcctccaggtgatctgcaccagcatctgggcgacttgctgaagaacatggatggagcagacgtgacgttcgacgttggccaggagagattctcggcacataagtgcgtgctcgctgctcgatcatccgtcttcgaggcaatgttctttggtgctacgagagcgaagccccgtaggagcaatatcaaaattgaagatatggaagctggcgttttcagatcattcctacatttcgtatacactgacttgctgcctgatacgtcgcaagacgtggtgatggctcagtaa

SEQ ID NO: 11504 - DNA, 1026 bp, Oryza sativa
  Clone ID: TFbOSC401180j.C1.o17.fg
atgatgatatcatccagcttcgccgagttgaagctcgagtacccagggacgacgacgacgacgaacagcttcgccgtcggcgacggggagcagtcgtgggtcatcagatgctacccgcgcggctaccgcgaggaggacaatggcgagtacgtctccctgcgcatcggcgtgccggcgagatcgaacaccgtcagggccatcttccacaccttcctgatgcgccgcgacggcggcgtcggcgcgccgtcgatcatctgctcggacagggccttcccgatgagtgtccccggccacccccgcggctacggcggcgcgttccggcacctcgtgaggcggagcgacctcgagccgctctacgccgtcgacggcgtggtcacgatcgtctgcggtgtcgtggtcttcgccgacgccggcggcggcggcggcgacgacgacgacggcggccctatacccgtcccgcggtcgaacctcggcggccagctcggcggcatcgtggaccgcgccgactgctccgacgtgtcgttctccgtcggcggcgagacgttccacgcgcaccgcgccgtgctcgccgcgcgctcgccggtgttcaaggcggagctcctcgggtccatggcggaggccgccatgccgtgcgtcaccctgcacgacatcgatccggccacgttcaaagctctactacacttcgtgtacacggacgccttgccgtcgccatcgacgtcgtcgtcgtcgtcgtcgacgacgaccggttttttcgagagcttgctcgtggcggcggacaggtacgcattggagaggttgaagctgatgtgtgcacagaagctgtgggagagcgtgtcggtggagacggtggcgacgacgctaggctacgccgagacgtaccattgcccggagctaaagagcaagtgcctcaacttcttgatggcggagagcaacttcaagaaggtggccgtcaccaatggctactttcatcttaggcaggacttcccgttaattattgaagagattaaaaaacggattgagagttaa

SEQ ID NO: 11505 - DNA, 1095 bp, Oryza sativa
  Clone ID: TFbOSC407812j.C1.o18.fg
atgggaaagctcaccgacgtgacacgctccaacgacatccagctcaagatcgtgggccactccttgacaatggccatggacgacggcgagttcttcagttccaggcggtattgcgtcggcggacacgactgggagatccgcctgcggccgaaggatccctgggttggcaggcgcgaccggccgctcacgctcaagctcgtcctgcgcggcgcgccccgcacaggcagcggcagtgtgaaggcccagctaagctgctgcttggtagatccgacgcagaagctgaggccgtcggagatgaagaccgtgtcgcataagttccacaagcccggtgactactcgccccgtgccgtgttcatggcaagggacgagctggaggcgtcgggctatctcacagacgattcctacgtcgttcagtgcgccatcaccgtgctccgagaacagccggagatagccgcggcggcggcagcggcgggcgacagcgcgaatgcagccgtggcgccgtcgtccgagttgcacgcgtaccttggcgccctcctggagagcaagaccggcgccgacgtcacgttcgtcgtgtccggcgagtcgttcgccgcgcacaaggctatactggcctcgaggtcgccggttttcatggccgagctgttcggggcgatgaaggtgaaggcctcggagcgcgtcgaggtcaaggacatggaggcgccggtcttcaaagccattcttcacttcgtctacactgacaccgttccagagctcgaccaccgtgatggcgaggagacggaggcagcgtcgacggcgacggcgatggcgcagcatctgctcgccggcgccgacaggtacgggctggagaggctcaagctcatctgcgagagcaagctcgccgagcgcatcgacgtcgacacggtgtcgaccacgttggcgttggcggagcagcacgactgctcgcatctgaaggccaagtgcgtcgagttcattgctgccggcacggctgaaaaccttgatgctgtgttggccactgatgggttcaaacatctggaggcgagctgtccctcggtgttgactgaccttgtcaaggttgcccgtggaagaaagaattaa

SEQ ID NO: 11506 - DNA, 972 bp, Oryza sativa
  Clone ID: TFbOSC900305j.C1.o3.fg
atggcaaacgatacgaacaacacctcctcctctgtcattgctactgaaaccacgagcgcgtcacatgtaatcaagattgatggatacacagtaactaaggatctgatggagaatggcgaatttgtgtcatctatcccgttcagtgttggggacttcctctggaacgtcagatactaccccaatggcaactgctcaaagaacgcagactacctgtcgttttctgtgtttcttgagtctcactgggccgaggacgtgaaggcaaagttcagcttcaaactgctggacacgaataataaaccggtgcgatcgcgcaacttcatctccaatacgcacaatttcagcagaagaggttcaaactggggctactccaggttcatcaagaaaagggatttggaacaatcggagcatctaatagacgattcatttactatcaggtgtgatcttactgtcatgaagggcttctctagcaaaggaagccactgtaagccgtctgtggaagttcctgcaggccgtctggacctgcatttgggcaacctcctgagtaataagaagatgaatggaaaagacgtcacgatctacgttggtaaggagagattcagagcacacaaatgcatactcgccgctcgttcgtctgtcttcagggcgttgttcttcggtgccatgattgcggaaacccctaggaccattgaaatcgaagatatggaagctggtgtgttcagattattgctacatttcatgtacaatgactcgctgccagagacgtggtctcaagatgcaatgatggctcagcacctgcttgtcgctgcggattggtacaatgttgggaggctgaagctgatatgcgaggagaagctagcaaagcacattgactgcaacatggtggcgaccactttggctctagctgagcagcatagctgccaaggactcaaggaagcttgcctcgaattccttgcttcaaccaaccaatcttga

SEQ ID NO: 11507 - DNA, 1248 bp, Oryza sativa
  Clone ID: TFbOSC101916j.C1.o11.np
tggcagcagcagctgcagccacatgatcagcaggcggcttcttgctcagtcacggccgggatgatgatgcaagcttctggatacgacatggcagaattggatcacatcttcctctacctcaacagccaggatcaagcatcagcagcaattcaagaacaacctcgtaagccacatatatatatgcacttattactgtcaccaaatcttcaaaccctcaacatcttcccttcacagccaatgcacgccggcgagccttctcccaagggatcatcatcccatcacggcggcgcatcgtcggcggcggcgtcggagcacgagggccccaagacgccggacgccaagacgctgcggaggcttgcacagaacagggaggcagccaggaaaagcaggctaaggaagaaggcttacattcaaaatctggagacaagcaggatcagactgtcccagctggaacaggagttggtgcaaagatcaagaactcagcacgtatcaacatagggtgcaattttgggtggtggagctttttctgccggcattggaggacaaagcccaggtatatataatcaggcggcgtggttcgacggcgagtacgcgcggtgggtggagagccacgagaggatgatggctcacatgcgggcggcggtggaggagcagccgcagcacggcggcctacggcagctggtggacgcggcggtggcgcaccacggcgtgctggtggagctcaaggccgccgtggccagcgccgacgtcttccacctcgtctccgggacgtggctgcccgccgccgagcgctgcttcctctggattggtggcttccgcccatccgagctcatcaagatgatggcgcggcacgcggagccattgacggagcaacaggcggcgggtgtgtacggtgtgcagcagtcggcgagggagagggaggaggcacttgaccgcgacctccacgccacccaccacgccctctccgatgccgtctcctcggactcactcctgctcttccctcccggcaccggtgccaccgcatactccgacgtcgccatggctcacctctcccttgccatctccaatctctcctccctcgaagccttcgtcaggcaggcggacgcgctgaggctgcagacgctgtacaagctgccgcagatactgacggcgaggcagtcggcgcggtgcttcctcgccatcgccgaccactcccaccgcctccgcgccctcacctccctctggctctcgcgcccgcgccaccccgac

SEQ ID NO: 11508 - DNA, 900 bp, Oryza sativa
  Clone ID: TFbOSC401607j.C1.o25.fg
atggcagatgctagttcgaggactgacacatcaacagtcctggataccgacgataagaatcagatggcacatcattttgatatcaattttgtgaagaatttgattgttaaggtagacgggcaaagtggagctattgtgccttctaattcatctgatcggtctgacagatctgacaagcccatggaccaaaaggtgttacgccggcttgctcaaaatcgtgaggctgcaagaaaaagtcggctgagaaaaaaggcatatgtacaacaattagagagcagtaagctgaaacttgcaagcttggagcaagagatcaataaagctcgccaacaaggaatttacatttcgagctcaggagaccaaactcatgctatgagtggaaatggagctatgacttttgatttagaatatgcccgttggttggaggaacaaaacaagcagataaatgagctgaggactgcagtaaatgctcatgcaagtgacagcgacctccgtctcattgtagatgggataatggcgcattacgatgagatattcaggctgaagggtgttgccgcaaaggctgatgtgtttcatatactttcaggcatgtggaaaacacctgctgaaaggtgcttcttgtggcttgggggttttcgttcctctgagcttctaaagcttcttgtgaatcagctcgagccattaactgagcagcagttgttgggactatcgaacctccaacagtcctctcagcaggctgaagatgctctatcacagggaatggaagcgttgcaacaatccttggcagatacgttggccgggtcccttggtccatcaggatcttcagggaacgtggcaaactacatgggtcaaatggctatggccatgggcaaacttgggacccttgagaatttcctccgtcag

SEQ ID NO: 11509 - DNA, 1560 bp, Oryza sativa
  Clone ID: TFbOSC401001j.C1.o21.fg
atggagggtggtaggctaggaggagcggcggcttcagcatcggcggcggcggcggcggacgcgcgcggcgggatgtcgggcttcgcggctcctcagcacgccatagtgaagcatggaccagggagtgtgacacattgtggtggaaaatggacttttgctgaactatgccagtctgaacaaatttgggttcttgactgctactgcatgcaatgggcatgcaagtttgcgaccaatgcaactgaatgccatacaaatttgaacaacgtgcaacctactcaagttactgattttggggcacttgcgcagtctgctggattccgaatagaagatctcgctaatctcagtacaaatggtttgttcaatctgaagtcaaatgctcataccattatcaatgaccccctccaatttgagaattatgtaaagtctatttctccgtctaatattactacaacagcaacagtaacagtagttgaccctcagacactggtcccacaaaagggagcacaactgaatttggtaactataaggactggtaacgttgagaattggggggagtcgactattgctgatacaagtccaaggactgatacatcaacagatccagacactgatgagaggaatcagatgtttgaacaaggacagttagctgctcccactgcttctgattctagtgacaggtcaaaggacaaactagatcataagacacttcgccgccttgcccaaaatcgtgaagctgctaggaaaagccgtttaagaaagaaggcatatatccaaaaccttgagagtagcagattgaaacttactcagatagagcaagagcttcagcgggctcgtcaacagggcatttttatatcaacatcgagtgatcagtcccactcagcgagtggaaatggagctttggcatttgacatggagtatgcacggtggttggaggagcataacaaacatataaatgagttgagggctgcagttaatgcacacgctggtgataatgatctcaaaagtacagttgatagtattatggcacactacaatgaaattttcaagctcaagggtgtggcagccaaagcagacgtttttcatgtgctgtcgggaatgtggaaaacccctgctgagaggtgcttcatgtggctaggtggcttccgatcatctgagcttcttaagttactggcagggcaattagagcctcttacagagcagcagcttgctggcatagccaacctgcaacaatcctcccaacaggctgaagatgctctttctcaagggatggaagcactacaacagtcgcttgcagagaccctggcatcaggatctctcggccctgcaggatcttctggtaatgttgcaaactacatgggacaaatggcaatggctatggggaaacttggtaccctagaaaacttcctacggcaggctgataatctgcggcttcagactcttcagcaaatgcagcgcatattaaccactcgccagtcagcacgagctctacttgcaataagtgactacttctcccggcttcgtgccctgagttctctttggctcgcccgtccaagggaataa

SEQ ID NO: 11510 - DNA, 1428 bp, Oryza sativa
  Clone ID: TFbOSC404032j.C1.o1.fg
atggggggctccagagaggaagatcgtcagcaccacaatcacctcccttctgagctccccctcggcttccggagctcctcaccgacgacgatgatcgcctcttcctccatgagcaaggaatcgagcaactacgacatggccgatttcgatcaagcttcgctttttctctacctagacagtcatgatcaacaatccatccaagaacaacgacaaactctgaacatcttcccttcccagccgatgcatgtagccgacccagctcatgaagcaaagagtgctggggtagccatggccatgcttcccaatggcaaccagctgcaggttcttccttctcatcccagcaagaagcctgatcagcaaggtggtcaaaagattaattccagtgtccctactaatccacctggccctaatcttcccttgcctaactctgccaaggataacaagaatagtagcctcattaaggggccaaaaaaatgtggcttgcagaaggaaggaagcagcagtgggaagggtgcaacaacatccaatgatccagaaagagaaggaaggaggacactagaccctaagacactgaggaggcttgcacagaatagagaggcagcaaggaaaagtaggcttaggaagaaggcttacattcagcagttggagtcaagtaggattaggctaagccagcttgaacaacaagttcacgtggcaagagtacagggtgctatgctgggtgctggagatcagcaccagggccttccttctggcccttcagctgcatcgttgtttgacctggagtatgggagatgggtggaggagcacagcaagctgatattccagctgagggcagccctgaacgagcagatggcggacagccagctgcaggtgttcgtcaacggcgcgatggcgcagcacgacgagctgctgagcctcaagggcgccattgccagggctgacatcttccatctcctctgtggcgtctgggctacccccgccgaacgctgcttcctttggctcggtggatttagaccctctgaggccatcaaggtgatgcttaagcaggtggagccgttgtcggaggggcagctgatgagcatctacgagctccagcaagcggcgaaggggacggaggacgccctcagccacgccatggacggcctccagcagtcgctctccgacaccgtcgccgcccctgacgtcgccgccgccggcggcttcatggggcacatgtccctcgccatgaacaagatctccgctatggaggacatcgtcaggcaggcagatggcctgaggcagcagaccctgcacaagctgcagcatatgctgaccatccggcaagccgcccggtgcttcgtggcaatctccgactacttccaccgcctacgcgcactcagcacactatgggttgcgaggccaaggccggaggaggggccggcaatgtag

SEQ ID NO: 11511 - DNA, 1089 bp, Oryza sativa
  Clone ID: TFbOSC400216j.C1.o4.fg
atggcgaacgcgaagctgcccaagcaggcgctgctgccgccgcgcagcccgttcccgacggcggcggcggcggcggggccgtacgccggcgaccacggcccgatcgcgcggccgcagggtgcgccgcaccacaggcacgggcacggccacgggcaccaccagcgcacgtcgtcggagagcttcatcgaggagcagccgtcgtggctcgacgacctgctcaacgagcccgagacgccggtgcggcagcacggccgggccggccaccgccggtcgtcgagtgactcgtttgcgatgttcgacggaggcgccgccgccggcgcttacgccaatggctttgaagggatgggaggaggaggaggaggagggcaggccgcgccgtggggtggtgtgcaggagtactatgcgaagccaagctcgtttggtaggcaccagggccggccatgggagcagggcatgaacaatttggtgaattacaggcaaagcggcggtccaccgatgccggcgaaggagaaggttggtgggcaccatgggtcgccgagcgtgttgagggatcatgatcatggtatggacaggagatcctcggacgaatcggggcatgatcagaaggttgggcctgagaggaaggagggcgtgccgccgaagcatgcacaatccgaggcggacaccaagcgcgctaaacagcaatatgctcaaaggtcccgcgttcggaagcttcaatatattgcagagcttgagagaaaagttcaggcattacagtcagaagggatagatgtgtctgctgaaatggagtttcttagccaacagaatattatgcttgacttggaaaacaaagccttaaagcaaaggctggaaagtctagctcaagagcaactaattaaacgctttcaacaggagatgtttgagcgggaaattggtcgtctcagatcattgtaccagcagcagcagcagcaacagaagcagccgcaacctactactaccctcagtcgaagtaacagcagagacctggattcacagtttgctaatctgtctctgaaacacaaagaccccaactctgggcctcttcgtactcagtcctcgtcaatcttgtga

SEQ ID NO: 11512 - DNA, 1041 bp, Oryza sativa
  Clone ID: TFbOSC401539j.C1.o89.fg
atggcgcagctcccgcccaagatcccggtggcggcgccggggcaccaccagcactgggcctcggccgggggcgccggcgacgcggcgtgggcggatgagttcgccgagttcgcggcgtcgcggcggggcgcgcaccgccggtcgctgagcgactccgtggcgttcgtcgaggtggcgccggcggggtgcggggcgggcggcgagttcgacaggctcgacgacgaccagctcatgtctatgttccccgacgagggcgggtcgtcggccccggggtccgacaacggcggcagcgacagcgacggcggcggcgacaagcacgccgcggcgcagagcgacgacgggcagcacgccgccggggagccgacgcaggagcaggcggcggccacctcgccgacggagctgatccgggaccccaagagggtcaagaggatactggctaatcggcagtcggcccagaggtcgcgagtgaggaagcttcagtacatctccgagctcgagcgcagcgtcacaaccctgcagaagtggcgccagtttgagaccgaccgatggacacagccacactggttggctggcaatagcacacaatgtggcgaggagatgagcgagagcaacgaggtatccgtgctgtcccctcgggtggcgtttctggatcagcagcggacgatcctgaccgtcggcaacagccacctcaagcagcggatcgcggctctagcacaggacaagattttcaaggatgctcatcaggaggcgttgaggaaggagatcgagaggctgaggcaggctgtcctagcctgttacaggctgacggcacctgacctcttgtgcatgatttggttcccgcttctcggtgaaagaaaccaccggaggcgaaaaacctgcgcagcatatcgttatcgtggaacaccgttactgctccagtttcaaggacaagtcgcacagcgtgcaatacaacatctgcattattcagaatttgcagtatatggatctggatcagcgatgattaaccatgctacatgtggtgttcttgtctcaagatactga

SEQ ID NO: 11513 - DNA, 516 bp, Oryza sativa
  Clone ID: TFbOSC402026j.C1.o13.gm
atggcggagcagctgggcggcgtgggcagcccgcagctaagcctgagcagctgcagctccttcctttccatctccagcgccggtaccagcgccgccgatggtgctccccatctatccctcggcgtgggcggcgccgaggagctggatctgctgctgcaggtgggcataggcggtggcggtggcggcggcggcgacgaggaagaggaggagcgcaagaccatccggatgatgaagaacagggagtcggcgctgcgctccagggcaaggaagagggagctggagaaggaagttcgccggctggtgaatgagaatctcaagctcaagaggcactgcaaacaaggacaacacaagagtggagcgggctacgatgctatcaagacctaccaacaacgccccttcagcgagtccccttcctcctcccttcggccagggcgaccgtacctggccggcctcctccccctccccttcacctcgctttgcctccgccaccatgatcagcccactgcccgctactga

SEQ ID NO: 11514 - DNA, 1046 bp, Oryza sativa
  Clone ID: TFbOSC403288j.C1.o1.fg
ccttctccaccactgctactgctgcggctacagctaggcctcctcctacactggacatcttcccatcctggcctatgaggtctctccacacacccaaggagggttcaaatgtgacagcagacacaacagactcggagagcagcagcaagaacaacagcaaccaaaatgcctcatcagaccagcatgtgctagtaggagacatggcaggccagttcgaccaaattccacagcaggaacaacacaagaagatggcaactaacagtcccactcatagcagcaagactggcaaggcgcttgatccaaagacgatgagaaggctcgcccagaaccgagaagcagcacggaaaagccgactgcgaaagaaggcttacatccagcagcttgaaagcagcaagctgaagcttgctcagatggaacaggatatccacagagctcgttcccagggcttactgcttggagctccaggtggaaacaccagctcaggtgccgcaatgttcgacgtcgactacgcccggtggctggaggaagacagccagcgcatggctgaactgcacggagggctgcacgcacatctgccggacagcgacctcagagccatcgtcgacgacacgctaacccactacgaccacctcttcaacctcaagggcatggcggccaaggccgacgtgttccacctcatcaccgggatgtgggcgaccccagctgagcggtgcttcctctggatgggcggattccggccctccgagctgctcaagacattgacaccccagctggatcccctgactgagcagcaagtggttggtatctgcaatcttcaacagtcatcgcaacaggcagaggaagctctctcccagggcttggatcagctgcatcagtcattagcagaaaccgtggctggagggtccccgttggatgaccccaacgtcgggagtttcatgggtcacatggctattgccctcggccagctatcaaatcttgaaggttttgtcatacagatcaagataggagttgcactctctctttgtgtgactcaacttcataaatga

SEQ ID NO: 11515 - DNA, 1443 bp, Oryza sativa
  Clone ID: TFbOSC8883j.C1.o9.fg
atggcttccatggcaccaccttgcccaactccatggcttctgcaaacctcttatcattctggtcaacaaatttattcccaacaagttgttgatctcatgttacatgttttaatttcccttcttaatttgcattggcctgacactgacagcgagcaaggaggaggaggaggaggtggcgctgcctattttggagagctagaagaagctcttgttcatcaggttgccacactcaggaggagggctcaacaaactgcaaccaccaccacctctcaccatggacacaccactcccttctccactgctgctgctgcagctacagcaacagcaacagctaggcctcctgctacactggacatcttcccatcctggcctatgaggaggagctctcttccaacaccgaaggatggatgttcaaatgtaacggcagacacaacggactccgagagcagcagcaagaacaacggcgatcagggtgcagcagcagccgacatggcgagccagtttgatcagatcccacagcagcagcagaagcagcacaagaagatggcagcaagttccactcacagtgaccacaggatgacaaagacacttgatccaaagataatgagaaggttagcccagaaccgagaggcagcacgcaagagccggctgcgaaagaaggcttacatccagcagcttgagagcagcaagttgaggctggctcagatggagcaggatctcgagagagctcgttcccagggcctcttgctgggaggatcaccaggtggaaacaccagcgcaggagcggcgatgttcgacgccgagtacgggcggtggctggaggacggcgggcggcggatggcggagctgcacggcgggctacacgcgcacctgccggacggcgacctgagggcgatcgtcgacgacgccctggcccactacgacgagctcttccgcctgagggcagccgccgccaaggccgacgtgttccacctcatcactggcacgtgggccacccccgccgagcgctgcttcctctggatgggcggtttccaaccgtccgatctgctcaagacagtggcaccccagctagaccctctgactgaacagcaagtggttggcatctgcagccttcagcaatcatcgcagcaggcagaggaagctctctcccagggcctggagcagctgcatcagtcactagctgagaccgtcgccaatggcggctccgtggtcaacgaagccagccttgggagcttcatgggttacatggcccttgccctgggcaagctgtccaaccttgaaggctttgtcatacaggctgataacttgaggcaacagactcttcatcagatgcacagaattctgacaattaggcaggcagctcgatgtttcttggcaattggcgagtaccataatcgcctccgtgccctcagctccctctgggcttctcgtccccgagagtaa

SEQ ID NO: 11516 - DNA, 1098 bp, Oryza sativa
  Clone ID: TFbOSC400765j.C1.o13.fg
atggcgtcctcgtcggacgagcagccgaagccgccggagccgcccgcggcggcggcggtggcggggacggccgtggccaccgccgccgcggcggtgccgacgcacgccgagtgggcggcttcgctgcaggcgtactacgccgccgcggggcacccctacgcgtggcccgcgcagcatctgatggcggcggcggctgcgggggcgccgtacggcgcgccggtgccgttcccgatgtaccacccgggcgccgccgcggcgtactacgcgcacgcgtccatggccgcgggtgttccttacccgacagctgaagccatggcggcggcggcggcggcggcggcgggggcggtgccggaagggaaggggaaggggaagggcgccgccgcgtcgcctgagaagggaagctccgcggcgccctctggggatgatgcatcccggagtggtgacagtggcagcgaggagtcgtctgatactagagatgatgacactgaccacaaggattcgtctgcacctaagaaaaggaaatctggtaatacatcggcagaaggtgagccgtctcaagctacgcttgtgccctatgctgctgtcgagtcaccgtatccgttgaaggggaggtctgcgtcgaagcttccagtttctgcaccagggcgggcggcacttcctaatgccacacctaatttgaacatagggatagatctttggagtactcccccagccttagctgtgcccgcagggcagggggaagcaagtcctgggttggcacttgctcgacgtgatggtgttgctcacctggatgagcgtgaattgaagagggagaggcgcaaacaatctaacagagagtctgccaggagatcaaggttgcgcaagcaggttggatacctctatgggtctggcagtagatggcagacctggaaagaaacacttattctgcttggtgctgccatatttctggcaggaggaatagagtgcatgctagatgccgggagaggcatttggtatgatgtcagcacttcaccagatgttggcttgtctgcacacgggcaatatgcacaacaagccatgctccaagaaactgacaaacagcatgctcccaggccttaa

SEQ ID NO: 11517 - DNA, 453 bp, Oryza sativa
  Clone ID: TFbOSC420547j.C1.o6.fg
atgtcatatgcatttaacaaattgctcccaactacccatttcaggcagtatgctcagaggtctcgtgttagaaagctccagtacattgcagagctcgagagaagagttcaagctttacagacagagggtgtagaagtttctgctgagatggattttcttggtcaacaaaatatcatgttagatttggagaataaagccttgaaacaacggcttgagagtctatctcaggaacacctaattaaacgctttcaacaggagatgtttgaacgggaaattggccgtctcagatcattgtttcagcaacagcaacagcagcagcacataccacagcagcagggtcctacccacagtcgtagtaacagcagagacctcgattcgcaatttgcaaacatgtctctaaaacacggcgatcccaactcagggcgtgatgctgttccaggccttcgcatttag

SEQ ID NO: 11518 - DNA, 2574 bp, Oryza sativa
  Clone ID: TFbOSC400302j.C1.o17.fg
atggctgcggcagtggcaatgcgagggagtagcagtgatggaggtggctatgataaggtttccgggatggactccggtaaatatgtgcgctacacgcctgagcaggtggaggcgcttgagcgggtgtacgccgattgccccaagccaacctcctcccgcaggcagcaactgctgcgtgagtgccccatacttgctaacattgagcccaagcagatcaaggtctggttccagaacagaaggtgccgggataagcagcggaaggagtcttcacggcttcaggctgtcaacaggaaattgacggcaatgaacaagctacttatggaagagaatgagcgactccagaagcaggtctcccaattggttcatgagaatgcccacatgcgacagcagctgcagaatactccgctggcaaatgatacaagctgtgaatcaaatgtgactacccctcaaaaccctttaagggatgcaagtaacccctctgggctcctttcaattgcagaggagaccttgacagagttcctctcaaaggctactggtacagctattgattgggtccagatgcctgggatgaagcctggtccggattcggttggtattgtggccatttcacatggttgccgtggtgttgctgcccgtgcctgtggtttggtgaacctagaaccaacaaaagtggtagagatattgaaagatcgtccatcttggttccgtgattgtcgaaacctggaagtctttacaatgattccagcaggaaatggaggaacggttgaacttgtctacacacagttgtatgctccaacaactttagttcctgcacgagatttttggacgttacggtacacaaccacaatggaagatggcagtcttgtggtctgtgagagatctttaagtggttcagggggcggtccaagtgctgcctctgctcagcaatatgtgagagcggaaatgcttccaagtggatacctggttcgcccatgtgaaggtgggggatcaattgtgcacatagtggaccatctggatcttgaggcatggagtgttcctgaggtgcttcggccactctatgaatcttcaagggtagtcgctcagaaaatgactactgcggcactccggcacatcagacaaattgctcaagaaacaagtggggaagtggtgtatgccttggggaggcaaccagcagtgctacggacttttagtcaaaggctgagcagaggctttaacgatgccattagtggtttcaatgatgatgggtggtctataatgggcggagacggtgttgaagatgtagttattgcttgcaactcaactaagaaaattaggagtaacagcaatgctggcatcgcctttggagcccccggaggtattatatgtgctaaggcatcaatgttactgcagagtgttcctccagcagtactggttcgatttctgagggagcatagatctgaatgggccgattacaatattgatgcatatttggcttcaactctgaaaacaagtgcatgttcacttactgggttgcgacccatgagattttctgggagccaaatcatcattccacttgctcacacagttgagaatgaggagattcttgaagttgttcgccttgagggtcaacctcttactcatgatgaagctcttctttcaagggatatccacctgcttcagctctgcactggaatagacgagaagtctgtgggatcctcctttcagcttgtgtttgcaccgattgatgatttcccagatgaaactccattgatttcttctggcttccgtgttataccacttgatatgaaaacattagaactaatagaggcatttggtttcaaatattcccttggaaaaataaagcaagatggtgcatcctctggtaggacattagatttggcatctagtcttgaagtaggttcagcaacagctcaagcctccggagatgcatctgcagatgattgtaacttgcgatctgttctgacgatcgcttttcaattcccttacgagttgcatctccaagacagtgttgcagctatggctcgccaatatgtccgtagcattgtttctgctgtgcaaagagtgtcaatggctatctctccctctcaaactggtctaaatgccggacagaggataatctctggtttccctgaagcagcaacccttgctcgatgggtttgccagagctaccattaccatctaggggtagagttacttagtcaatcagatggagatgcagaacaattgttgaagatgctatggcattaccaagatgctattttgtgctgctcattcaaggaaaaaccggtgtttacatttgccaacaaagcaggactggacatgctagaaacttcccttgtcgccttacaggacctcacattggacaggatctttgatgagcctggaaaagaagcattgttctcaaacattcccaaattgatggagcagggccatgtctacctgccatcaggcgtgtgcatgtcaggaatgggtcggcatgtttctttcgatcaggccgtggcttggaaagtgcttgccgaggatagcaatgttcactgcctggccttctgtttcgtcaactggtcctttgtgtga

SEQ ID NO: 11519 - DNA, 216 bp, Oryza sativa
  Clone ID: TFbOSC401928j.C1.o5.fg
atgtcggcggcgcgggggggggggagggcgtcctcatcggcggtggaggaggagctgagggcgctgatggagaagcggcgggcgaagatgatgctgtcaaatagggagtcggcgcggatgcggaagcagcgccacctcgacgacctcaccgcgcaggtggcacacctccaccgcgagaatgtgcacgtcgccactgcgctcggcctcaccacctag

SEQ ID NO: 11520 - DNA, 2568 bp, Oryza sativa
  Clone ID: TFbOSC400500j.C1.o14.fg
atggcggcggcggtggcgatgcggagcggcagcggcagcgacggcggcggcggcgggtacgacaaggccgggatggactccggcaagtacgtgcggtacacgccggagcaggtggaggcgctggagagggtgtacgccgagtgccccaagcccagctcctcccgccgccagcagctgctccgcgactgtcccatcctcgccaacatcgagcccaagcagatcaaggtctggttccagaacagaaggtgccgagataagcagcggaaggaggcatcaaggcttcaggccgtgaaccgaaaattgacggcgatgaataagcttctcatggaggagaatgagcgtcttcagaagcaggtctcccagctggtccatgagaacgcgtacatgaagcagcaacttcagaatccgtcattgggcaatgatacaagctgtgaatcaaatgtgaccactcctcagaaccctctgagagatgcaagtaacccgtctggactccttacaattgcggaggagaccctgacagagttcctctccaaggctacagggactgctgttgattgggtgccaatgcctgggatgaaggttgattgccaacttctcagattcactctgcctgcatcaaatgaccctggtccggattcgtttggtattgtggccgtttcacatggttgccgtggtgttgctgcccgtgcctgtggtttggtgaatctagaaccaacaaagatcgtggagatcttaaaagaccgcccatcttggttccgtgattgtcgaagtcttgaagtcttcacaatgtttccagctggaaatggtggcacgatcgaacttgtttacatgcagatgtatgctcctactactttggttcctgcacgagatttttggacacttagatacacaactacaatggaggatggcagccttgtggtctgtgagagatcattgagtggttctggaggtggtccaagtacagcctccgcacagcaatttgtaagagctgagatgcttcctagcggctatctagtgcgcccatgcgagggtggtggctccatcgtgcatattgtggaccatctggatcttgaggcttggagtgttccagaagtgcttcggccactctacgagtcatctagggtagttgctcagaaaatgactactgcagcactacggcacatcagacaaattgctcaagagacaagcggggaggttgtatacgctttggggaggcaacctgctgttttgcggacatttagtcagaggttgagtagaggcttcaatgatgctataagtggtttcaatgatgatggttggtctgtcatgggtggggatggcattgaagatgtgatcattgcttgcaatgcaaagaaggttaggaatactagcacttcggccaatgcttttgtaactccaggaggtgttatatgtgctaaggcatccatgctactgcagagtgtcccacctgcagttttggttcgatttttgagggaacatcgttctgaatgggcggattataacttcgatgcatattcagcttcatctctgaagacaagctcatgttcacttcctgggttgcggcctatgagattttctgggagccagatcattatgccacttgctcacacggtggagaatgaggagattttagaagttgtccgtcttgaaggacaagcacttacacatgatgatggtcttatgtctagagatattcacctgcttcagctttgcactggaatagatgagaaatcaatgggatcctgcttccagcttgtctctgcaccaatcgatgagcttttccctgatgatgctccgttaatatcttcaggctttcgtgttataccgctggacatgaaaacagatggtacacctgctggtagaacattagatttggcatctagccttgaagttggttcaactgcacagcccacaggggatgcatctatggatgactgtaatctacgatcagtgctgacaattgcctttcagttcccttatgaaatgcatctccaagacagcgttgcaactatggcccggcaatatgtccgcagtattgtttcctctgttcagagagtatcaatggctatttctccttctcggtctggcttgaatgctgggcagaagataatttcaggcttccctgaagccccaacgctagctcgttggatttgccaaagctaccagttccatttgggggtggagttacttaggcaggcagatgatgctggggaagcactattgaaaatgctatgggattacgaagacgctattttgtgctgttctttcaaggaaaagcctgtgtttacttttgccaacgagatgggactaaacatgctagaaacatctctcgtcgctctccaagatctctcactggacaagatatttgatgaagccggtaggaaggccctatacaacgagatcccgaaattgatggaacagggttacgtgtacctgcctggtggagtgtgcttgtccgggatggggcgccatgtttctttcgagcaagctgtagcatggaaggtgctcggagaagacaacaatgtgcactgcctcgccttctgcttcgtcaactggtccttcgtgtga

SEQ ID NO: 11521 - DNA, 1173 bp, Oryza sativa
  Clone ID: TFbOSC900303j.C1.o8.fg
atgtctcggtcgccgcacctccctccccgctgcccgccgctgggtcctcagatcacaaggagggacgacagcttgttcacgcagagctgcaggtttccgtcggaggatccattcgtcggtgagccgccgtgctggctcgatgatctcctcgcggactccgggaagagccacacccttcctcctctcaggagagcctgcagcgattctgatgctatcttggatgtgctgacgtcgttccagagcccaatctaccctatcgatgaaggggatccgcagccggttggcgaagctggggagtcgttcaatgctgcggctgaagggggtggaagtggtgctggcatcgaaggtagctgtgtttatggaccaaattcgccgagacagaagactaggctgaccagttcagagagttccatggttaacgctgtcttggagaatgtccctagcaacccattgcagtacctgatgattgatgccacaagtggtgtgaactgtaatgttggtgcagccaatggaactggagacacaggtgatgctgtatgccacgctgatcaagagaagtcacttaaaaggaagaaagtggcacgaagggaatctcatggagttaggttgggtggggctaagaggcagtgggaggatggtgagggtggtgctgtactgcaggaggtgaagcaaagaaatggggatgagagcttgacacctatacctgaagtcgtgagtgaggctggatggtgggctgttactggaaggagcatggggtggaggcgctcaggccaaagatcaagggtcagaaaacttcaatacattgctgatcttgagagaactgttgactcacttcagaacataggggctgatttggctgtgagggtggcatctcttttccagcttcgtaatgctctatcaatggaaaacaagcaactgaggaggcagatcactagtcttcagcaggcaaaactaattaaggatggccaaacgcagatgctgaagaaggaaaccgagaggctgaagcagctctcagtgcgccaccgcaggagcaggagcgtcacctcttgctttgaggccaactcatttggaggaggagacccatctgcgatcaactggcagatgctcgacatgtcaaagctcagcttgaacggcggcgctgttgttcctcctagaggcggctacggcatgtga

SEQ ID NO: 11522 - DNA, 2049 bp, Oryza sativa
  Clone ID: TFbOSC400397j.C1.o26.gm
atgagccagttgaagatgctcatggatgtgacattacatgggatgatgtggatgaagctgttggtacgacacactatcttcgaggtcacaatgttccaaggagagctcacaatcgtgttgggcatcaacaagcttgaaccaggtcagcttgctcttgctgctgcttctgactctgacagatccaaggacaaacatgaagatcaaaagacattgcgtcggctcgcccaaaatcgcgaggctgcaaggaagagtcgtttgaggaaaaagtctcgcacagtgccctccaattctgggcagttgcagggcatttttatatccagctcagtggaccagactcattccatgagtggaaatggggcattggcttttgatatggagtatgcacgttggttggaagaacacaataggcaaattaatgagctaaggtctgcagtcaatgctcatgcaggtgataatgagctccgtggtgttgttgacaagatcatgtcacactatgaggagattttcaagcagaaaggaaatgcggccaaagcagatgtctttcatgtgttatcaggcatgtggaagacaccagctgagaggtgtttcttgtggctaggaggattccgaccatccgagcttttaaagcttctttcgacacagcttgaacctctcactgagcagcagctgtcagggatagccaaccttcagcagtcttcacaacaagctgaagatgctctttcacaaggaatggaggcccttcagcagtccttggcagaaacattggctgggtctcttggttcttctggatcaacgggaaacgtggcaaactacatgggccaaatggcaatggccatggggaagcttgggacccttgagaatttccttcgccaggtaactttgatctggctcagcacgccgcagtggcagtacatcggcttcttcactgtgatgccggcgtatgggttaacctgcacaggagatcccatcacttccattggcttatggtgtgattggttgggatacggagagtgcgcaggggacgactggcacgttattgactgcggggcagattgccacacaagcgagttggtgatcgaaaacttgaagccccggtgcatcagcaatgcaaggaggcgagcggtgttgcgagcatcatcgagcccacagtgggcacggccctcccatgagaaggagcagcagaggacggactgcattgtaacccaaaaattgcaagaatatggtaccaagctggccgatggggatgagctggggaggaagatgccgcaacatcaaggcagggagaaaatgctggctttgaggcgggagccgacgccgcccggctatcttcccgacggtgtttatcccgtcatggcctcggaaaagaatatcaaagtgttccagatgggaacacatgtggaggcttctattccgttccaaactagagcggccgctgagcatgcttggaaactcaatggccgtgccatctatgacggctgttgttggctgaacatacagtgggcgcaaccttctagtagcacccccgcagcggcaacacctcttgtcgggatcactaaggaattgatagcaaatgtgcttgaattgaaggccatgttgaaggagagtaatgcatcaaaagaggtggaagatgggcgcacaaagcagaaggtggcagcggtagacctagcagtcatggcgccagttgctatgccattaactcagatgtccccgccggcggactccttggtggagcaagagatggcaacacagcagaagaccgtggagggcacgacgaggacattgccagcagtggtgccatcgtctcagtttcctccatcagaggctggtttctcgaactcaaaggagcaagaggcagcgccagcgtggtcctcggaggcgggcggaatggcatggcacgaaggtgggtcggcgttttgcgtgaaggtggagcacagtgatggcgcgtgttgcgcgcagccaggctttgcttcctcccatgtgttggctgttgggctggccgggtcgactattgctgaagacaacggggacctccaaatggtcctggtttaa

SEQ ID NO: 11523 - DNA, 348 bp, Oryza sativa
  Clone ID: TFbOSC401427j.C1.o4.fg
atggaggccaacgccgacgccgacgagcggcgcctccgccggaagatcttcaaccgggagtccgcgcgccggtcccacgcacgcaagcagtggcacatcgacaagctccgcgcgcgcgccgggcgggggcgggggcggaggcggctgggggcggcgggcgccgaggccgtggtctggcgggcgccggaggagaggccagaggcaggcgccgaggcctcggatggcgggcgcgaaggcaaggccagttgcaagccacccggtccggctcctccgccactagtcgcccggtggcgcgggcaagctccgcatccacagtcgggcgctcggttcagcgtttggatgttatga

SEQ ID NO: 11524 - DNA, 1572 bp, Oryza sativa
  Clone ID: TFbOSC20620j.C1.o14.gm
atggctacgaatctgagatttgcttctataagttttcgaacttgtccgaaaatgcttttcggaaactccgaaaattacagtcttggcctccaatggctagtttttgaggggctcgggaacgcctattcatccctccctctagacgacattaaggtcctttcaattggtatcagagcaaggtctctcattccgggcttcaccgtcttgagagaagatgtcgacaagagggccatgggtcctaatatagagcgagttgtagatgtgagtatttctcctcctaatgatatggagctatcatttgaagaggaagagaaatgcacacatctcaatgctcaagctactaatgttttgtttagtgctttgagtgaagatgtgttcaaaaccatcatgccacttgaagatgcttatctaatttggacaacattaaaggaaagatatgacaagtccaaatgtgatggagaggatgctcttagggaaacatcatttggtgattgctctactttatcgtctcatcatgacaagtcccaagtgattatctcctccgaccaagaagatcatgtctttatgggtgatgatgatgatgacgactccgtggttgatcacttgaacaaggacacaacaatggtcatcaagctcatgagggttattgagaagcaacaagcatgcctcattaagaagaatgaagaaatcaaggatctagccgatgaacacaagaaactcaagggatataattcttcattgattatgaggtatgaacaattggaaaatgaatttgcttgtgccactaattctattgcttgtgtagcatctttgaagaaggaaaatcaagagcttaaatctcaacttgaggagatcactagcaaggagaagcacatggatcatggacttatgggcaatgctcaaccttctcaagataaccatgagagcatggtgaagaagcttgagaagggatcaaccgtagcttgcactaagttctatcaagaaaacaagtccaataacaagaggacgccggtcgccgctgcctcccctcccactggatccggcggaggggaggacgccgccgccgctgggccgccaggccgccaccgcctctccttctctcccactagatctggtggagggcaggaatcgcccctgcacgccacctcccgccgccggtcgttgctgatgggcagggggagtccagcgccgccgccgcgcggaagacgaggtcacgaaggggagacgacggggaggggtgccggggcaaggccactcgacggcggcgcactcacccacgggcgacgtcacgcggccgtggagctggagctctcgctgggcggcgtgatctcccccaatgtcacatcgttcgacctaaaggcggcggtgtgcagccacgggttattcatgattgcgcccaaccattgggaccggacgtcacgcgcgctagtgcgccccctccgcgtcaccttcgaccgtaccaccttcatcgccgtctgcatctcccgccacccccacgtgcctcttcgatgtgttcctcgtttctgtcgtcagtgcgctcgatgccccctccccgctcgaccagactgttga

SEQ ID NO: 11525 - DNA, 1416 bp, Oryza sativa
  Clone ID: TFbOSC418822j.C1.o4.gm
gaggacgaggcggagatggcgagcacgaggctgagcctcgagctggggaaggtcggaatccagtcgtcgccgccatgctccagcagctcaagcgccggccaccccgcgatgcagcccgccgccgcggccacggcggcgccgggctacggccccaggccacgccacatgctcaccgaggccgagaaggaggcgaagcgtctccggcgagtgctcgccaaccgggaatccgcccggcaaaccatcctccgccgccaggcgatccgagatgaattggcaagaaaagttgcagatttgtcgtcgcagaacgagaccatgaaaaaggagaaggacgtggtggcgatcaggacgatcaagaaggcggccgtggcggagccgatggacacggcgccgccggcgcagcagcaagcggagacggcggcggccgtggcgccgccgacgacggccaccccgccgtcgacggcgccgcagccgagcttcctgtacaccgcggcgccggcgggcgtggcgccggtgccgtacgtgtggggctcgtggccgccgtgcgggccgacggggtacgagccgccgccgccgctctgcctcccgccctgcgcgtggtactaccccgtcgtcgccgatccgcgcgtgtcctcgccgccgacgtcgacgtacccgcagtcgtaccaagaacagccgacgagcagccctggcggcgggacggccgaggaggacaccgacgacgacccgtgctcgctgacactcgccatcgacgtcgacaagaggagcgcgcctggcgccggcggcagcgcggccggagctggacagcacgcctccataagcgacagggagaaggcgacggcggcggcggaggcgaggaagcggaggaaggagctgaccaagctgaagcagatgcacggcggcggcggcggctcccgtcccggcggcggaggcgagcactgcgcctgcccaagcctacgcgggatgccaccgccgccgccgccgcagccgcagccgacgacgacagcgacgacgtcggcgaacggggggaaggtgaccccgaacctgacgatggacgccgagggcacgcggctgctcaacctcaccgtgctgcagcgcctcgaccccgccgtcgaggacatcctcatcaccgccgcccacgtcaccctctacgacttcaacatcgacctcaaccagtggagtcggaaagatgtggaggggtcgctgttcgttgtgaagaggaatactcagccgaggttccagttcatcgttatgaacaggcgtaacacggataatctggtggaggatctattgagtgattttgaatatgaacttcaacctccgtatttgttgtaccgcaatgctgcccaagaagtaaatggtatctggttctacaatcaacatgactgcgaagctgttgcaagtctttttggaaggtaa

SEQ ID NO: 11526 - DNA, 549 bp, Oryza sativa
  Clone ID: TFbOSC401058j.C1.o53.fg
atggcgtctcccggcgttgtgtgtactactgtaacgccgacgtcgtcggccgggtcggaccaggtcgtggccggcggcggcgaggcggcgcggcggccggtggcgccggcggtgatggaggagcggaagcggaagcggaaggagtcgaacaggctgtccgcgcagcggtcgcgggcgcggaagcagcagcagctggacgagctggccgggcaggtggcggcgctgcgcgcccggaacggcgccctgggcctcgccgcgcgcgaggcggcgcgccggtgcgccgccgtgcgcgccgagaacgagctgctccgcgcgcgctccgtcgagctcgccgcgcgcctcgactccctcaccgacctggcgcagtgcctgcacgacgccgccgcggcctcctccttcgccgccgcgcccccgatgatgatggcgggcgccgccaccgccttccccaccggcgccgtcggcgccgccgccggcttcatgatgccccagctgccgccgccgctcctcgacgccaccaccatgggcatgcattgcaactactactactag

SEQ ID NO: 11527 - DNA, 1101 bp, Oryza sativa
  Clone ID: TFbOSC401001j.C1.o60.fg
atggcgtcgaaggccggaggcgggggcgtcgcgcggcgcggaggagggcggatgcggagtctggggaggcagggatccatgtacagcctcaccctcgacgaggtgcagagccagctgggcgagccgctgcacagcatgaacctcgacgagctgctccggagcgtgttccctgacggcctggccatcgccgacggtgccggtgccaccaccagtagccagcagcatcagccgggctcgggcctcctgcggcaggggagcatcacgatgccgcctgagctcagcaagaagacggtggacgaggtgtggaaggggatccaggctgctccgaagaggaatgccgaaacgggcggcggcggcggcggaggtcgacggcggcgagagaggcagccgacgcttggggaggtgacgctcgaggatttcctggtcaaagctggggttgtcacccaaggatctctcaaggagcttagtgatgtaggcaatgtggatccggttggaagaggtgttacagcaaccgggactgtggatctggcacctggatcacactggatagagcagtataagcagcagattgcatctactgatgctcatcaccatgggcagcaaggtgtgcagggtgcttattttccgaatcgattggtccctcagccacttaatgttggccccggtgctattctggagccatcctactctgatggccagacttcttcaggaatgatcggcggaatgtccgattcgcagacgcctggaaggaagcgaggcatgtcaggggatgtggcagataagttgatggagagaaggcagaagaggatgatcaagaacagggagtcagctgcccgttcaagagccaggaagcaggcctacactaatgaacttgaaaacaaggtttctcgtttagaagaggagaatgtgaggctaaagaggcaaaaggagtcagactatttgcattatactaggagtaatcttgtgatggaaaacatagaaatacatcgcagtctaatcaacagcaatattatcatctggtatgatgagctgtactacttcataggtagtgtatcaagttacaatcaagaggtcttcgtcatggtcattgtttgtgtgtag

SEQ ID NO: 11528 - DNA, 462 bp, Oryza sativa
  Clone ID: TFbOSC12168j.C1.o2.fg
atgtcgagtgggacctcgtccgggtcgagccagggaacccggagctccaggtcggaagatgacctgaacctccaggcccagatggagaagaagaggaagaggaggaaggagtcgaaccgagagtcggctcggaggtctaggatgaggaagcaacagcacctcgacgaactcacctcgcaggtgaaccagctgaagaatcagaaccagcagctgagcatggcactgagcctgaccacacagaaccttgtggcagtgcaggcacagaactcagtgctgcaaacccaggagttggagctgcagagcaggctgtgtgccctaactgacatcctgatgtgcatgaacaacaccagtgctactcctactcctacaattccagccaccactacaagtgcttgtgatatttttggtgccagctcatggaaccagccacccatagacttgtaccagtaccagtgcttctga

SEQ ID NO: 11529 - DNA, 471 bp, Oryza sativa
  Clone ID: TFbOSC401981j.C1.o10.fg
atgcccctcatgcacctcctggccccaccagcgcaagccttcgtcgtcgcgccgccgcgcgtcgcgcccgcgttcgacggcgccgccgcgccaccgcgtgaggacgacccagccgccgaccagccgccggagagggaggccgacgccgacgagcggcgcctccgccggaagatctccaaccgggagtccgcgcgccggtcccgcgcgcgcaagcagcggcacctcgacgagctccgcgcgcgcgccgagcggctccggcgctgcaaccgcgagctcgcggcgcgcggccacgccgcccgcggccgcgcgggcctcgtccgcctcgccaacgcgtggctccgcgccgaggccgccgccctcacccgccggctcgcggcggcgcgccgcgcgatcgcgctcggccagctgtaccgccctgccgcggcggcggcggcggcgtcgggacgttcgagcagacgatcgcctcgctaa

SEQ ID NO: 11530 - DNA, 1647 bp, Oryza sativa
  Clone ID: TFbOSC411383j.C1.o7.fg
atgggtttcttccgccggatcgccggcatgtttggaatctccagggacgacgccgaccaccacccccaccaccaccaccacgacggcgccgcgggggactccgccgccgccgccgaagtcccgcaggataaggtcgtcgccgccgcggccgccgcggcggctgccgggaacgtgcagaggcgcgggttcagcgtccaggtccccgtccccgtcgagcggcccgggcccgggccggtgctcgtgccctgtccccagggcgacggcggcgttcagggctttaggtggtatacaaggaagctaaggattgatgaggatggtgatgtcgcagatgagttcttggatgaagttgttccagaaatctcgatcaacaacgactcaactccagctggaagatatcaagtgaaatataatacaaaatcagctgctctagcaatgagaaagcaaatatccgtcattgatggtgacatctgtcattccttggagtaccaagggcgcctgcgttggaactgccaatcactcttggccaaaggattgcaagaatttgatatgcgcgtctgccttggagcctcccaggagtgtggatctgtggagttcttggttgatgcgtcattcttaaatttgagtgttttgggatgcctgatgggtactaatgatcctggcacgccgtccaaggcaacaaaggcatcagaaccggagcagtctccagccactacatctggcactacagctccagtttaccctgaatggcctggttttcaggcctactcggcaattccaccgcatgggttctttccacctcctgttgctgcaagtccccaggctcatccctacatgtggggagctcagggtgtgcatccatttaatcactaccctatgctggcaaatggaaatgttgaaactgctggaactgcaccaggtgcttcagaaattaacgggaaaaatgagcttggcagaacatctggtccatctgccaacgggattacctcccacagtgagagtggaagtgagagtgaaagtgaaggaagtgatgccaactctcaaaatgattcacattcaaaggaaaatgatgtaaaggaagatggtagttctcagaatggcatatcacatacagcattaaatcagaacatgtcgatggctccaactcaaacgggtgtagtaatcgggggagttgctcccacaacaaacttgaacataggaatggactactggggtgctgctggttcttcgcctgttcctgcaatgcatggcaaagcatcgtctggttcagttcgaggagagcaatgggatgaaagagagctcaagaagcagaaaaggaagcagtctaatcgggaatcagcacgtagatcccggctgcgcaagcagaacatcatggatagtcttattgaagcaccaaaatatttgttccaggctgagtgtgaagagctttctgtacgcgctgacaatttaagggcagaaaactcctctcttagggctgagcttgaacggatcaaaaaggagtacgaggcacttctttcacacaatgcttcactcaaggaaaaactagaggggaacagtgattcaataccttatatgaatgaacagaacgacaccaatggcacccaccagaagcaacaggattctgatgctcagcctaatgatgcgccttga

SEQ ID NO: 11531 - DNA, 969 bp, Oryza sativa
  Clone ID: TFbOSC401520j.C1.o23.fg
atgacgccgctgccgttggcgaggcaggggtcggtgtactcgctcacgttcgacgagttccagagcacgctgggcggggtcgggaaggacttcgggtcgatgaacatggacgagctcctccgcagcatctggacggccgaggagtcgcacgccgtcggcgccgccacgacgacgacggcgacgacggcgtccgtggcggcggcggagcacgcggcggtgggggcgccgcccgttcagaggcaggggtcgctgaccctcccccgcacgctcagccagaagaccgtcgacgaggtctggcgcgacatgatgtgcttcggtggcggcggcgcctccaccgcgccggccgccgcggagcccccgccgccggcgcaccggcagcagacgctcggggagatcacgctgaaggagttcctcgtgcgggccggcgtggtgagggaggacatgtcggtcccgcccgtcccgccggcgccgactcctacggcggctgctgtacctcccccgccgccgccgcagcagcagacgccgatgttgttcggtcagagcaatgtgttccctccgatggtgcctccgctctcgctgggaaatgggctggtctcgggagctgtcggacacggcggtggtggtgccgcgtcgttggtttcgccggtgaggccggtctcgtccaatggcttcggcaagatggaaggcggggacctgtcgtcgctgtcgccatcgccggtgccgtacgttttcaaaggtgggctgaggggaaggaaggcaccgggcatcgagaaggttgtcgagagaagacagcggcggatgatcaagaacagggagtctgccgcgaggtcgcgccagaggaaacaggcatatatgatggaattggaagctgaggtagcaaaacttaaggagctgaacgatgaactccagaaaaagcaggatgaaatgttggagcagcaaaagaatgaggggttaggtggcagcatttaa

SEQ ID NO: 11532 - DNA, 969 bp, Oryza sativa
  Clone ID: TFbOSC420174j.C1.o9.fg
atgacgccgctgccgttggcgaggcaggggtcggtgtactcgctcacgttcgacgagttccagagcacgctgggcggggtcgggaaggacttcgggtcgatgaacatggacgagctcctccgcagcatctggacggccgaggagtcgcacgccgtcggcgccgccacgacgacgacggcgacgacggcgtccgtggcggcggcggagcacgcggcggtgggggcgccgcccgttcagaggcaggggtcgctgaccctcccccgcacgctcagccagaagaccgtcgacgaggtctggcgcgacatgatgtgcttcggtggcggcggcgcctccaccgcgccggccgccgcggagcccccgccgccggcgcaccggcagcagacgctcggggagatcacgctggaggagttcctcgtgcgggccggcgtggtgagggaggacatgtcggtcccgcccgtcccgccggcgccgactcctacggcggctgctgtacctcccccgccgccgccgcagcagcagacgccgatgttgttcggtcagagcaatgtgttccctccgatggtgcctccgctctcgctgggaaatgggctggtctcgggagctgtcggacacggcggtggtggtgccgcgtcgttggtttcgccggtgaggccggtctcgtccaatggcttcggcaagatggaaggcggggacctgtcgtcgctgtcgccatcgccggtgccgtacgttttcaaaggtgggctgaggggaaggaaggcaccgggcatcgagaaggttgtcgagagaagacagcggcggatgatcaagaacagggagtctgccgcgaggtcgcgccagaggaaacaggcatatatgatggaattggaagctgaggtagcaaaacttaaggagctgaacgatgaactccagaaaaagcaggatgaaatgttggagcagcaaaagaatgaggggttaggtggcagcatttaa

SEQ ID NO: 11533 - DNA, 30 bp, Oryza sativa
  Clone ID: TFbOSC8882j.C1.o13.gm
atggtgggcggcaagctgacgtggcagacg

SEQ ID NO: 11534 - DNA, 729 bp, Oryza sativa
  Clone ID: TFbOSC401982j.C1.o6.fg
atgatgaagaagtgcccgtcggagctgcagctggaggcgttcatccgggaggaggccggcgccggcgaccgcaagcccggcgtgttatctcccggcgacggcgcgcatgaccccaaaccaaccacctcagcgaaccacgcgcctgaaagcgactcggactccgattgcgattcgctgttagaagcagagaggagtccacgcctgcgtggcacgaaatccacagaaacaaagcgaataagaaggatggtgtccaacagggagtccgctcgacgatccaggaggagaaagcaggcacagttatctgaactcgaatcacagcaatccatctatgatcaggtcgagcaactcaaaggcgaaaactcatccctcttcaagcagctcacagagtccagccagcagttcaatacagcggtcacggacaacaggatcctcaaatcggatgtagaggccttaagagtcaaggtcaagatggctgaagacatggtcgcgagggccgcgatgtcgtgtggcctgggccagctcgggctggcgccattgctcagctccaggaagatgtgccaagctttggatatgctcagtttaccacggaacgatgcctgtggtttcaaaggcttgaacctgggtcgacaggttcagaactcaccggttcaaagcgctgcaagcctagagagcctggacaaccggatatccagcgaggtgaccagctgctcggctgatgtgtggccttaa

SEQ ID NO: 11535 - DNA, 837 bp, Oryza sativa
  Clone ID: TFbOSC900405j.C1.o4.fg
atggacatcgaggcgttcatccacggcggaagcgggggcggcgacgccgacgccgaccacccgctcggcatcttctccgccgccgacctctccggcttcggcttcgcggactcgagcaccatcacagggggcattcccaatcacatatggccccagtcccagaacctgaacgcacggcatcctgcggtctccacgacaattgagtcgcagtcatcaatctgtgcagcagcaagtcccacatcagctaccaatctgaacatgaaggagagccaaactctgggaggcacaagtggttcggattctgaaagtgaatcgctgttggatatagagggtggtccatgcgaacaaagcacgaacccgttggacgtgaagagagtgagaaggatggtgtccaatcgggagtctgctcggcgatcgaggaagagaaagcaagctcacttagctgatctcgagtcacaggttgaccagctccggggcgaaaacgcatcgcttttcaagcagttgacggatgccaaccagcaattcacaacttctgtcacggacaacagaatcctcaaatcagacgttgaggccctccgggtcaaggtgaagatggcggaggacatggtggcgcggggggcgctgtcgtgcgggctcggccacctgggcgggctgtcgccggcgctgaacccccggcaggcgtgccgcgtccccgacgtgctcgccggcctggactacgccggcgacgaccccttcacggccgggctgtcccagccggagcagttgcagatgcccggcggcgaggtggttgacgcctggggctgggacaaccaccccaacggcggcatgtccaagtga

SEQ ID NO: 11536 - DNA, 1152 bp, Oryza sativa
  Clone ID: TFbOSC401400j.C1.o16.fg
atgggaaaaggagaggtagccactaggtccaaatctcaaaaatcatcggcgacacagaatgaacagagtacacccactaatcctcctactgcatatccggactggtctcaatttcaggcatactataatcctgctgggacagctccaatgaccccaccgggctttttccatccaaatgtggctccaagtcctcaggggcacccatatatgtggggtccacagatgatgcctccctatggaacaccgccgccatatgcggcgatgtatgcgcaagggacaccatatcagcaggcacctatgctaccgggttcacacccatacaatccttatcccgggcaatcaccaaatgggacagttcaaactcctacatctgctggcggaacagagacagataagtcaggcaaaagtaagcggaagactcccctgaagagatcgaaaggaagcttaggtaatcttgatgtagttgcaacaaaaaataaaaaggcgcccgcaaaaccttcagcatcctcatccaatgaaggttcttcacacagtgagagcggaagtggaagttcttctgaaggaagcagtacaaattcaaaaagtggttcaaggacaaaggatggttctgagcatggccagggtaatgatgctagcaacaaaggagctactgctcagagttctgcggttgagcccgtacaagcatctactgggccagttgtgcttaaccctatgatgccatactggcctgtccctcctcccatggctggcccagcaactggtgtaaacatgggaatggattactggggtactcctacttcagtacccatgcataataaagttattgcagcaccagcatcagctccttcatcaaactctcgtgatgttgttctcagtgatccagccatacaggatgagcgagaactgaagagacaaaagcggaagcaatcaaatagggaatcagctcgacgttcaagattacgcaagcaggctgaatgggaggaagtagccaatcgagctgatttgctaaagcaggaaaacagctcacttaaggaagaattgaaacaacttcaggagaagtgcaatagcttgacctcagaaaatacaactttacatgaaaagcttaaagagcttgaaggcgagaaatcaaatggaaactggtataaagagtga

SEQ ID NO: 11537 - DNA, 522 bp, Oryza sativa
  Clone ID: TFbOSC420956j.C1.o1.fg
ccgccgcaccaccggcgcgccagatctgaggtggccttccgcttcccggacgacctgggcctcgggggcggcgcggacggcgggggcttcgacgagatcggctccgaggacgacctcttctccaccttcatggacatggagaagatcgccggcgccgaccgcgaccgcgccgccgagacctcctcccctccccgccccaccaagcaccgccacagcgcctccttcgacggcttcgccttcggggccggtgcgggtggccccggccctggccttgggaagcagcaagacggagcaggaggcgtgttctccgaggttatggaggctaagaaggccatgtcctccgagcagctggccgagctcgccgccatcgaccccaagcgcgccaaaagaattctagcaaacagacagtctgcagcccgatcaaaggaaaggaaggctcgatatataacagagttagagcggaaagttcaaactcttcaaactgaggctaccacactgtcagcacaactgacactatttcag

SEQ ID NO: 11538 - DNA, 465 bp, Oryza sativa
  Clone ID: TFbOSC401748j.C1.o3.fg
atggcgaactaccaccaccaggagtactaccagatggcggcggcggcagcggtggcgtggccgagggagccggacagcccgcagctgagcatcatgagcggctgcagctccctcttctccatctccaccctgagggacgacgacgacggcggcggcgtccgcctcgccggcgccgcgctgcccgccacgccggtgtcgctcgccgggatcgccggcggcgccagtacccccggcggcgacgaggtggacatggaggtgcggcagcagagcggcggcagcggcgacgaccggaggaccatccggatgatgaggaaccgggagtccgcgcttcgctccagggcgcgcaagagggcgtacgttgaagagctagagaaagaggttcgccggctggtggatgacaacttgaatctcaagaagcagtgcaaagaggggtcaggcatgagagaggatattgtgtgtaggtga

SEQ ID NO: 11539 - DNA, 1143 bp, Oryza sativa
  Clone ID: TFbOSC413557j.C1.o9.fg
atggctcatgatgaagctgttgctacacaaaagattgggaaaacaacctcccctcctaaggatcaaccaactccatgtccatttcctgattggtccgctgttcaggcatattatggccctggtgtcttaccaccgacatattttgccccagcaatagcttcaggccatgctcctccaccatatatgtggggtcctcagcctataatgccacccccttttgggaccccgtatgctgcaatgtacccacacggtggagcttatccacaccctcttatgcccatgatggcaaatccattgagcatggaaccagccaagtctgcaagcagtaaggaaaaaggctccaacaagaaacttaaggaagttgatggggctgcagtatccactgggagtggtgacagtaaaaaaacaatgacgtctagtggggattacagtgcagaaggctctagtgatgtaaatgatctaaaggtgggcaagactggcaggaaacggagattggatgatggagctggtgctgaaacatcagcagctgcaaagatggaaaatgctttacctcccagccatatattgggaagtactgcgattttgccaaatcacagctttccagctcaagtaattaggcccagtgctactaatgttgctaattcgagggcattgggcacaccaatatctccaccgcctggtgtgattgttccaagtcatacaggagtatcaacagaattactgatcaaggatgaaagggaattaaagcgtgaaaagaggaaacaatcaaatagggaatccgccagacgatcaaggctgagaaagcaggctgaaacggaggatctggctacacaagtagaatcacttacagcagagaacacgtcacttagatctgaaatcagtaggctatcagaaagctccgagaagctcaggctggagaattcggctctaatggggaagcttaaggatcctgcagcatcgacccaggcagaaacatctctgcagaaaaccaccacagcctcctctcctcgcgtcgtggagaactttttgtcaatgatcgacaacacgaacaagacgagtgtcagacacacagagcatgctgaacccaagcttcgacaactcctcggctccggcccggccactgatgttgttgctgcaagctaa

SEQ ID NO: 11540 - DNA, 579 bp, Oryza sativa
  Clone ID: TFbOSC400718j.C1.o72.gm
atggaaattcagctcaataccataagtgccaaagacctggcaaggctggttgctccagcgcaggtgcctgctaagcattttcagatgcctgcgcgtgacgtggaggctgcggcggcaggggatgaggagctcggcgcggcttcccccctccctctcggcggtggcgatggccggggacacagagcggcggcggcgctgccgcctgacgcagaggcggcggcggcgggggatgaggagctcggcgtggctttcacccccccctccctctcggtggcgtgcacgcggggaggacgagggcaccagccgccggagagggaggccgaggccgacgccgacgccgacgagcggcgcttccgccggaagatctccaaccgggaatccgcgtgccggtcccgcgcgcgcaagcagtggcacctcgatgagctccgcgcgcgtgccgggtggctccggcactgcaactgcgagctcgcagcacgcgggcacgccgcccgcggccgcgcgggcctcgtccacctcaccaacgtgcagctccgcgccaaggccgccacccccgcgtcaccgtcccccgcctgccgctga

SEQ ID NO: 11541 - DNA, 570 bp, Oryza sativa
  Clone ID: TFbOSC400608j.C1.o15.fg
atggcgctgccgcctcaggcctacttcgtccccgccgcgccgccgccgccgttccaagaagccactgctgcgctcgccgccggcgacgacgccaccgccgcgttggcggtgtttgagctggagcgcatcctggaagaagcggccgccgcgggcggcggcggcggcaatggctcaccgagctcgggctccgacgggtgctgctacggcctgcagggcgtggctccggcggcggaggaggagcggcggcggcggcggatggtgtcgaaccgggagtcggcgcggcggtcgcggatgcgcaagcagcggcagctcagcgagctgtgggcgcaggtcgagcacctccgcggcgccaaccgccgcctcctcgacgagctcaaccgcgcattgaggggctgcgccgacgtccgccgcgagaactcccgcctccgggacgagaaggccgagctcgccggcaagctccagctgctgctcccgcggcagccggcgccggagaagaacgccgccgacgaccagagtagctgctcctcggagccatgcaagaacagcactacgactaccgctgctgaatga

SEQ ID NO: 11542 - DNA, 1203 bp, Oryza sativa
  Clone ID: TFbOSC400445j.C1.o27.fg
atgacatggcacattcaagccctcccattggccatgccacggcaccaccccgcgtgggccccaccacctcccttcgccgaaactttcccctcctccttcctcccgaagcaaaatccgagcatctccgacgagtccgccatatttaaacacacccacgagcggcaacccaccgcgagagacaaaaatatctccatcgcgatctccatggatgtagagttcttcgccgacctcgacctcgacgcgctcctcgcctccttctcctcctccgccgccgccgccggctccggcgtctcgggcctcttcgccccgtcaccgccgcacgatgcggaggcggggtcgccggagtcggtgagctcccggcggcccagcccttcccgggaggcggcgctgtcggagatcgagaggttcctgatggaggagggccccgcggcggaggagggggtcggcgcggaggatttcttcgacgcgctgctcgtcgacggcggggaggaggaggaggaagaagaggggaaggggagtgaggcggggggaagcacggatggggattccgggaaggagaatgaggtggctaccccggacgcggagaaggaggatgtggaggcggaggtggatggcgatgatcccatgagcaagaagaagaggaggcagatgagaaatagggattctgccatgaaatcgagggagaggaagaagatgtatgttaaggacctagagactaagagcaagtatctagaggccgagtgtcgtcgcctcagctacgcgcttcagtgctgcgcagctgagaacatggcgctgcgccagagcttgttgaaggataggcctgtcggtgccgccacagccatgcaggagtctgccgtactcacggtatgcttgagtcataatcctgatgctcctacagtatatttgtgtcataaacctgatgctaaaggtaaccttttcctgtttgcagaaaccctgccgctggtttccctgctttggctcgtgagcatcgtgtgcctactcccggtgcccggtctacccaaccgaaacccggtggctcgaagcagcgccggaagagatctcgcgacggtaaccggaaagaagacaagcagtgaacaacagctagaagaaacattactactccatgggaggcgttgcaagggctcgagggcgaggatcaagctagataccggaccgttccgtttagcagcagctgcttgctag

SEQ ID NO: 11543 - DNA, 576 bp, Oryza sativa
  Clone ID: TFbOSC401980j.C1.o7.fg
atgccgctcgacttcggcctcccggacatggacgtcggcttcggcttgttcggcgtcgacgcggcggcgttcggatacgatggtgttgcctcggatgcggccgccggcttgtcgccggtggtaggtgccggcgatgggagtggtggtggtggtgatgtgttgttgtactgtgacggcggaggcggcggcggcggcggcggcgaggacggcgaggaggagaggcggcggcggctgaggaggaagatctcgaaccgggagtcggcgcggcggtcgcgggcgcggaggcggcagcgggtggaggagctggagcgcgccgcggacgagctccgcgccgagcggcgcgcgctggcgtcgaggctggacgccacggcgcggcgggcgctcgccgtgcgcggcgcgaacgcgcggcaccacgccgaggcgggcgtgctccggcgccgcctcggcgaggcgcagcgcaacgccgccgtgctgatagggctgtcccgcctcctacgctcgacggcgaacggcgcccacggcggcgccgccccggcccagttgtcgaacggcggcgtggcgtcgttgatgacgtag

SEQ ID NO: 11544 - DNA, 813 bp, Oryza sativa
  Clone ID: TFbOSC422806j.C1.o2.gm
atgggcaggtccgaactccgttgcacgcagtcacctcgctattcctcccccggcctcgccgccttgtccgccccctccgtcgccatccgtattccccgcctttgccgccttgtctgcttcctcagtcgcatcgtccgtctgggagcagacgagtgtggtggcgtccgagcgagcgacgatcttgagcaggagttctggcggtccctgatcgccgcaatgctgtccctccacgacgccatgccgctcgacttcggcctcccggacatggacgtcggcttcggcttgttcggcgtcgacgcggcggcgttcggatacgatggtgttgcctcggatgcggccgccggcttgtcgccggtggtaggtgccggcgatgggagtggtggtggtggtgatgtgttgttgtactgtgacggcggaggcggcggcggcggcggcggcgaggacggcgaggaggagaggcggcggcggctgaggaggaagatctcgaaccgggagtcggcgcggcggtcgcgggcgcggaggcggcagcgggtggaggagctggagcgcgccgcggacgagctccgcgccgagcggcgcgcgctggcgtcgaggctggacgccacggcgcggcgggcgctcgccgtgcgcggcgcgaacgcgcggcaccacgccgaggcgggcgtgctccggcgccgcctcggcgaggcgcagcgcaacgccgccgtgctgatagggctgtcccgcctcctacgctcgacggcgaacggcgcccacggcggcgccgccccggcccagttgtcgaacggcggcgtggcgtcgttgatgacgtag

SEQ ID NO: 11545 - DNA, 492 bp, Oryza sativa
  Clone ID: TFbOSC400354j.C1.o25.fg
atggcatcgtcaagcgggagcggggggagcgcggtgtcggcggcgacggcggcggcgggggggtcgtcgtcggcggcggaggaggagctgagggcgcttatggagcagcggcgggcgaagaggatgctgtcgaacagggagtcggcgcggcggtcgcggatgcggaagcagcgccacctcgacgacctcaccgcgcaggtggcgcacctccgccgcgagaacgcgcacgtcgccaccgcgctcggcctcaccacccagggcctcctcgccgtcgacgccgagaacgccgtcctccgcacccaggccgccgagctcgccgcgcgcctcgcctccctcaacgacatcctctcctgcatcaacaccaacggcgccgccgccgccgccgccgccgccctcaccgtcgccgccgccaccgacccgctcctcgccttcgactccgccgccttcgacgacctcttcagatcctcccccgagctgttccagctttgctag

SEQ ID NO: 11546 - DNA, 1631 bp, Oryza sativa
  Clone ID: TFbOSC400354j.C1.o26.gp
gagagagtaatagtagtagtaattatatattgcacttccttgatttgttttgacagagaaacagaaagcttactgcctcattaatccttacatagttggagtacatgatgatgatgatgcatgcagaaggcttaacttaaccatcacttgatttaccaattacacaagataattaggccattaattagccctagcagctagcttagcttcgttaggtgcagtgcttagttgcttacccccagtggcaagtactgtaattttcttcatcttcttcttggtctctgccatggcagcttcagcttcagtgtttgagctagcaaagctggaacagctcgggggaggatctgaagaggtcgtcgaaggcggcggagtcgaaggcgaggagcgggtcggtggcggcggcgacggtgagggcggcggcggcggcggcggcggcgccgttggtgttgatgcaggagaggatgtcgttgagggaggcgaggcgcgcggcgagctcggcggcctgggtgcggaggacggcgttctcggcgtcgacggcgaggaggccctgggtggtgaggccgagcgcggtggcgacgtgcgcgttctcgcggcggaggtgcgccacctgcgcggtgaggtcgtcgaggtggcgctgcttccgcatccgcgaccgccgcgccgactccctgttcgacagcatcctcttcgcccgccgctgctccataagcgccctcagctcctcctccgccgccgacgacgacccccccgccgccgccgtcgccgccgacaccgcgctccccccgctcccgcttgacgatgccatcaatcaatcgatcgcaaagatttcgggagaagaagaacaacaagcaccactagattgctacaagcttagcagcagcagcagcagtgaagaacaagaagtgcatatactaaactgaaaccaaaatccaaaacgaacacgacgacgacgaagaacacacacagagatcgacaagaacgacgacgacgaacacgagatcgattattgtagaaggaagctagagagagaggaggagagggaaatggatggcgagtagcttatgagaagacatagaaccagtagaggaagacgacggagaaagactggacgagatgggtgcggcgccggagtgtggagttgatcataaaccccgagaggaggatctcactgatcacaggcgacatcgatcaggaactccagcacgaacggtataagcatgtgcctccctcctttcttccttccccctctctcactcgatcaacaagaacagcatgcaagaacaagaacaaagctctagctccctccctccctctccaatggcggctggggttataaagagcgaggaggctggctagcctagcaccggattcgatcggagcggtcggtggcaaaaggctagagctgagctagctactgccactgatcgatgcagcagcactgggcaagctgagccactggtgctagctacaactcgaggcgtctggatgtgtctcttgatgccaagtgccaagaagaggatggtggtggttgttggtagggaggaggagatgatcgaggagggggggtgtgggagcagcaacacgaggtggatttatagagaggacgcacccatctctctctctctttccag

SEQ ID NO: 11547 - DNA, 1281 bp, Oryza sativa
  Clone ID: TFbOSC401664j.C1.o14.fg
atggagggtgaaccctcacgccgcctctctttgctggaccggtgcgacgatgggagcgaggatccggtggtgccaccgcgagttcccaccatcctcaacctcacctcccaccaccgtcttgaccgatcgaaattcctaccattgatccaccctactcctgcccgcttcatctcttcaacaggatcttccttccccccctactcggaaccaccaccttcggcccctatgctagaacttggtagtggctttgggcctgaagacttatactcgttctttcctaatcattttttcttgatggaatccatcagtctaccaccatatgatgttgtagatgtgccgccggtgatccctgtcgcactacggtcggggagatctaaccaggggcttcctagcaagctaccgcttattgaggggcataggcggtcgcatagcgacatccccttcgggtattcacaagaacacccacaaatgccacctgtagcatcagttaagccggaggtcacaacgatcaaggggcaccaattggaggatgtggcggctgctgccctcaaggacatgggcatacaggcatggagcccttctggtagcatagacaaagaagttaagagctccggtgctggcagcacaacccaccattgccgcagcttgtcggttgacagcttcatgatggggaacctcaacttcggagttgttggacagcagatgtccagcccccctttgctaactacagaggtgaatgttggtggaggtgagcccattggtagtactgcttctccctttgctgcagagcttgcgaatgtgaaattcactgaggatgagaagaagaagattgtgatggataaatccctctcagagattgtcttgactgatcctaggagggtcaaaaggattctcaacaatcgggcatctgccacgaagtcaaaggagaaaaagatgaagcacgtaggggagcttcaacgcaaattgcaggtgctgcagtcggaaactactacattaggtgcacaagtgacagtgatgcagaggaacaacaatgagcttgtatcacagaacaatgaactgaaaactaggttgcaagcaatggatcagctagcacagttgggagacgctctgacttcaagattggctgctgaggcccagcacctaagagctgttgttagtgagatcagtgatccaaatctgccaagtggttcacaccaacaactgagctctgacatcgaccaactgcagcagctgcttacacagaggcagacatcacaaatccagcataatcagccacaataa

SEQ ID NO: 11548 - DNA, 5430 bp, Oryza sativa
  Clone ID: TFbOSC401949j.C1.o30.fg
atggacgggcggttcccgctgccgccggcgagcggaggggggcgggggcaccaccggcgggcgcactcggagacgttcctgcggctgcccgacgcggacctcctcctcgacccggagggggacttctccttctccgacctcgacttcccctccctctccgacgactccccggccatctccgacccgaccccgccgccgccgccgccgatggctgcgacccccgcgccggcgccgcggccaccgggtggggcgcacatgaggagcctctccctcgacaccgccttcttcgagggtttctcgttgcagggtgggggaggaggaggaggaggaggagggagtgggggaagtggtgggcataagaggagcgggtcgatggatggggtcaactcgccgttcgagggtgagtcggcgctctccggtgggctaccggactacgcgaagaaggccatgcccgcggagaggatcgccgagctcgcgctcatcgaccccaagcgcgcaaagagaattctggcgaacaggcagtcggctgcaaggtccaaggaaaggaagatcaagtacactagcgagctggagaggaaggtgcagacactgcagaccgaggccaccacgctgtctgcacagctcacgcttctccagagggatacatctggtttaactgccgagaatagagagctcaagctacggttgcagtccatggaagagcaagctaaactacgtgatgctctgaatgaagctctgcgagaagaagttcagcgacttaagatagcagcagggcaagctccaaacatgaacgggaatcccttcaatggtggactccaacagcagattccgccctattacacgcaacagcagcagcagcagcaacagatgccttatttaggcggccaccatgctcagcaacgccatccaagccatcagcagagctcatcaaatggcggccagtcgctgagtggtgactcgagatgccgggagagtatttgcggtgatggaccgagagtcagcttaaggataagacgacgtccgtggtggtcagagatcatgcgggatactaaggctagagttcaatacacgtgcggtctaaccggcggcacatcggcggtcagaccggtggcaccacggcggtgtaagggcggtcagaccggcgtcagcgacaagcgacaggagctgatctcggcggtcagaccggagatacaatctcggtcagaccgacggcaaccaggcgatcagaccggcgcaacaccttcggtcagactgcgatccgtcgaatttgagggaacaaataacataaaagagcttcgtcgagatcttttcaaaaaggagtacattaaatttgagatgaaacctggagaagctttggatgactatctttctaggtttaacaaaattttgagtgatcttagatctgttgattcttcttatgatgttaattatacacaatatgagatttctcaccactttttgaatggtcttgatatgtctatttggaagatgaaagttacatctattcaggagtccgttgatatgtctactttgactttggattcgctttacacaaaattgaaaacacatgagatgaatattctttctcgtaaagttgattctaactcgagtgttttggtttcttcctcaacttctttggatgttgattcttcttcatcgaagtcttccgcatttgctttgtttaatgccatgtccgatgatcaactcgaacagttcgtggaggaggacttggttttgttatctaacagactttctcgagctgtgactaatcttgggagagcgaggggggaagataatggtgatgagaagaccaatgacaacaagccgaagggtacattcaaagggaggaagatcaaggagaatctcaagaaggcttttgatcaagtctacaccgcgtttgagccactaagcgatgtagatggtgagagtggagatgaagataagggaaataacatctccggtgtttgcttcatggcgcgtggtgaattagattcagagtgtgaagacaatgaggtaagtgctcttgaggaagccattaatattttgagtgcaaaaaatatgaagtgtgagaagttgtatagaaaacaggagtttatcattgaatctcttaattctgaaattgctagattaaaatatcttattcctaatgatgatgattgcacaaattgtgaggttttaatgaatgaaatttctaaaattagagatgttaatgctgcacatgatttgaaaaatagatcttctctagctcttagttttgctttgcacacacgcactttggatgagttgtgtttaactaaaaagttattgcaaaaatatcaaattgcttttcatgctagtttgatgtttaacatgatttgtgctaaaaagttaaaacaacctcatgatgttttggattgctcaacatgtactttgaataagttgaaattaaaagatgctttaggtcgtgttgggtacatggaagatgttgtgaaaaccaatgaagtgctttcttgtcccaagtgtggtaaaagcaaaggtgtcatggtagattctgaaaattgtgctaatttggaaaaagaggtttcttatttgaaaaattctttgcaaagattttctgatggtgttggtgctagaagtggtgagattttggttaaacctgatactaataaaactgtgtttaaatctgctggttttgttaaggtaaatgagaaatttgaattgaagaatgtagctttggttgaggacttaaagtataatttgctttcggtttcacaaattgttgatgaagattttgaggttcactttaagaaaactggaagtaaagtttttgattcttgtggtgattctgtgttgaatatttctcgctatggaagagtgtttaaagctgattttgataatcctgtttcacctgtgataacatgtttggttgctaagtttgataaagatgtgatgttttggcatcgtagacttggacatgttggttttgattatcttactaggttaagtagtttggatcttgttcgtggtttgcctaaacttaagaaagatcttgatttggtttgtacaccgtgtcgtcatgctaagatggttgcttcttcacatgctcctattgtttctgtgatgacggatgcaccgggacatctattacacacggacactgttggtccagctagagtgcaatctgttggaggaaagtggtatgtgttggttattgttgacgatttttctcgatattcttgggttttctttatggcaactaaggacaaagcttttcaacactttcgtggtttgtttcttcgattgaatcttgaatttcctggttctttgaaaagaattcgaagtgataatggtggtgaatttaaaaattcttcatttgaacaattttgcaacgaaagaggtcttgaacatgaattttcttctcctcgtgttcctcaacaagacggtgttgttgaaaggaaaaatcgtgttttggttgagatgactagaacgatgttggatgagtatcacactcctagaaaattttgggctgaggcggttcaaggggaggatggtcatatttttgaatacgagagcgacaacgatgacgacgaagtcggctcggccggtcagaccgggcgccaggccgatcggaccgccggcacacctccggtcaggccagcgcatgacgtgcggtcagaccggccagggtcatcgggttcgggtactattgatgctgatcaagatggacctccagagattacaacttcgaccagtactgatacagaacgtgaatcaacttcagaagtcgctgctcctttgcacattcaacgacgacatctgccggaacaaatcattggtaatataggtgagcggactacaaggtctaaggtaatgactcatgatgtttgtgcaaattctgcatttgttgcttcttttgaacccaaagatgtgtcacttgcattaactgatgaatcgtggattaatgccatgcatgaagaacttgaaaattttgagataaacaaagtttggactttagttgaaccaccttctcgacataatattattggaaccaagtggattttcaaaaataaacaaaatgaggatggtttgattgtgagaaataaagctagacttgttgctcaaggttttaccaaggtggagggtatggattttgatgaaacttttgctcctgttgctagaattgaggcaattagacttttgttggcttttgctgcttcaaaaggttttaaattgcatcaaatggatgtgaaaagtgcttttctaaatggttttatacaggaggaagtttatgtcaaacaaccaccaggttttgaaaattctgattttcccaaccatgtttttaaattgtctaaagctttgtatggtttgaaacaagcacctagagcatggtatgatagacttaagaactttttgcttacgaaaggttttacaatgggaaaggttgacaaaatgctttttgttcttaagcatggtgataatcaactttttgttcagatttatgtgtatgatatcatctttggttgttcaactcacactttggttgtgaagtttgctgagactatgcgcagggaatttgagatgaccatgatgggtgagttatcgtacttcttgggattgcaaattaagcaaacacctcaaggtacttttgtgcatcaaacgaagtacatgaaggatcttttgagacggttcaagatggagaattgcaagccaatttcaacaccaattggttctacaactgtgttggatcctgatgaagatggtgaagctgttgatcaaaaggagtatagaagtatgattagatctttgttgtatctaactgcttctaggcctgacatacaatttgctgtgtgtttgtgtgcgcgctttcaagcttctcctcgtgcttcacatcgtcaagcggtcaagcgaataatgaggtatttgaatcatacacttgagtttgaaatttggtattctacttcatcttctatatgcttaagtggatattccgatgctgattttggcggttgtagaattgataggaaaagtactaatggaacatgtcattttcttggtatatcattgattgcatggtcttctaggaaacaatctagtgttgctcaatcaactgctgaatctgaatatgttgttgctgctagttgttgttcacagattctttggcttttatctactttgaaagattatggtcttacttttgggaaagtatctctcttttgtgataatattagtgctattaacattgctaagaatcctgttcaacactcacgcacaaagcacattgatattcgttttcatgttttgagggatcatgttgagaagggagatgtgatattgcagtttttggacacaaagttgcaacttgctgatatttttactaaacctttggattctaatcgttttgcttttcttcgtggtgaattgggaataattcatccttttggcatgatttga

SEQ ID NO: 11549 - DNA, 846 bp, Oryza sativa
  Clone ID: TFbOSC401563j.C1.o10.fg
atgcaggcgtactacgcggccgccgccgccgccgccggtggccacccttacgcctggcccccgccgcagagcgtgcctcccatggctggttgcgccgtgccatctgcggcggcggaagggaagagcaagaggaagacttccggtggcccctccggcgaggactcctccgggagtggcgacggtgggagcgaggattcatcggagaggagagatgatgctgacgagaagggtttgtcacctgcaaagtggagaaaattgggtcatccagacatagaaggtgaaacatctcaggctgctgccatgtctgagcagaatcctgtgaaggcggcaccgaatttgaatatcgggatggatatttggagcaattctacaatggccgccatgccctcaggacaggtggaggtgaatgctgggacgcatttgcggcgagacaaggctttgtctcagatggatgaacgagaactgaagagggagaggagaaaacaatctaacagagagtctgcgaggagatcgagactacggaagcaggaaagacccacatctttctgtcacccgccaaactatcctgttactttttatggcctgacaaaccaagaatgtgaggagttgtcccagaaggtaactgaactgacagccgtaaacagcacactcatgacagaactcgacaagcttaagaaggactgtgaagacatggaagcggaaaattcgcagctaatggatgagatggtgcagtccgagggctctagtgttatagccactttgagcgtcaagattgacacgtcaaaagaccgccatggtagcagtagccagctaaataagcacacaaatgatgacagcaaagggtag

SEQ ID NO: 11550 - DNA, 1125 bp, Oryza sativa
  Clone ID: TFbOSC401580j.C1.o21.fg
atgggaaatgacgaagctgtagttactcagaagatggggaaagcaccatcgccccctaaggatcatccagcccttagtccataccttgattggtcaaatatgcaggcatattacggcccagggatcttgccaccaacattttttagccctggaatagccgctggtcatacccctcctccatttatcttgggtcctcagcctctggtgccatccgcttttgggaagccatatgccgcaatttatcctcctggtggagctttttcacatccgttcatgcccctaatggtgagcccattgagcatggagccagcaaagtctgtcaacagcaaggatagctgttcaaataagaaaatgaaggaaattgatggtgcggctgtgtcaactggcagtggcaacagtgaaaaaacaagtggagattgcagcttagaaggatccagtgatggaaacaaccagaaggcaagtggaactcccaagaaaaggagcatagatgataggcctaaatcaggcgtggaaactggtggagctttaacacctaatgatagacctagcgaacaagcagctttgccaaatctatgcattccggttacagcaatcaaaccagacgtgagcactgctagtgacttcagagttattgccaccccagtaactgaagtgccaactaaggatgataaggaatcgaagcgcgagagaaggaagcaatcaaacagggagtctgctcggaggtcaaggttgaggaagcaggccgagactgaggaactggctagaaaagttgagctattgactgcggagaacacatcccttagacgtgaaataagcaggctaacggaaagctccaagaaacttagattagagaattctgctctaatggagaaactaacggaaaccgggcctgatgaagcacaagaagtgcctccagtcaaaacaaaagcacagcaagctcgaggcgtcgaaaatttcctgtcaatgatagacaagactggcacgccgagaagcagcgggcacatggatcatgccattgccacgcccaagcttcgtcaactcctgggctctggtctggcgactgatgctgtagccgcaagaaagccttctaactttgatcttttacctttacctgcttttggatga

SEQ ID NO: 11551 - DNA, 1410 bp, Oryza sativa
  Clone ID: TFbOSC401841j.C1.o34.fg
atggcagagtccagaatattcggaggtctcaagcccaccaagtccaggttactgggccctactatcagaggcccaccacccaacggcgcggccactcatgccccacgtcgcatcctcttctccttttctccggagagtcaatggctcggtcaaagctcaacgagagcatgtcttcctcctctccgttctccgtgtctccccgccccatccgccgctagccccgcctaccctcgcctcgcctcctccgccgcctccgcctccgcccccgcccgcctccgctcccgcattaccctccccggtggcagatctcccgtccccccaatggacccggccgcctccgccgcggagtcgtcgtcgctgtcgtcgcgcgacgtcgccgcgatgccggactcgccgccgcggcgggcggcgaggcaccggcgcgcgcagtcggagatcctcctcggggcggcgctcccggacgacatcgccttcgacgccgacctcggcgtggtcggggaggtcggcggcggcggcggggacgactacgaggaggaggaggaggatgacgaggaggaggagatggagggggcgggcggcagccggatgttcgagatgttcctcgaggccgggggcaagctcgagaccccggagcccgcggcgccgctgccgccgccgcccgctcggccgcgtcaccagcacagcatgtcgatggacgggtccacgtccctggcgtcgtccgccgcgggtgtggcggggaggatgggcgcggacgctaagaaggccatctctgacgccaagctcgcggagctcgccctcgttgaccccaagcgcgccaagaggatcttggcaaaccgccagtcagctgctaggtcaaaagaaagaaagatgcgctacattgcagagcttgagagaaaagtacagactctccagacagaagcaactacactatcagcacagttgtccatgttacagagagataccactggtttaacaagtgaaaatagtgatttgaaaatacgggtgcaaacaatggagcaacaagtcaggctgcaggatgcactaaatgacaggctaagagatgagattcagcagctaaaggttgcaacaggtcaggttaatgccaactgcggcaaagtgggaaactttggcctctcctcatttggaggcgccaatccacaaggttaccagcgcagtcacatacaatctcttctggcagcccagcagctgcagcagctacagatccactcccagcaccagcagcaacagatgcatctgcagcagcatcatcatcttagcacggtccaacagcagcttctgcaggaggggttgcccttgccaggggatctgaagatgaaaggaattgtggcggcatcccatgcacagaacgccggcgcatctgaaagccacgctctgaggagtgagccgtga

SEQ ID NO: 11552 - DNA, 2808 bp, Oryza sativa
  Clone ID: TFbOSC400123j.C1.o14.fg
atggcggagccggacctactcgcgcccttcgccgacctccccttcccccccggcgacgatttccccgacttcccgaccctcggggatgacgccttcgcgctggaggatttcgatctcgacgatctggacttcgacttcgatgtggatctcttcccgccggatgcgccgccgccggtgacgacgtcgtcgtcgtcctcggccgccggatcgccggaagcggggacgtcgtcggccggcgacgggggttccaagaacgaggagtccgcggattcgtcgtcgccgtcgaggagcgggagtgacggcggcggcggcaaggatgggaaggatgatgaggcgaagcggcgcgcgcggctggtgcgcaaccgggagagcgcgcaccagtcgcggcagaggaagaagcagtacgtggaggagctggaggggaaggtgaaggtgatgcaggccaccatcgccgacctcaccgccaggatctcctgcgtcacggccgagaacgccgccctcaagcagcaattgggtggcgccgccggtgctggtgccgccgcgccaccgccgccaatgcccatgtaccctgcggtttacccattgccgatgccatggatccacccagcctacgcaatgcgtggctcgcaggtgccgcttgtgccgataccccggctcaagacgcagcagcctgcgtccacaccggagccaccggccaagaaggcccggaagaccaagaaggttgcaggtgttagcctgcttggattgctgttcttgatgatggtctgcgggtgtttggttcctgcggtaaatcggatgtatggtgcagcgtacactggggaaggcgctgcgattgttccgtcacatcatgggagaattctggctgttgaagggccacaaaatagtgtctcaaatggtgttgatccgaaggtacctcagaatggaagcgaaacgctgccagctttgttatatttgccgaggaatgggaagcatgtgaagatcaatggaaatctggttattaagtccattgttgcgagtgagaaagcctcttcccgtttgtctaactatggcgagaagggttctggaaaccaaggaaaggaggagactagcttagcaatccctggctatgtagctccgttagaagctggagaagtcatggattctgctaaaggaatgaatgaactgatggctctggctcctggagatggaagcatatacagggaggatgatgggatgctgccgcagtggtttagtgaagcaatgtcaggtcccatgttgaactccgggatgtgcactgaagtattccaatttgatttatctccaacaacagctgatgcaaatggcattgtgcctgtctactctgggtcagtgactaacacgtcacaaaattatactgaaaatcttccttctggccctgttcagaaggtgaagaacagaaggatttcgtactcagaagccatccctttacgaggttcgacatccaatgacacggatcatttcaaagcaccccccaagaaccatagtcagagccatgctggtcgtaagccagtttcgtccgttgtagtctctgtcctggctgatccaagggaagcgagcgatagggatggtgaggggaggatctcctcaaattctctgtcccgcatcttcgttgtcgttcttatagatagtgtaaatgtttttgctggatggaacactctgttgtcggtcagattattggaagaaatagcagcgctcctggcccggatgcaaatcgtctgctggaccgcacctgcagtaggtgtcactgacatgtgggtcccacctacttcgggcccacttcatccatattcacttaaaagttccaagggagcaccgtttccaccgcgaccgattcttgtcttcctcattgcaatatttggattctatgtatgctacatctcctttaaccagataacactagagaatagatctgaggagaacagtggagaagtgcaggcagaaattcattgccgaaagcctcatcttcctcatgaggagctgcgttatgtgcactttccgaaacctgagagttatagcaggggagagtgttcctgcaatctggttcgatcctttgtgcttgtatctatgcaacggtcgggaagtggatggtttgagactttgctgaacagccaccctaacatcagctcaaatggtgaaatatttaacagggtggatagaagagagaatatctcatctatcttacagacccttgacaaattgtataatttggattggttcaccagtgcagcaaagaatgagtgcacggctgcatttggattgaagtggatgctaaatcaggggtttatggaccatcatgatgatatagctagttatttaaacaagaagggtgtttccgtgatatttctcttcaggagaaatacattgcgcaggcttatctctgttttggctaatgattacgacagagatgcgaagcagctgaatggaacccacaaatcccatgtacactcaaaagaagaggctgagatattagcgaaattcaagccggtgctggatgtgtcaaatctgattccaaacatcagaaatgccgagaaatacatcagagattgcttggaccacttcaacaccacacggcacatgatcctctactacgaggatattgtccgcaacagaaatgcattgttccaggtacaagaattcctcggagttccggtgagaaagctggtcagcaggcaggtgaaaattcacactagtcctcttccaggccttgtcaggaactgggatgatgtgagcaacaaactgaatgggacacagtatgctcattttcttgacggtgcagattatgtcaggtga

SEQ ID NO: 11553 - DNA, 573 bp, Oryza sativa
  Clone ID: TFbOSC1203j.C1.o11.gp
acccaaaacattatcaactccacattgtgcttggatcgggcaactacccaatgcaccattgatcctcgatcgcacatccaccagtaacgacctcaaccgtaccacctccacctcaagtgcagcctgcccttgcagcctcttcaccagctgctggttaatgacacggagcctcttcacttcctcttccaagtgtgctgtatgagccttcttcttctgccggtatttgcggacagcctcgcggttgcccaatggcttgcggctcttctttggcttggctttgtcacctccacaactatcatcatctgagctgaagacacgggtgtgagtgtggtagcatgtatgggtgtgctctgttgccgatggaccaggcgggttgcaagtatgagtgtgtgtgcatgttgtcctgatgcttggcaggaagtcatcaaggctggttggaatctctggatttggaaacatcatttggctggaaagctctatctccccgtcatccatattttttcacccaacttagaagatgcagatgactaaatgagtgggcggatatataaattcttacaccaaataggccct

SEQ ID NO: 11554 - DNA, 2247 bp, Oryza sativa
  Clone ID: TFbOSC1203j.C1.o5.fg
atgccaaggaggacagataatgctgcttctgccaattcagttgaaccagaaaaatcagaagaatgtttggagtttgatgatgatgaggaggaggaggtagaagaggaggaaattgaatatgaagaaattgaggaggagatagaagaggaggaggtagaggaggatgaagatgtcgtggaggaagttgaggaggtagatgaggaggaagatgaggaggaagaagaggaatctgatgaaactgaaggtgtaagtaaaactaaaggtgttcaccagaaggatgttactgaaaagggaaagcatgctgagcttcttgctcttcctccccatggttctgaagtatatgttggaggcatctccagtgatgtatcttctgaagatctgaagagactatgtgaaccagttggagaagttgtggaagtgagaatgatgagaggaaaggacgatagcaggggatatgcttttgttaattttagaacaaaaggtttggcattaaaggctgtcaaagaattgaacaatgcaaaactgaagggaaagcggataagggtttcttcctcgcaggctaagaacaagctttttattggaaatgtaccccatagttggacagatgatgatttcagaaaggttgtggaggaagttggtccaggagtattaaaagctgatctcatgaaggtctcaagtgcaaatcgcaatcggggttatggttttgttgaatactacaaccatgcatgtgcagagtatgcaaggcaggagatgtcttccccaacattcaaactagattcaaatgctcctacagtcagctgggcagatcctaagaataacgactcggcctctacttctcaggttaaatctgtatatgtgaaaaatctgcccaagaatgttactcaagcacagctgaaaaggctgtttgagcaccatggtgaaattgaaaaggttgttcttcctccttcaagaggaggtcatgataataggtatggttttgttcactttaaggacagatccatggccatgagggctctgcagaacacagagagatatgagcttgatggtcaggtcctggattgctcacttgcgaaacctcctgctgctgataagaaggatgatagagtaccactacctagttcaaatggagctccattgctcccgagttatcctccacttggatatggtatcatgtcagtaccaggtgcctatggtgctgctcctgctagtactgcacagcctatgctgtatgctccaagagctcctccaggtgcagcaatggttccaatgatgttaccggatggtcgtctcgtatatgttgtacaacagcctggtggacagttgccgctggcttcgccgccgccgcagcaagctggacatcgtagcggcagtggaggacgtcatggcggcagtggcggccgctatggcggtggtggtggcagctccggcagtagcaggccagaggaatgcgtttctgaaacaagactgtacatgcgtattttacctgtatcgcagagtgctgaatctgatggtgcactgtaccgtcaattcacccctgtaagccacatggactatgagatttctgggccagaatctgaggtagacagtgaggtgtggcttggctgggtggcgcagcgacagattccaaccagccttgatgacttcctgccaagcatcaggacaacatgcacacacactcatacttgcaacccgcctggtccatcggcaacagagcacacccatacatgctaccacactcacacccgtgtcttcagctcagatgatgatagttgtggaggtgacaaagccaagccaaagaagagccgcaagccattgggcaaccgcgaggctgtccgcaaataccggcagaagaagaaggctcatacagcacacttggaagaggaagtgaagaggctccgtgtcattaaccagcagctggtgaagaggctgcaagggcaggctgcacttgaggtggaggtggtacggttgaggtcgttactggtggatgtgcgatcgaggatcaatggtgcattgggtagttgcccgatccaagcacaatgtggagttgataatgttttgggttgtgatggaatggctcagtgctttgctggaaagccggagttgggtgtgagacagagttgtgcaccttctacagtgaattgccatatcagctcggattcagggcagaacctggtggtgccccatgctttaagccctagcgatgttattggaagcttcatggtctcatctacctcaaaggatgagtag

SEQ ID NO: 11555 - DNA, 1437 bp, Oryza sativa
  Clone ID: TFbOSC900200j.C1.o21.fg
atggagttcgggaacggcgggtcctcctcgtcggagcgcagggcggcggcggagggggcgacgctggcgagacagggttcggtgtattcgctgacgttcgacgagttccagagcgcgctcgctggtggcggcggcggcggcggtggtggaagcgggttcgggaaggacttcggctccatgaacatggacgagctgctccggagcatctggaccgcggaggagagccaggccatggcctccgcctctggctccgccgcgggggtgggcgtggccgtgggggcgccgccgacgtcgctgcagcgccagggctcgctcaccctgccccgcacgctcagcgccaagacggtggacgaggtatggcgcaaccttgtgcgcgacgagccaccgccggtgggggcggcggatggcggcgatatgccaccccagcggcagtcgaccctcggggagatgaccctggaggagttcttggtcagagccggcgtggtccgagaaaatccacccgctgcgccgccccccgttcccccgccaatgccgccgcggccagtcccggtggtccccaagaccactgccttcttgggaaacttccccggtgccaacgatgccggcgcggcggcgctgggctttgcgccgctcggcatgggggatccagccttgggcaatggcctgatgcccagggcagtgccagtgggcttgcctggcgccgccgtcgctatgcaaacagcggtgaaccagtttgattctggcgataaggggaacagcgacctgtcatcgccgacggagccaatgccttattccttcgaagggttggtgagggggagaaggaacggtggcggagtagagaaagtggtggagaggaggcagaggaggatgatcaagaacagggagtccgcggcgagatcccgcgcgcgcaagcaggcttacacattggaattggaagctgaagttcagaaactcaaggagatgaacaaggaattggagaggaaacaggcagatatcatggaaatgcagaaaaatgaggtagaagaaatgataaaggatccatttggaagaaggaagagactttgcttgcgaagaacactgactggtccctggcctttcacagtgctccaccctggactggtgctatgggacggcacattggatttttgctgccgtggcgctcgaacccgcgtctcaagtaggaacctcgtctccatgttgagcgacgcaggacttcgtcaaaacgatgtcgcgagcagaggagaagactggaggcacgcgcgctgtgggcgtcgtggcttcgcccacgcgtgccctcgcagcgaaatccaagggcgaaatccccgatacgccctccaaatccactcccaccacagcaaaatccagggcggcctcgccatctcatcggacggcaccgcagctgccaccagggtgcccgacgagcagggaggcgcctag

SEQ ID NO: 11556 - DNA, 1170 bp, Oryza sativa
  Clone ID: TFbOSC22910j.C1.o1.fg
atggagttgccggcggatgggagcgcgctggcgaggcaggggtcgatctactcgctgacgttcgacgagttccagagcgcgctgggaagcgccgagaaggatttcgggtcgatgaacatggatgagctgctgcgcaacatctggacggcggaggagtcgcaggccatagcgccggcggcggcggctgcttcggcggcggcggtggttggggacgcgcagcagcagcagcagccgatccagaggcaggggtcgctgacgctgccacgcacgctgagccagaagacggtggacgaggtgtggcgcgacatcatgggcttgggcggcagcgacgacgaagaccccgcggcggcggcggctgcggcggcgcccgcgcagcggcagccgacgctgggggagatgacgctggaggagttcctggtgcgggccggcgtcgtgcgggaggacatggggcagaccatcgtgctgccgccgcaggcgcaggcgttgttccccgggagcaatgtggtcgccccggccatgcagctcgccaacgggatgctgcctggtgtcgtcggcgtcgcccccggcgccgccgccgcgatgacggtggcggcgccggccacgccggtggtgctgaacgggctggggaaggtggagggcggggatctctcgtcgctctcgccggtgccttacccattcgacaccgcgctcagggtgaggaagggccctaccgtcgagaaggtggtggagaggcggcagaggcggatgatcaagaacagggagtccgctgctaggtctcgcgcgcggaagcaggcttatataatggagttggaagctgaggtggcaaaactgaaggaacagaaggctgaattgcagaaaaagcaggtggaaatgatacagaagcaaaatgatgaggtcatggagagaatcactcagcaacttggaccaaaggcaaagagattttgcctccgacgaacactgactggtccatgctgttgcatctgctctgtatgttgctgttgcgttgacatgtcatcccgtttacagttcagtgattctgttctgtacccaagtttaagaggattcagtttcagtgatctgcattttaaggacaaagaagaaagactgatatctcagatgggtgaaaagcgtggcaatggcctggctaagaacattttcggaagattgtaa

SEQ ID NO: 11557 - DNA, 675 bp, Oryza sativa
  Clone ID: TFbOSC416339j.C1.o7.fg
atggacgatgtcccaagtcaattgctcttctcccatccggaggtgcctgatagcttcgatgatttcttgaacaacatcacaacctgcacccacacccacacctgcaatcctcctggtccgtcggcaaccatgcacacccacacatgcttgcacacgcacacccaggtcttcgcctccggcagtggcgaagatgacatcaaggaggacctgacgaagacccggaggccgctggggaacagggaagccgtgcgcaagtatcgggagaagaagaaggcgcatgcggctttcttggaggaggaggtcaagaagctccgcgccgccaatcagcagctgctgaagcgattgcagggccatgctgcgctcgaggctgaggtgatcaggttaaggagcatcctactcgatgtccggggcaagattgatatggagatcggcacattcccttaccagaagccgtgcagtgttggctctgtggcatgcactgatccaggtatgtgcttcaatggcaattctgagattggaggggtctgggaggagtgctctagaccagtgggtgcagatcgcatgatcgacaaagatggtagcatgtcacaggaaattgatatcccaggaccggtgcattccatttccatggatgttgtcggaagcttggtgacttctgcttctctatctgagtga

SEQ ID NO: 11558 - DNA, 810 bp, Oryza sativa
  Clone ID: TFbOSC400505j.C1.o8.fg
atgtcgtgccacggcggcggcggcggtggcggcgaaggggcactgtcgcggcaggggtcggtgtacagcctgacgctgaacgaggtggagagccacctgggcgagccgctgcggagcatgaacctggacgacctcctgcgcacggtgctccccgccgcggcggcggcggcggagacggcggggaggaagacggtggacgaggtgtggcgcgacatccagggcgccagcaccggccggcaccacgcgacgcccatgggcgagatgacgctcgaggacttcctctcgcgcgccggcgtcgccgtcgacggtgccgcctccgccgccggcgcgcattggctgcgtgggcactacccgccgccgccgccgccgacgacgacgacgctgcagtacgtgggcggctccggggcggtggtggacggcgtgtataaccgcgtggacgggcacggcgtcgcggggttcctctcgcaggtgggcgtggcggggcggaagcgcggcggcggcgtggacggcgtggtggagaagacggtggagcggaggcagaagcgcatgatcaagaaccgcgagtcggcggcgcggtcccgagcacggaagcaggcatacacgaacgagctcgagaacaagatctcgcggttggaggaggagaaccagcgcctcagggagcacaaggctgttgctgatttctcaacattccctagctgcgtcgatttcctgaaagcattcttgacgcagaagctggaaccagtaatgcagattgtgccccagccggagccgaagcagcagctgcgacgaactacttcggcctctttctaa

SEQ ID NO: 11559 - DNA, 2169 bp, Oryza sativa
  Clone ID: TFbOSC403595j.C1.o10.fg
atgccaaggacagataatgctgcttctgccaattcagttgaaccagacaaatcagaagaatgtttggagtttgatgatgaagaggaggaggtagaagaggaggaaattgaatatgaagaaatcgaggaggagatagaagaggaggaggaggtagaggaggatgaagatgtcgtggaggaagttgaggaggtagatgaggaggaagatgaggaggaagatgaggaatctgatgaaactgaaggtgtaagtaaaactaaaggtgttcaccagaaggatgttactgaaaagggaaagcatgctgagcttcttgctcttcctccccatggttctgaagtatatgttggaggcatctccagtgatgtatcttctgaagatctgaagagactatgtgaaccagttggagaagttgtggaagtaagaatgatgagaggaaaggacgatagcaggggatatgcttttgttaattttagaactaaaggtttggcattaaaggttgtcaaagaattgaacaatgcaaaactgaagggaaagcggataagggtttcttcctcgcaggctaagaacaagctttttattggaaatgtaccccatagttggacagatgatgatttcagaaaggctgtggaggaagttggtccaggagtattaaaagctgatctcatgaaggtctcaagtgcaaatcgcaatcggggttatggttttgttgaatactacaaccatgcatgtgcagagtatgcaaggcaggagatgtcttccccaacattcaaactagattcaaatgctcctacagtcagctgggcagatcctaagaataacgactcggtctctacttctcaggttaaatctgtatatgtgaaaaatctgcccaagaatgttactcaagcacagctgaaaagactgtttgagcaccatggagaaattgaaaaggttgttcttcctccttcaagaggaggtcatgataataggtatggttttgttcactttaaggacaggtccatggccatgagggctctgcagaacacagagagatatgagcttgatggtcaggtcctggattgctcacttgcgaaacctcctgctgctgataagaaggatgatagagtaccactacctagttcaaatggagctccattgctcccgagttatcctccacttggatatggtatcatgtcagtaccaggtgcctatggtgctgctcctgctagtactgcacagcctatgctgtatgctccaagagctcctccaggggcagcaatggttccaatgatgttaccggatggtcgtctcgtatatgttgtacaacagcctggtggacagttgccgctggcttcgccgccgccgcagcaagctggacatcgtagcggcagtggaggacgtcatggcggcagtggcagccgctatggcggtggtggtggcagctccggcagtagcaggcccgaagaattcgtttctgaaacaagactgtacatgcgtatttaccagtattttccaatatcgcagattgctgaatctgaagaggcactgtaccgtcaattcacctctgtaagccacatggagtatgagatttctgggcaagaatctgaggtagacagtgaggtgtggcttggctgggtggcgcagcgacagactccaaccagccttgatgatttcctgccaagcatcaggacaacacgcacacacactcatacttgcaacccgcctggtccatcggcaacagcgcacacgcatacatgctaccacacccacacccatgtcttcagctcagatgatgatagttgtggaggtgacaaagccaagccaaagaagggccgcaagccattgggcaaccgtgaggctgtccgcaaataccggcagaagaagaaggctcatacagcacacttggaagaggaagtgaagaggcttcgtgccattaaccagcagctggtgaagaggctgcaagggcaggctgcacttgaggcggaggtggtatggttgaggtcgttactggtggatgtgcgatcaaggatcaatggtgcattgggtagttacccgttccaagcacaatgtggagttaataatgttttgggttgtgatggaatggctcagtgctttgctggaaagccggagttgggtgagagacggatttgtacaccttctgtaatgaattgccatatcagcccggattcctag

SEQ ID NO: 11560 - DNA, 1281 bp, Oryza sativa
  Clone ID: TFbOSC400780j.C1.o52.fg
atgaacggtggcattggcgacgcgctgatgcagccgcagcacgtgcaggtcatgtcgtcgtcgttgccgatggtggcgtcgacgttcgtggcggagccggcggcggcggccaacaagccgagggccgcggggctgccgcccacgccgccgcaggtgttcgccgcccagcgcgcggcggcggcggcgggcggcgacgtgtgcatggaggagtcggcgcaggggggtggtggcgggctgccgccgcgcaaggcgcaccgccgctccagcagcgacgtgccgttcgggtacctggccgggcagcaccagctcctgccgcccaaggtggaggccgggtggggccacctcggcgccggcgccggcggcgcggcggccgccgatgacctgttcaacgcgtacctgaacctggaggggctggacgggctcaactcctccgacgaccgccacgacgaaggggacagccgcgggagcagcatcaagaccaacggcgccgacagcagcgagaacgagtcggaggagtgcgccgacgacacccgcggcgggatccgcctctggtccgccgacggcggcgagaggagggagggcgtcaagaggaacgccgcgggggagccggccaccgcgccgctggcccgtcacgccaggagcctctccatggacagcctcatcgggaagttcaacttcacggcggggacggcggcggctgcggggaacggtgtcgcgttggggccgaacaggttcagcctggaattcggcagcggcgagttcaccccctccgagatgaagaagatcatggccgacgagaagctggccgagatggcgctcgccgacccaaagcgcgtcaagagggtgctggcgaacaggcagtcggcggcgaggtccaaggagaggaagatgaggtacattgcggagctggagcagaaggtgcagatcctgcagtcggaggcgaccaatctgtccgcgcagctcacgatgatgcagcgcgactcggcggggctcgcgacgcagaacaacgagctcaagttcaggctgcatgccatggagcagcaggcgcagctgcgcgacgcgctgaatgaggccctgacaaccgaagtccaacgcctaaaactcgccaccgctgagctcggcgattcttgctcgtccagcagtctagctcagcagatccaactcaatgctcagaatcagatgtttcaactgcagcagcagcaggctacgcagataccattctatcaactgcagcagtcacaacagaacggtgcagcgaagaacaatgaatcaaaagaatga

SEQ ID NO: 11561 - DNA, 1173 bp, Oryza sativa
  Clone ID: TFbOSC417322j.C1.o2.fg
atgggtagcagtggcgcagacgcaccgactaagacaagcaaggcatctgcacctcaggagcaacagccacctgctagttcaagcactgcaacaccggctgtttacccagattgggccaactttcagggatatcctccaattccaccacatggcttctttccatcacctgtggcgtcaagcccacagggtcatccttacatgtggggagctcagcctatgataccaccatatggaaccccaccaccaccatatgtcatgtatcctccaggagtatatgctcacccatctatgcctccgggcgcacacccatttactccatatgccatggcctctccaaatggcaatgctgatcctactggaactacaactactgctgctgctgctgctgctggtgagacggatggcaaatcctctgaaggaaaagaaaaaagtcccattaaaagatctaaaggaagtttaggtagcttgaatatgattacagggaagaactctactgaacatggtaaaacctctggggcatcagctaatggagccatttctcaaagtggggaaagtggaagtgaaagttctagtgaaggaagtgaagcaaattctcagaatgattcacatcacaaggaaagtggacaagagcaagatggagaggttcgaagttcccagaatggtgtatcacgttcaccatcccaggcaaagttgaatcaaactatggcaatcatgccaatgacatcaagtggtccagtacctgctccaactacaaacttgaacataggaatggactactgggccaacacagctagctccactccagcaatacatggtaaagcaaccccaactgcagctccagggtctatggttccaggagagcagtgggtgcaggatgaacgggaactcaaaaggcagagaagaaaacaatccaacagggagtctgctcgcagatctaggttgcgtaagcaggctgaatgtgaggagttggctcaacgtgctgaagttttaaagcaagaaaatacttcacttagagatgaagtgaaccggatcagaaaggagtatgatgagcttctatcaaagaatagctcattaaaggaaaaacttgaggacaaacaacacaaaactgatgaggcaggagttgacaataagctgcaacattctggtgatgacagccagaaaaaaggaaactaa

SEQ ID NO: 11562 - DNA, 825 bp, Oryza sativa
  Clone ID: TFbOSC400189j.C1.o8.fg
atggcgtcgtcgagggtgatggcggcggcggcggcgtcgtcgtcgtcgtcgcccccgcccccgcccccggcggcggccgcggccggcggggccgccgatctcgcgcggttcaggagcaccagcagcggcatcggatccatgaacatggacgacatcctccgcaacatatacggcgaggccgcgccgccgcctggggccgccggctcggccccggccccgcccccggcgggggaggcggcgggggcccccgtggcggaggtcgccgcgcggcggacggcggaggaggtgtggaaggagatctcgtcctcgggagggctatctgctcccgctccagctcccgcggccggcgctgcgggtaggggtggcgggcctgagatgacgctggaggatttcctggctagggaggatgaccctagggcaacggccgtggaggggaatatggttgtggggttccctaatgtaacggagggtgtgggtacagcaggaggaggaagaggcggcggcggcggcgggagggggaggaagcggacgctgatggatccagctgaccgcgcagcgatgcagcggcagaagcgaatgatcaagaaccgcgaatctgcggcgaggtccagggagaggaaacaggcgtatatcgcagagctggaggctcaggtcgcggagcttgaggaagaacatgcacagctgttaagagaacaggaggagaaaaatcaaaagaggcttaaggagaaatggcacgtgtttatgcagatcaaggaacaagccgttgcagttgtcataaggaaaaaaacacaagatctacgaagaaccaactcaatggaatggtag

SEQ ID NO: 11563 - DNA, 492 bp, Oryza sativa
  Clone ID: TFbOSC400993j.C1.o66.fg
atggcttctggtgaaaacaatgttgaagaggagctgagaaagacccgtaagcctctgggaaatagagaagcagtgcgcaagtaccgagagaagaagaaagcgcatgcagctttcttggaggaggaagtcaagaaacttcgcaccacaaatcagcagctcttgaggagattgcaggggcatatatcactcgaggctgaggtggtgaggttaagagcccttttgtttgatatccgaggcaagattgatgcagagattggtactttcccctttcagaagcagtgcagttttggttctgttacttgtacagaccattctccgtgctttaacactagcactgaggtagcagtccgggaagagagctctagaccaacaattgtggattgcgggattgatggaactggcattatttcgcacgagcttgatattcccaaaatggtgaattcagtggatgtcattccaagctttgtgaattctgcctcattgactgaatga

SEQ ID NO: 11564 - DNA, 1890 bp, Oryza sativa
  Clone ID: TFbOSC414158j.C1.o8.gm
atggaggatggaaccgaagatgctggcgctgccggctgccgctgcggaatcccagaaagaaaatggagagggggcctcctcagcctcaccgcccggcagaaaagcctcttcagcctccgccacgcaacaattaaatacgtgcactcctccgctcgaaaccgcgtcgatcgtgctcgtccgtgcgcgcagcaaaacgccaccaccaccaccaccgcatccccaacacctcacctcacctccttacaccataggcgtgcgtgcgtgatgaacaccacgtccgcgaacgagctgatgatgcaccgccacgtccaggccgcgccctacgcggcggcgccgcagcagcaaggaggcaagcagcgtgcgccggggctgccaccgacgcctccacctccacctgcggcggcgagctcccactcctctcacggcgacgtgtgcatggacgacacggcgcgcggcgggctgctgccgccgcgcaaggcgcaccggaggtcacgcagcgacgtgccgttcgggtacttccagccgctgccaccgccgtcgcccaagatggaggccggcggcggctgggcactccccgggtgcggcggcgccggcgacgtcgacctgctcaatgcgtacatgagcttggagggaatgggcggcgccgacgggctgaacaactccgacggggacagccgcgggagcagcatgcggacgaacggcgccgacagcagcgagaacgagtccgaggactacgtcggcgccgacagccaggccctcctctggggcggcgccggcggcggcgaggctgcgggcaagaagagacggaataacgctgccggcgagaaggcggcccggcacgcgaggagcctttccatggacagcctcatggggaagctcagcttcgccgccaatggtgagccggccaagttcagcctggagttcggcagcggcgagttcacccccgccgagatgaagcggatcatggccgacgagaagctcgccgagatggcactcgccgacccaaagcgctcggcggcgaggtccaaggagcggcggatgcggtacattgcagagctggagcagaaagtgcagatcctgcagacggaggccacaaccctctccgctcagctgactcttttgcagcgcgactcgtcgggaatggccacgcagaacaacgagctcaagttcaggctgcagtccatggagcagcaggcgcagctacgcgatgcattgaacgaggcactgacagctgaggtgcagcgcctgaaactcgcggcgaatgaggtctgcgacacgagctcgtccagcaacctagcacaccaaatccagctccgctgtcagaaccagatgcttgatctgcacaagcagcagcagcagcagagcccggcgccgccgtcgccgtcgccgtcgctgctactaaatctgctcgccgccacggtgccgccgcttgatgaccgggccgacaacgacgagaaggcggtgctggctcctacgctctcctgcgcggatctggtgcggggggatggatcccgagccgccgccggcggtgatgcgcgtggaggcggcggaggcggcagggtggccggatccagccccctcctgtccggatccggcgcgggaggccaagctccggccccaggcagcgaggcggcgggggcgcgcggtgctgggcggcggtggcggaaggcggcggggacggagctggccgagggcgcggcggcggcggcggcggcagtgccacccagatccgcgcctctcggccggatctggagggtggcggcagttggcaacggcggcggtggtgtggcgacgatggtggcgacagttggccggcggcaggtggcgatggcggtctcggccggatctggacgccggcagcagttggcgacgacaaccgtggtgtggtga

SEQ ID NO: 11565 - DNA, 441 bp, Oryza sativa
  Clone ID: TFbOSC412577j.C1.o14.fg
atggagcgagcggctggtactggtagcggcggcgacgatgacgagctcgtgctgccgccggcgtcgtttcaggacgggcttccgtcgtcccgctcctacccctcctgcatcggcggcggtagcgcagcggcggcgtcggcgtcgctggagcgggagctgctgtaccgcgcggagctgcaccagcaacagctgggcggcggcggcggcgtagagcggcggaagaggcgcgcgatgaagaaccgcgagtcggcggagcggtcgcgcgcgcggaagcaggcgtacctgcaggagctcgagcaggaggtccgcctcctccgcgccgagaacgccgccctgcgccaccagtgccaccagctgaaggccgccgcggcggaggcggaggcggaggcggcggcagcggcggcggcggcgaagaagccgacgtcgtcggcgacgttctga

SEQ ID NO: 11566 - DNA, 975 bp, Oryza sativa
  Clone ID: TFbOSC18922j.C1.o1.fg
atggcgcagctgccgcccaagatcccaaccatggcgacagcttggccggagttcgggggcgggcaccatcaccatgctgcccacggccaccatcaccagcgcagcccctccatgggggcgttcctcgcggcgccattgccgcccttcccgctcccgccgccggcgccggcgaacggcggggcgcagcagcagcagcagcagcagcagcatcagccgtcctgggtcgacgagttcctcgacttctcggcgaccaagcgcggcgcgcaccgtcgctctgtgagcgactccgtggccttcctcgaccccgtttccgacgacaatgccggcgtcggggcgcacgacttcgaccgcctcgacgacgaccagctcatgtccatgttctccgacgacctgcagccgcctccaccgcagcaacagcctgccgcgcccgcggcgagcgcgtcgtcgccgtcggaccacaacagcatgaatgacgagaagcaagacaagggcgagacagatgaggcgcagagcgagtgcgacggcgccacgcccgggcagccggcctcccccgccaccgtcgatcccaagcgcgtcaagaggatcttggcgaaccggcagtccgcgcagcggtcgcgcgtgcggaagctgcagtacatctcggagctggagcgcagcgtcacgtcgctccagacggaggtgtcggcgttgtcaccgcgcgtcgcgttcctcgaccaccagcgctcgctgctgacgctgggcaacagccacctcaagcagcgcatcgccgccctcgcgcaggacaagatcttcaaagatgctcatcaggaggcactgaagaaggagatagagaggctgcggcaaatctaccaccagcaaagcctcaagaacgcggaatcccaaccggcggacgcggccccggtccgcggccgcgacaatgccgacctgatcggcagcgagggggccgccgcggccgcgccatgcccgcactcgtga

SEQ ID NO: 11567 - DNA, 1839 bp, Oryza sativa
  Clone ID: TFbOSC400710j.C1.o6.fg
atggatctgaaggatggcggggggtcggagaggaggggggcggcggcgggtgcgggtgcgggtgcggcgccgctggcgaggcaggggtcgatctactcactgacgttcgacgagttccagagcacgctgggagggatggggggagggctcgggaaggatttcgggtcgatgaacatggacgagctgctgcggagcatctggacggcggaggagagccaagcgatggcgtcggcgtcggcggcggcggcggcggcggaggggggcctgcagaggcaggggtcgctcaccctgccgcgcactctcagcgtcaagacggtggacgaggtgtggcgggacttagagcgagaggcgtcgccgggggcggctgctgctgacggcggcggcggcggcggggagcagcagcagcccaggcggcagccgacgctcggggagatgacgctggaggagttcctggtcagggccggggtcgtcagagagaataccgctgcggcggctgctatggtagctgcggccgccgctccgccggtggctccgcggtcgattccggctgtcaacaacagctccatcttcttcgggaactacggaggcgtcaatgatgctgctgctgccgctgctggtgcgatgggtttctcaccggtggggattggggatccgaccatggggaataggctgatgtccggagtggcagggattgggggtggtgcgatcactgttgctccggtggatacatcagttggacaaatggattcagcgggcaagggggatggggacctgtcatcaccgatggcgccggtgccgtacccctttgagggggtgataagggggaggaggagcggtggtaacgtggagaaggtggtggagcggcggcagaggaggatgatcaagaacagggagtcagcagctagatctcgtgcccggaagcaggcttacacaatggagttggaagctgaagttcagaaactcaaggaacagaacatggaattgcagaagaaacaggaggaaattatggaaatgcagaaaaatttcttcccagaaatgcagaaaaatcagaaattattctctgttggtagggatggggtgcactatagtgcaactaaatgtactaaatacacaatatcaactgaaaaggtaatgattactctgattcatggcaagcaggtattagaggcggtcaacaatccttacggacaaaagaagcgttgcctaagaagaacattgacaggtccctgtttttggtttgactcagaaggatgtatcatgtcagaggagtttatgcccaaaatgatcaacatgggatcacacctgacaaggaaaaacaaaccagaccaatcagatactacagttgagttccatccacgccccgatgttcttctacaaggagctggagaaggtttggtgtttttgcttggaggccaggttaactgcattggtctacaggacagcaccgaatcaagaccagaaaatgacactgttctagtgcagatccaaggaccagccacagttagttcaggcagtgtcactgtccaagcggggccaaattgccgggccaaggaggagcccatccgggacacgaaccactggcgccaacaccccggtgttccctacgcaccgggacatggcgagcccacgccatctctgctcgggctgcgagacacccagcactgtccatttcatggacaatttcagaagcaattcttccctccccggtcatcttccgggaaccagagaagaccgatggctgatctgtcgcctgattggggcagatttggtctggattgggattgtggagtaaccagcgccagaacttttggcaatgatcgagatggaacagcattttga

SEQ ID NO: 11568 - DNA, 1272 bp, Oryza sativa
  Clone ID: TFbOSC401035j.C1.o16.fg
atgcagctgaaatgttcagaaaggttggtcagcctgaaagcttcagtgcttcacacggttgatgatacaatgtggctgaaactccacagaagaaggaaccctgaaggatatgacatgccatctgatttggatcaagctctcctcctctactttgatggccaggaacaagataagccatctactcaagaagaaccccacaaaccacttaattttgtaaaagagactctcaacatcttcccctcccagccaatggatggagagccaactccaacaccaaagaaagaaggtggcagtggcagcggcggcgccatggcagcgtcagcaagttcagagctcaaggggcccaagacgccggaccccaaaacgctgagaaggctggcgcagaatagagaggccgcaagaaagagcaggctaaggaagaaggcttacattcagcagctagagacaggcaggatcaggctggcgcatcttgaacaggagatacaattcacaagagctcagggtgcattctgcggtgctggaattctaagcccagacgctgcattgttcaacttggagtatgagcggtggcaggaggcacaccaccaagtgatcagccggctccgggccgctgtggaggagcaccgaccggatggcgagctgcagccccatgtcgatgaagccatgtcacactatggggtgctgatggctcacaaggctaggctggttggtgctgaccccctccacctcctctccggcctgtggaagggcgccgtagagcaatgcttcctctggataggcggcttccgcccctcggagcttatcaaggttgtggtccggcatgtggagcccctgacggagcagcagctcgccgccgtctacagcgcgcagcaggcggcgaggcaggaggaggacgcgctcgacggcggcctgcaggcgctgctccggtcgctctccgacgtcgtctcctcctcggacgcgccgtcgtcgtcgcagcagacgccgccggtgatgtaccacccctccgccgccgccgccatggctgcggcgagcttcatggggcagtacggcagctacagcaacctgcagctcgccatggacaagctcgccaacctcgccatcttcctacgacaggcggatgaggagaggatgcggacgctgcacgcgctgcggcggatgctgacggtgaggcaggcggcgcgctgcttcgtcgccgtcgacgactacttcggccgcctccgcgcgctcgccttgttctggaccaccacccggccgcacccggccgccggctag

SEQ ID NO: 11569 - DNA, 587 bp, Oryza sativa
  Clone ID: TFbOSC5587j.C1.o1.fg
agactctcaacatcttcccctcccagccaatggatggagagccaactccaacaccaaagaaagaaggtggcagtggcagcggcggcgccatggcagcgtcagcaagttcagagctcaaggggcccaagacgccggaccccaaaacgctgagaaggctggcgcagaatagagaggccgcaagaaagagcaggctaaggaagaaggcttacattcagcagctagagacaggcaggatcaggctggcgcatcttgaacaggagatacaattcacaagagctcagggtgcattctgcggtgctggaattctaagcccagacgctgcattgttcaacttggagtatgagcggtggcaggaggcacaccaccaagtgatcagccggctccgggccgctgtggaggagcaccgaccggatggcgagctgcagccccatgtcgatgaagccatgtcacactatggggtgctgatggctcacaaggctaggctggttggtgctgaccccctccacctcctctccggcctgtggaagggcgccgtagagcaatgcttcctctggataggcggcttccgcccctcggagcttatcaag

SEQ ID NO: 11570 - DNA, 1065 bp, Oryza sativa
  Clone ID: TFbOSC900100j.C1.o15.fg
atgaacagggagaaatccccgatcccgggagacggcggcgacgggttgccgccgcaggccacccgccgggcgggccctccggcggcggcggcggcggcggagtacgacatcagccgcatgccggatttcccgacgaggaaccccggccacaggcgcgcccactccgagatcctgagcctccccgaggacctcgacctgtgcgcggccggcggcggcgacgggccgtcgctgtcggacgagaacgacgaggagctcttctccatgttcctcgacgtggagaagctgaacagcacgtgcggggcgtcgtcggaggcggaggcggagtcgtcgtccgccggcgccgcggcggcggtggcggcggctgaggagctcgtcggggcgtcgcccgggacggaggggatgtcgtcggcggaggccaagaaggccgtgtccgcggccaagctcgccgagcttgctctcgtcgatcccaagagggcgaaaaggatttgggctaacagacaatctgcggcaagatcaaaggaaaggaaaatgcgatatattgctgaacttgagcgcaaggtgcaaaccctgcaaacagaagcaacaacactgtcagcccagttggcactgctacagagagataccagtgggctaactactgagaatagtgaactgaagctacgtctgcagaccatggagcagcaagtccacttgcaagatgctttgaatgacaccctgaagtctgaggttcagcggcttaaggttgcaaccggtcaaatggcgaatggtggagggatgatgatgaacttcggtggcatgccacaccaattcggaggcaaccagcagatgttccagaacaaccaggccatgcaatctatgctggcagcacaccagctgcaacagctccagcttcatcctcaggctcagcagcagcaggtgctgcaccctcagcatcagcagcagcagccattgcaccctctacaagcgcagcagctccagcaggcggcacgagacctcaagatgaaatcgccgatgggcggccagagccagtggggagatggcaagtcaggaagcagcggcaactga

SEQ ID NO: 11571 - DNA, 906 bp, Oryza sativa
  Clone ID: TFbOSC900383j.C1.o7.fg
atgaagcgcggcggcgccggtgtcggcggcggcggcggcggcggcgatccgggcgcctacgcggcggtgctgaagacgaagctcgacctgtactgcgcggccgtggctaaatcgatggaagctaaactgcaagaatcttctttgggctacctcaatttacaagcctcagacacttcacaattggtttctcaagattcttttaatggctatggatcaaccagagtaacaaactcaaatgccatacatgaagatgacgatcaaggtaaaccagctaatagtggtacatcaaaggaacagtcagatgatgatggcgatcttgaggaagatacggaccccgttaatgcaaagcggacaaggagaatgctgtcaaatcgggaatcagccaggaggtcaagaaaaaggaagcaagctcacctaaacgatctagaatcacaggtttcccagttaagatctgagaatgcatctctgcaaaagcgcttgtctgacatgactcagaaatataagcaatctaccacagaatatggcaatcttcaagatgacatgaacgctatgaggagaaaggtgaatatagctgaagaagcggtgaggagagtaactggaataggacttcaattgttcactacatctgaaatgcctgcaagcagcatgcccgtttcttcaggtgtatcagacgcagcttctgctgctgctgctgctgctctcgtcgaagacgactggacaaactgtagcctcccagatgaagcaattcctgtgccaagtgcagcaatggccttgaggtcaccgtccgtgcggcgtgtcgcaagcttggagaacctgcagaagagaatccatgctggagatgtgacacattttgaggcagcatcagccttgtcattgcctgaagctactgcctgtgataataagtag

SEQ ID NO: 11572 - DNA, 849 bp, Oryza sativa
  Clone ID: TFbOSC3436j.C1.o5.gm
atgggcggatgtgaggttaatttggagcgtcacgggctagttccggtcgggactggttcggggcgtgacaccctgtgtgacgtctcgtccttcacggttcgactacatcggcttttcggcgtcatcttcctcaacgactgccgtgattgtgtcaccgtcttcgtctccagtgcatcctcgcgcaccttgcttcctgacttcggctacaacgaccacggctactctacacacggcttcatcaactacggctcccttgcacccttcgctttggctacattgactacgcaacgcgcaggaaatcatctgtttaagtatggtgacctcatggtcaccgtcaccgaggcaacgtatggtgacctcatggtcaccgtcaccgaggcaacggctacaagcaagaaggtgcaggtgcagggtgcggccatggcgaactaccaccaccaggagtactaccagatggcggcggcggcggcggtggcgtggccgagggagccggacagcccgcagctgagcatcatgagcggctgcagctccctcttctccatctccaccctgagggacgacgacgacggcggcggcgtccgcctcgccggcgccgcgctgcccgccacgccggtgtcgctcgccgggatcgccggcggcgccagtacccccggcggcgacgaggtggacatggaggtgcggcagcagagcggcggcagcggcgacgaccggaggaccatccggatgatgaggaaccgggagtccgcgcttcgctccagggcgcgcaagagggcgtacgttgaagagctagagaaagaggttcgccggctggtggatgacaacttgaatctcaagaagcagtgcaaagag

SEQ ID NO: 11573 - DNA, 1230 bp, Oryza sativa
  Clone ID: TFbOSC402805j.C1.o29.fg
atggcttcgcatgctggaggtagtggcggcggcggcggtggaagtggccgggatgctggctcggcgcagcgcgggccgatgcaggggttggcgaggcaagggtcgctgtatgggcttacactcaatgaggttcagagccagttgggggagccgttgcttagtatgaaccttgatgagctgcttaaaagcgtgtttcctgatggcgcggaccttgacggtggcggtggcggtggcggcatcgcgggccagtctcagccggccctggggctgcagcgccaggggagcatcacgatgcctccggagctgagcaagaagacggtggatgaggtgtggaagggcatccaggatgtgccgaagaggggtgctgaggagggtggccggtggaggcgggagaggcagccgaccctgggggagatgacgcttgaggatttcctggtcaaagctggggttgtcacggatccgaacgatttgccaggaaacatggatgtggtagggggcgctgctgcggctgcagctggtacgtctgatttgaatgccggagcacagtggctacagcagtatcaccagcaggctttggagccccagcatccaagcataggtgctccttacatggcaactcacctggcacctcagccattagctgttgctacaggtgctgttttggatccaatttactccgatggccagatcacttcgccaatgctcggggctctttctgatcctcagacacctgggcgcaaacgctgtgccacaggggagattgcagataagctagtagaaagaaggcagaagaggatgataaaaaacagggaatcagctgccaggtcaagagcgaggaagcaggcttacactaatgagcttgaaaacaaagttcttcgtctagaagaggagaatgagaggctaaagaagcagaagcctacattcatactgtccagcaaagtgagccgcaagcaggtcaccaaagccatgagatctgccaccatttgtgtcctctgcatttgcattctcatgatcctgcaatgctttgccagcatcagtgcagtggatcttggcgatgctgcagcttcagcgtcagggggagaaggcctgatccggccgaggaagctgctgcagaatgcgccggcggcgaggtcaccgccgtcgcgctccgccgccgccgtggaggtcgaggtcaatgcgagcctggggaagcagaagccgtcgagcaagtcgaatcccaggcagaattag

SEQ ID NO: 11574 - DNA, 1278 bp, Oryza sativa
  Clone ID: TFbOSC419671j.C1.o6.fg
atggagcgggtgttctccgtggaggagatctccgacccattctgggtcccgcctccgccgccgcagtcggcggcggcggcccagcagcagggcggcggcggcgtggcttcgggaggtggtggtggtgtagcggggggcggcggcggcgggaacgcgatgaaccggtgcccgtcggagtggtacttccagaagtttctggaggaggcggtgctcgatagccccgtcccgaaccctagcccgagggccgaagcgggagggatcaggggcgcaggaggggtggtgccggtcgatgttaagcagccgcagctctcggcggcggcggcggcggcggcgacgacgagcgcggtggtggaccccgtggagtacaacgcgatgctgaagcagaagctggagaaggacctcgccgcggtcgccatgtggagggcctctggcacagttccacctgagcgtcctggagctggttcatccttgctgaatgcagatgtttcacacataggcgctcctaattccatcggaggcaatgctactccagttcaaaacatgctaagtggcccaagtgggggatcgggctcacagttggtacagaatgttgatgtccttgtaaagcagcccaccagctcttcatcaagggagcagtcagatgatgatgacatggagggagaagctgagaccactggaactgcaagacctgctgatcaaagattacaacgaaggaagcaatccaatcgggagtcagccaggcgctcaagaagcagaaaggcagctcacttgaatgagctggaggcacaggtatcgcaattaagagtcgagaactcctcgctgttaaggcgtcttgctgatgttaaccagaagtacaatgatgctgctgttgacaatagagtgctaaaagcagatgttgagaccttgagagcaaaggtgaagatggcagaggactcggtgaagcgggtgacaggcatgaacgcgttgtttcccgccgcttctgatatgtcatccctcagcatgccattcaacagctccccatctgaagcaacgtcagacgctgctgttcccatccaagatgacccgaacaattacttcgctactaacaacgacatcggaggtaacaacaactacatgcccgacataccttcttcggctcaggaggacgaggacttcgtcaatggcgctctggctgccggcaagattggccggacagcctcgctgcagcgggtggcgagcctggagcatctccagaagaggatgtgcggtgggccggcttcgtctgggtcgacgtcctga

SEQ ID NO: 11575 - DNA, 1386 bp, Oryza sativa
  Clone ID: TFbOSC400878j.C1.o1.fg
atggagcacgtgttcgccgtcgacgagatccccgacccgctgtgggctccgccgccgccggtgcagccggcggcggccgccggagtagatgacgtcggcgcggtgagcggcggcgggttgctggagcggtgcccgtcggggtggaacctcgagaggtttctggaggagctcgacggcgtccctgcaccggcggcgagcccggacggcgcggcgatttaccctagcccgatgccggcggcggcggcggaggcggcggcgcgctggagtaggggctacggcgatcgtgaggcggtgggggtgatgcccatgcccgcggccgcgcttccggcggcgccggcgagcgcggcgatggaccccgtggagtacaacgcgatgctgaagcggaagctggacgaggacctcgccaccgtcgccatgtggagggaattattaggtcacatacccttggaagatgaaattattttagtagaaaaaaagaaactgttatattggaatctggcctctggtgcaatacattctgagagtcctctaggcaataaaacatcactgagtatagttggttccatcctgagttcacagaagtgcattgaaggtaacgggatactagtgcagaccaagttaagtcctggcccaaatggaggatcaggcccatatgtaaatcaaaatacagatgctcatgccaagcaagctacgagtggttcctcaagggagccatcaccatcagaggatgatgatatggaaggagatgcagaggcaatgggaaatatgatccttgatgaagaagataaagtgaagaaaaggaaggaatccaaccgggagtcagctagacgctcaagaagcagaaaggcagctcgcctaaaagacctggaggagcaggtatcactattaagggttgaaaactcttctctgttgaggcgtcttgctgatgcaaatcagaagtacagtgctgctgctattgacaatagggtactaatggcagacattgaagccctaagagcaaaggtgaggatggcagaggagagtgtgaagatggttacaggggctagacaacttcaccaggccattcctgacatgcaatctcccctcaatgtcaactctgatgcttctgtgccgatccagaacaacaacccaatgaactacttctccaacgctaacaatgccggtgttaacagcttcatgcaccaggtttctccagcgttccagattgtggattctgtcgagaagattgacccaacagatccagtgcagctgcagcagcaacagatggcgagcttgcagcatcttcagaatagagcttgtggtggcggcgcaagttcgaatgaatatacagcatggggatcgtctctgatggatgcaaatgagcttgtcaacatggagcttcagtag

SEQ ID NO: 11576 - DNA, 513 bp, Oryza sativa
  Clone ID: TFbOSC900418j.C1.o13.fg
atgcagcatgatgccatatccaacattgcataccatcctagcatggatttcacaagctttttcctgccgcaaaccgacgcttactcgcatgatctcagtgcattgctggacatggctgtggttgatccatacatcagctgcaatggcagcagcatcaccatgattccagtgactgaagatgaagcaaatgctcagccgatgaaccatggcaatgacgagaggaagaagagaaggctggtgtcaaaccgtgagtctgcaaggaggtcccgggtgaggaagcagaggcgcctggatgagctctcatctcaggtttcagagcttcgagacaccaaccagaggcttcttgttgagctgaatcacatgatctccaagcatgctcgcattgtcagggagaattcccagctcagagaagaagcttctgacctgcagagaaagctcagtgagatgaaaatggaagatgctgaagtagctgctgctgctgctgcagcaccacgaacattagaagtagcttaa

SEQ ID NO: 11577 - DNA, 793 bp, Oryza sativa
  Clone ID: TFbOSC400070j.C1.o5.np
aggaggccgcggcggcggtgaggagcctggagtgggaggtgctcctggccacgaacagcctcgggagcctcgtggttgacggcgccgactacgacggtggaatcgacacgttcttcctcgacgacgccgacgacgtgctgttcgggcagctcgccgcggagcacgagccccccgccgccaagggcgcgcgcgcggcggcgaaggccgccgtggagagcctcccgaccgtggtcgtcgacgcggcccgcggcgacacgcagtgcgcggtgtgcaaggacggcatggaggccggcgagcgggccaggaggctgccctgcgcgcacctctaccacgacggctgcatcctgccgtggctcgccatccgcaacacgtgcccgctgtgccgccatgagctgcccaccgatgaccccgagtacgagaactggaaggcgaggcgagcagccgccggcggcaatggcgatggcgacaggtacggcatcattaggcaatcttgcagaagagcgcaggaggagaaggatgatatccaacagggaatctgcccgacgatcacggatgaggaagcagaaacagctaagtgagctctgggcacaggttgtccacctccgcagcactaatcgtcagctccttgatcagctgaaccatgtcatcagggattgcgatcgtgttacccacgaaaactgccagctgagagatgaacaagccaaactgcagaagcagtattttttaggttggcacaggcattaaggaagtaggtggaaatgatgaatgttgtgattggtagagaagagaaagt

SEQ ID NO: 11578 - DNA, 900 bp, Oryza sativa
  Clone ID: TFbOSC421842j.C1.o10.fg
atgaagaagtgcccgtcggagctgaacttcgaggcgttcttccacggcgagaggggggaggacgacgccgacgccgccgccgaccagaagcccggcggcggcccgcacccgccgccgttcgccatgttctccgccgccgacctctccagcttcggcttcgcggactcggtgacgcagagcaccatcactggggtcattcccaatcacatatggccccagtcccagagcctcaacgcacggcatcctgcagtctacacaattgagtcgcaatcatcaatctgtgcagcagcaagtcccacgtcagctaccactctgaacatgaaggagagccaaactctgggaggcacaagtggttcagattctgacagtgagtcgctgttggatatagagggcggtccatgcgaacaaagcacaaacccactggacgttaagagaatgagaaggatggtttccaaccgggagtctgctcgtcgatcaaggaagagaaagcaagctcacttagctgatctcgagacgcaggttgaccagctccggggcgaaaacgcatcgcttttcaagcagttgacagatgccaatcagcaattcacgacggcggtcacggacaacagaatcctcaaatcagacgtggaggccctccgggtcaaggtgaagatggcggaggacatggtggcgcggggggcgctgtcgtgcggcctcggccacctgggcgggctgtcgccggcgctgaacccccggcagggggcgtgccgcgtccccgacgtgctcaccgggctggactacgccggcgacgaccccttcaccgggctgtccccgccggagcaggtgcagatgcccggcggtggcgaggtgggtgacgcctggggctgggacaaccactccaatggcgccatgtccaagtga

SEQ ID NO: 11579 - DNA, 525 bp, Oryza sativa
  Clone ID: TFbOSC401561j.C1.o22.fg
atggcgtaccaatcgttcggcgcggtggacttggcggcgagcttcttcttctcctcctcctcctcctcgccgcagcctggattggtcggtgtccatggcgatcggttcttgggcggcggcggcggcgacggcggcgacggcgggagcagctacgacggcggcggcgatggaggggcggcgagcgggaaggggacgaggcgcgacgagaggaaggagaggcggctggcgtcgaaccgcgagtcggcgcggcggtcgcgggtgcggcggcggcggcagctggacgagctgtcgtcgcacgtcgccgagctccgcgccgccaaccaccggctcgccgtggagctgaaccgcgcggcggcgaggcacgcgcagatggcgcgggagaacgcgcggctcgccgaggaggcacgcgcgctccgggagaggctgcccctccgcggcggcggcggcggcggcggcgacggcgaggcggaggaggaagcgggaggaggctgcggcgcggaggcaattttggcgccaatggattaa

SEQ ID NO: 11580 - DNA, 819 bp, Oryza sativa
  Clone ID: TFbOSC3427j.C1.o1.fg
gcagctgctccatggaacagctatttcgacgacatcctcaaggatacggagcaccatgcatgcacccacacccacacctgcaacccgcctgtgcatgacctctcacacacccacacctgcgtccatgtccacaccaagatcgtctccgccccatccgacactccgtcggatgctgccgagaccgccgagtccccgacggagaacaatgcctccaagaagcggccgtcgggtaaccgtgccgctgtgaggaagtacagggagaagaagaaagctcacactgcctcgctggaggaggaggttgttcatttgagggctctaaaccagcagctcatgaagaagctccagaaccatgccacgctcgaggcagaggtatccaggctgcggtgcctgctcgttgatattagaggaaggattgaaggggagattggggcttttccttatcagaggccagtgaagaacatcgatttggtttctagtgttgatcagggaagttatcttggtggtgcccaggttatgaactcctgtgactttcgatgtgccgaccagatgtattgcagtccagggatgcaggtgagaacaatgggcgaggatggcgctgtgagtggtcaggtgttggggcaaggtgcctgtgatattgccagtatccaatgccaaggtgcaaaatctggatctgcaaagctcccagtctgtggggctatggagcatggttattacggcatccctaaggcagtaaggcgctgccagggtgtaaggcgtccactccgccttacgagaaagctagaggagaaagggcaaaaacaagtgataaacccatcctag

SEQ ID NO: 11581 - DNA, 566 bp, Oryza sativa
  Clone ID: TFbOSC3427j.C1.o1.gp
ccttcatttcttttcagaatttggcatacagccgacaggcatcgtacccatagccccacagactgggagctttgcagatccagattttgcaccttggcattggatactggcaatatcacaggcaccttgccccaacacctgaccactcacagcgccatcctcgcccattgttctcacctgcatccctggactgcaatacatctggtcggcacatcgaaagtcacaggagttcataacctgggcaccaccaagataacttccctgatcaacactagaaaccaaatcgatgttcttcactggcctctgataaggaaaagccccaatctccccttcaatccttcctctaatatcaacgagcaggcaccgcagcctggatacctctgcctcgagcgtggcatggttctggagcttcttcatgagctgctggtttagagccctcaaatgaacaacctcctcctccagcgaggcagtgtgagctttcttcttctccctgtacttcctcacagcggcacggttacccgacggccgcttcttggaggcattgttctccgtcggggactcggcgg

SEQ ID NO: 11582 - DNA, 3453 bp, Oryza sativa
  Clone ID: TFbOSC407343j.C1.o12.gm
atggatgacggggacctcgatttctccaacccggacacattcctctgcccggccgtcggtggtgctgaccccgacggcagctgctccatggacagctatttcgacgacatcctcaaggatacggagcaccatgcatgcacccacacccacacctgcaacccgcctgtgcatgacctctcacacacccacacctgcgtccatgtccacaccaagatcgtctccgccccatccgacactccgtcggatgctgccgagaccgccgagtccccgacggagaacaatgcctccaagaagcggccgtcgggtaaccgtgccgctgtgaggaagtacagggagaagaagaaagctcacactgcctcgctggaggaggaggttgttcatttgagggctctaaaccagcagctcatgaagaagctccagaaccatgccacgctcgaggcagaggtatccaggctgcggtgcctgctcgttgatattagaggaaggattgaaggggagattggggcttttccttatcagaggccagtgaagaacatcgatttggtttctagtgttgatcagggaagttatcttggtggtgcccaggttatgaactcctgtgactttcgatgtgccgaccagatgtattgcagtccagggatgcaggtgagaacaatgggcgaggatggcgctgtgagtggtcaggtgttggggcaaggtgcctgtgatattgccagtatccaatgccaaggtgcaaaatctggatctgcaaagctcccagtctgtggggctatggagcatggttattacggcatccctaaggcagtaaggcgctgccagggtgcacgcacgggatcccagccctccgaaccccaggttccccgcatcggacggcagagaccaccccctcgctctcgctccacgtcaagctcgccgcgccgcccagtaaaatactgccacgtggaggacgcgccacccgagccgtccgatcttccacgtggcgcgatcgcccccgcgtggaccgggcgcacggggtctccggctaagaagctccaagtcaatgctgatgacagcactgatgagttagttgatccgccgaaggtagaggagaagattggtggtgttccccatggcctgtccacggactctgaggttgttcagagggaggctgagtcaatctcgaggaagaccctcaggagctcagcggagaaatttgagttccaggctgaggtgtccagactcatggacatcatcatcaactcactctacagcaacaaggacattttcctgagggagctcatctccaatgcttctgatgctttggacaagattaggttcctggctctcactgataaggaggttttgggcgaaggtgacactgctaagcttgaaatccagattaagctggataaggagaagaagattctctccattcgggataggggtattggtatgaccaaggaagatctcattaagaaccttgggaccattgccaaatctggaacttcagcttttgtggaaaagatgcagactgggggtgacctcaatctcattgggcaattcggtgttggtttctattcagtatacttggttgctgactatgttgaagtgatcagcaagcacaatgacgacaaacagcatgtctgggagtccaaagctgatggatcattcgctatctctgaggatacatggaatgaacccctgggccgtggaactgaaataagactgcacctccgagatgaagccaaggagtacgtggaagaagacaagctaaaggatttggtgaagaagtactctgagttcatcaatttccccatttacttgtgggcaaccaaggaggttgatgtggaagtgccagctgatgaggatgagtcaagtgaatcaagtgaagaagaggaatcatcccctgagtctacagaggaagaagagacagaagagagtgaagagaagaagcccaagacaaagacagtaaaggaaaccactactgagtgggagcttctgaatgatgtgaaggctatatggcttcgtagccctaaggaggttactgaagaagaatacacaaagttttaccactcacttgctaaggactttggtgatgacaagcccttgtcttggagccacttcactgctgagggagatgttgagttcaaagctttgctctttgttcctcccaaggctccacatgatctctatgagagttactacaactctaacaagtcaaaccttaagttgtatgttagaagggttttcatctctgatgaatttgatgagcttcttccgaagtatctcagctttttgaagggtctcgtcgactcggacacattgcctctcaatgtatcacgagaaatgctccaacaacatagcagcctgaagaccatcaagaagaaactaatccgcaaagctcttgacatgattagaaaacttgctgaggaagatcctgatgagtacagcaacaaagataagacagatgaagaaaaaagtgcaatggaggagaaaaagggccagtatgccaagttctggaatgagtttggaaaatcagtcaagttgggcatcattgaagacgcaactaacaggaaccgtcttgcaaagcttctgagatttgaaagtaccaagtcggaaggcaaacttgcctctcttgatgagtacatttcaaggatgaagccagggcagaaggacatcttttacattaccggaagcagcaaggaacaattagagaaatcaccgttccttgagaggctaaccaaaaagaactacgaggttatctacttcactgaccctgttgacgagtacttgatgcaatacctcatggactacgaggacaagaagttccagaacgtctccaaggagggtctcaaactcggcaaggactctaagctcaaggacctcaaggagtccttcaaggagctgaccgactggtggaagaaggctcttgacaccgagagcgtggactcggtgaagatcagcaaccggctgagcgacaccccctgcgtggtggtgacatccaagtacgggtggagcgccaacatggagaagatcatgcagtcacagaccctctcggatgccagcaagcaggcgtacatgcgcggcaagagggtactcgagatcaaccccaggcaccccatcatcaaggaactccgtgacaaggtcgcccaggacagcgagagcgagagcttgaagcagacggcgaagctggtgtaccagacggccctcatggagagcggcttcaaccttcctgatcccaaggacttcgcctccagcatctacaggtcggtgcagaagagccttgacctgagccccgacgcggccgtggaagaggaagaggaggtcgaggaggccgaggttgaagagaaggaatcatccaacatcaaggaggaggcggagccgtcgtcgtatgataaggacgagctagctgccatgttcattagtttaaccgttgtgccctgtccatgtcgggaatactaccttatttcatga

SEQ ID NO: 11583 - DNA, 1074 bp, Oryza sativa
  Clone ID: TFbOSC400458j.C1.o48.fg
atgggggcgtacgaccggcctccgccagttggcatgtggagtcacgagcagttcaaggttgacaacggccaggccacgagtgcatccacgatcatggaggcagagatgaaatttgagaataggctagaagaaattccccaagtagttctggaggaagggagaaatgttgatcaggaggcaagcaagccgccagacaaggtcctcagaagacttgcacaaaacagagaggctgcacggaaaagccgcctgcggaaaaaggcttatatccaacagctggagacaagccggttgaaactagcgcagttagagcaagagcttcaacgggccaggcagcaggctgtgtatgcaaatgggagccttcgagaaccaaatcttggatttacaggaccgatcgatccaggtgccttaggttttgagattaagtacagccattgggtggacgagcagaatcgcaacactggtgagctgaggaatgcgctgctgcaggggcagacgacggaccaggacctggagctcaagttgctcgtcgaggctgggctcgacaactacaaccgcctcttcgagatgaaagaggaagccgccaactccgacgtgttctacatcatgtcgggcatgtggaagacccccaccgagcggttcttcctgtggatcggtgggttccggccatcggaggttctcaagaatttgagaccgcagctggagcctctgacggacaagcaggtcgtggaagtgggcggcctgcagcaaacctcgatgcaggtcgaggacgccctctcgcagggcatggacaagctgaagcagacgatcgcggactccctgacggcggccgacccgttcgactcccccgaggcctacatggtgcacatggccaacgccgtggagcagctcagatccctcgtccagttcgttacccaggcagatcatctccggcagcagacgctgcaggagatgcacaggatcctgacgacgcggcaggcggcgagggggctcctcgcgctgggggactacttccagcgcttccgagcgctgagctcgctatgggcagctcgcccgcgcgattcagggataagctaa

SEQ ID NO: 11584 - DNA, 1251 bp, Oryza sativa
  Clone ID: TFbOSC411284j.C1.o12.fg
atggcgccatcttccctcctcatcatcttcttcctcctcccgacctcccgctcctccgcactacagcagcatggcgtagcggtggtgggcatggcggcgcaccaggggatggcggcggcgacggcggcggaccggttctgcctgccgaggatggcggcggcggcggcggccgcctcgcaggtggagaactggggcgactccggcgtcatcgtcagcagcccgttcaccgacgacacctccaccgacctcgacgacagcgccgacaagcaccacctccacgctctagtgggcggcggcgatggcggcgacgacgccggcgagcagcgaggcgcggattcctccgccgtgtccaaggaaagaagaggggatcagaagatgcagcggaggcttgcgcagaatcgcgaggcggcgcggaagagccggatgaggaagaaggcatacattcagcagttggagagcagcaggtccaagctgatgcaccttgagcaggagctccaaagggcaagacagcagggaatcttcattgcaactggaggctccggcgatcacgggcactcgatcggaggaaatggtggtacgttggcgttcgaccttgagtacgcgcggtggctggacgagcaccagcggcacatcaacgacctgcgggtggcgctgaacgcgcagatgagcgacgacgagctgtgcgagctcgtcgacgccgtgatgatgcactacgaccaggtgttccgcctcaagagcttcgccaccaagtccgacgtgttccacgtcctctccggcatgtggatgagccccgccgagcgcttcttcatgtggctcggcggcttccgctcgtcggagctcctcaaggttcttgccagccatcttgagccgctgacggatcagcagctgatgggcatctgcaacctgcagcagtcgtcgcagcaggccgaggacgcgctgtcgcaggggatggaggcgctgcagcagacgctgggggacacgttggtgtcggcggccgccaccgtggtcagcggcggcggcggcgccgacaacgtcaccaactacatgggacagatggccatcgccatggccaagctcaccacgctggagaacttcctccgtcaggctgatctgctgaggcatcagacgctgcagcagatgcaccggatcctgaccacgaggcaagcggcgcgggcgctgctcgtcatcagcgactacttctcgcggctccgggcgctgagctcgctgtggctggcgcggccgagggactag

SEQ ID NO: 11585 - DNA, 456 bp, Oryza sativa
  Clone ID: TFbOSC14114j.C1.o1.fg
atgacgtccgggttcgggttcacgccgtgggcggctgacacgtgccctaccttggagcagctgatggcgtcgtccgcgtcgccctcgccgtcgtcgtcgcttgatgacaacgcggcggcggcggaggaggagaacggtgaggtggaggaggaggaggagcggaggcggcagcggcggaaggtgtcgaaccggctgtcggcgcggcggtcgcgggcgcggaagcagcagcggctggaggagctgcgtggggagagcgcccgcctccgcgccgagaaccgggagctggcggccaggctgcacgccgtggcgcgccacggcctcgccgcgcggtgccagaacgcgcgcctccgcgccgaggccgccgcgctcgcccgccgcctcctcgcgctccagcggctcgcccgcggccgccacatgatgatcacggcgtcgccgccgcagttctcgcgtcgctga

SEQ ID NO: 11586 - DNA, 456 bp, Oryza sativa
  Clone ID: TFbOSC900018j.C1.o1.fg
atgacgtccgggttcgggttcacgccgtgggcggctgacacgtgccctaccttggagcagctgatggcgtcgtccgcgtcgccctcgccgtcgtcgtcgcttgatgacaacgcggcggcggcggaggaggagaacggtgaggtggaggaggaggaggagcggaggcggcagcggcggaaggtgtcgaaccggctgtcggcgcggcggtcgcgggcgcggaagcagcagcggctggaggagctgcgtggggagagcgcccgcctccgcgccgagaaccgggagctggcggccaggctgcacgccgtggcgcgccacggcctcgccgcgcggtgccagaacgcgcgcctccgcgccgagggcgccgcgctcgcccgccgcctcctcgcgctccagcggctcgcccgcggccgccacatgatgatcacggcgtcgccgccgcagttctcgcgtcgctga

SEQ ID NO: 11587 - DNA, 543 bp, Oryza sativa
  Clone ID: TFbOSC416709j.C1.o1.fg
atgaccctgtcaggtgggaccctgtcaagcgggataacctctggctcaagccatgggacccggagctcagggtcagagggtgatatccagctgcaggtccaaatggacctgaagcggaaaagaaggaaggaatcaaaccgagagtcggcaaagaggtctaggttacggaaacaacagcacctcgatgaccttacctcacaggtgaaccagttgaagatggagaaccagcagctcaccacaacattgaacatggtcacccaaagctgtgccttcgcagagtctcagaactcagtgctgcgcactcagatgatggagctggatagcaggctatcagcgctccgtgagataatcttctacatgaacaatggaaaccaatcaccttctaatcctacaatagcagcgactacatacccatccaccactacaatgactgcagcaactactggccattacgattattatgatgttttcactgcaaatgcatggggctcagggatgcaaatgatgcagcagcccatagatcagtttctgtaccagtgctag

SEQ ID NO: 11588 - DNA, 612 bp, Oryza sativa
  Clone ID: TFbOSC400151j.C1.o14.fg
atggcggcgcaggagcaggagcaggagaagcagcaggtgaagacgagcacgacgagctcgctgccgtcgagcagcgagcgctcctccagctcagcccccaacaacctcaaggaaggaggaggggtggagagcgacgaggagatacggcgggtgccggagatgggagggggcggcgggtcggcgtcgtcgggggcgggggcggacgagcggcaggggaaggaggacgggaagcagcagggtggtggcggcggcggggcggcggcggcggggggcgggcaggagcaggcgccgccggcgaggaagcgagggcggagcgccggcgacaaggagcagaaccggctgaagcggctgctgcggaaccgcgtgtcggcgcagcaggcgcgggagcggaagaaggcgtacatgacggagctcgaggccaaggccaaggacctcgagctccgcaatgccgagctcgagcagcgcgtctccaccctccagaacgagaacaacacgctccgccagatactcaagaacacgacggcgcacgccggcaagaggggcggcggcggcggaggcaagggcggcgatggcggcggcggcgggaagaagcaccatttcaccaagagctag

SEQ ID NO: 11589 - DNA, 1083 bp, Oryza sativa
  Clone ID: TFbOSC401241j.C1.o11.fg
atggcgacaacacgcgcatctctcaccgatcccctccttccctctcccgcggcacgcgcgccagttaaagccaaaaagctctcatggtccatgcttcacgcaagcagcaaggacgagaggagaggacagagtggggaagctgaagctgaagcaagcggaggagtgcacgcgaatccctcctcgccggcgagaatgcaggagcaggcgacgagctcgcggccgtccagctccgagaggtcgtccagctccggcggccaccacatggagatcaaggaaggcaaggaagcgccacttcgatcccttctccttccctttcttgatttccattttactgttcctctttcgggaatggagagcgacgaggagatagggagagtgccggagctggggctggagccgggcggcgcttcgacgtcggggagggcggccggcggcggcggcggcggggcggagcgcgcgcagtcgtcgacggcgcaggccagcgcgcgccgccgcgggcgcagccccgcggataaggagcacaagcgcctcaaaaggttgctgaggaaccgggtatcagcgcagcaggcaagggagagaaagaaggcatacttgaatgatcttgaggtgaaggtgaaggacttggagaagaagaactcagagttggaagaaagattctccaccctacagaatgagaaccagatgctcagacagatactgaagaatacaactgtgagcagaagagggccagttcttctgaaaatccccaaatcgggtctgcgggaggcggcaccagcgggctgcggaggtttgcgggaggcggagggcgacgagaagtttgtcctcaacgggttcaccgccgcgaatctcagcttcgatggcatggcgacggtgaccccgaacgggctgctcatgttgaccaacggcacgaaccagctcaagggccacgccttcttcccggcgctgctccagttccacaggacgcccaacagcatggcgatgcagtccttctccacggccttcgtcatcggcatcatcagcgcgttcgaggaccagggcagcggcagcccggcggcggcaggtggcagcggcagggcggcataa

SEQ ID NO: 11590 - DNA, 717 bp, Oryza sativa
  Clone ID: TFbOSC7652j.C1.o3.gm
atggacctgccccagccaatgggaatgacgcagggagcccaagcccagtggggagtgaaaggctctcctgtcgggctcatcgccgcatccatgtcgatcacggaggctagcctccacttctgctacctccactcgctctccgtcgtgttcctctacttcttctactttctctttgtgctctgtgatacattcaagatgtcagttgcgccggcgacggaagggtccgcacgccgctcggcggcggcggcggcggcggaggaggaggagcggcagcgcaaccggaagaggtcgaaccggctgtcggcgcagaggtcccgcataaagaagcagcagtacgtggacgggctggccgtggaggcggagcagctccggcgggagaacgacgccatgcgcgccggcgccggcgccgtgctgcagcggtgccgcctggtcgagcaggagaaccgggtgctcgccgcgcacgcgcgcgagctgtgcagcgcgctccagctccgcgcctcgcagctccgcctgctcggggaggtggcaggcgtgcccctcgacgtgcccgacgtcgccgaccacctcgtgcagctctacggcggcgacctggggatgacgccgctctcgccaccgccgctgctgccgccgctgccgccacagatcgagatgctgtacttccagccagactcggtcatggatccggtcagtatgctgcagggctacgaaaacatatga

SEQ ID NO: 11591 - DNA, 210 bp, Oryza sativa
  Clone ID: TFbOSC7652j.C1.o3.np
atgctccggaatggaaatgagggaatgtccacaatacccggatttagtcagatccaattcgagggattttgtaggttcattaatcaaggtttggcagaagaacttgagaagtttccaacaattaaagatccagatcacggaatatctgttcaattagtagccaagtagtaccgaaggagtatctccgagttaaggagtaccgaagggaag

SEQ ID NO: 11592 - DNA, 522 bp, Oryza sativa
  Clone ID: TFbOSC900423j.C1.o21.fg
atgtcagttgcgccggcgacggaagggtccgcacgccgctcggcggcggcggcggcggcggaggaggaggagcggcagcgcaaccggaagaggtcgaaccggctgtcggcgcagaggtcccgcataaagaagcagcagtacgtggacgggctggccgtggaggcggagcagctccggcgggagaacgacgccatgcgcgccggcgccggcgccgtgctgcagcggtgccgcctggtcgagcaggagaaccgggtgctcgccgcgcacgcgcgcgagctgtgcagcgcgctccagctccgcgcctcgcagctccgcctgctcggggaggtggcaggcgtgcccctcgacgtgcccgacgtcgccgaccacctcgtgcagctctacggcggcgacctggggatgacgccgctctcgccaccgccgctgctgccgccgctgccgccacagatcgagatgctgtacttccagccagactcggtcatggatccggtcagtatgctgcagggctacgaaaacatatga

SEQ ID NO: 11593 - DNA, 1107 bp, Oryza sativa
  Clone ID: TFbOSC10722j.C1.o6.fg
atggacccgcgattcccgccgccggcgccgtccgggggagcgccgccgagggggcaccaccggcgggcgcactcggagacgttcatccggctgcccgatgccgacctgctgctcgacccggacggcgagttcggattctccgacctcgacttcccttccctctccgacgactcccccgcggcgtccgacccgaccccgcctcctcccccgccggcgctgccgcaggcggcgccgcggccgcctgggggtgcacacctgaggagcctctccctcgacgccgcgttcttcgatggcctcgcgttccagggaggaggagggggtggtggtgctgggagtgggagtagcggcggtggggctgggcataagaggagcgggtcgatggatggggagagctcgctgttcgagggcgagtccgcgccgcccgactacgccaagaaggccatgcccgccgataggctcgccgagctcgcgctcctcgaccccaagcgcgcgaagaggattctggcgaacaggcaatcggcggcgaggtcgaaggagaggaagatcaagtacaccggtgagctggagaggaaggtgcagacgctgcagacagaggcaaccacgctttcaacacagctcacgctgctccaggcgtactgggatgctatgatcataaaaagtgttagtctctgtttggttgtatttattctcaactgtgagtaccgctatagttctgtacttgcaaattgcactttccaggacaagcagggccattacaaggcaattgaaatcaaagaatccaaatatatttatccagataagcaaagcaacctgttgagaaagccttctctgtttaatgcagctctgaatgacgccctacgagaagaagttcagcggcttaagatagcggcaggccaagttccaaacatgaacggaaactccttcaatggaggactccagcagcagcagcagcagcagatgccgacctatttctcgcagcagcagcagatgcactacttaagtggccaccagggacgtcatcaccacccaaataatccccataactctttgaacggaggccaatcgatgagcggccagaccctaaatgactccatggatttcatgtga

SEQ ID NO: 11594 - DNA, 798 bp, Oryza sativa
  Clone ID: TFbOSC400259j.C1.o152.gm
atggcgtcgagggtgatggcgtcgtcgtcgccgtcgcacacggcatcggatctcgcgcggttcgcggcggggaggggtgggggcgggagcgcggggctggggtcgatgaacgtggaggagatcctccgcggcatctacgccgacatgccgacgccggcgctgcccctcgtcggcggtgacaggccgatgtcgccgctcccggcgccggatgtcgccgccgcgccgcggacggcggaggaggtctggaaggagataactggtgcgggcgtcgccgccgccgccggcggcgtggtgccccctgctgctgctgctgctgctgccccggccgtcgtcgctggcgctggcgctggcaccggcgcggagatgacgctggaggactttctggcgagggagggcgcggtgaaggaagacgaggctgtggtcaccgatccctcggcggccaaggggcaggtggtgatggggttcctgaacggggcagaggtcaccggaggcgtcaccggcggcaggagcaggaagaggcacctgatggatccgatggaccgcgccgcgatgcagcggcagaagcgaatgatcaaaaatcgcgagtcggcggcgaggtcacgggagaggaagcaggcctatattgctgagctcgagtcgctggtcacgcaactcgaggaggagaacgccaagatgttcaaagaacaggaggagcaacatcagaaacgacttaaagagctcaaggaaatggttgttccagtcatcattaggaaaacgtcagcacgagatcttagaagaacaaactcgatggagtggtag

SEQ ID NO: 11595 - DNA, 1941 bp, Oryza sativa
  Clone ID: TFbOSC11046j.C1.o1.fg
atggcggagccggccctgctggaccccaccgccgccttcgacctccgcctctacccggcccacctcttcgaccacgaactccctctcgccggcggcggcggcggcgacgacgacgacgacctcccgctcgacgggctcgagttcgacctgcccggcgatttctccgtggaggacttcctcctccggtctccggagcgggacgactccggcgagggctctgctgccggatccgggcccaccgcctccccgtcgtcgtccccgaccacctcggcgtccaactccgccgtcgccaacggcagcggcggcgaggtcaagcacgaggagtcggatgaggggaggagcggtgggggtgaccccaagtggagcctgaagcggaagcaggcgagccccggcccgagctcggacgcggccaagtgccgccgatccggggacggcgacgtttctccgtcggcgtcggcgtcgcggaccgctgtggattccgacgagggggggacggtgtgcgaggaggaggaggacgagcggcgggcggcgcggctgatgcggaaccgcgagagcgcgcagctgtctcggcagaggaagaagcggtacgtggaggagctggaggagaaggtgaaatcgatgcactcggtgattaatgacctcaattctaggatctcctttgtcgtggccgagaacgcaacactgcggcagcagcttagtggcggcagtgtgaattgcccaccacctggggtgtatccgccggcgccaattcccggcatgcatttcccatggatgcctgggtatgcaatgagaccccctggttcccatgtacctcttgtgccaatcccccggttgaagccgcaacagccagtgccttcatccaaagtagtgaagaaaccagagagcaagaagactgtggagaacaagagtaagagcaagaccaagaccaagaaggtggctagtgttagccttcttggtttgctgcttattatgcttgtctttggtgctttcattccagggtttaatcataactttggaatgtgtgggcagagtgataatgctatgtttaggaattttggtcagtctcatgctagggtgttgagtgtcagtagccaggataaaagtagtttgaacaatagcgacatgattggtgttgatgttggaaagatgacggggaatactgatgggccagggaagaaacatcagcctgcacacaactcaagtgagatcctccctgctttgttgtatgtgccgaggaatggaaagcatgttaagatcaacggcaacctgattattcattctgtgcttgcaagcgagaaagcagtggcacataaggcctcaaaagatgatagtgatcagtcagctagagatcacaaagagactagtgttgccatagctcgttatctttcgctgcctggaaaggatgtgaatcgacaggagacatcctcggcagatggaccattgccacaatggtttcgtgaaggaatggaaggacctatattaaattctggaatgtgcagtgaggtatttcagtttgacatttcgacggcttctagcaatcctggtggcattatacctgcatctcctgttgtgaactcgtcaagtgtcaatgctaccgagaaaatcccagcacattctgctgcttatcatggcaagctgaaaaacagaagagtcatgtacaatgaagcgattccactcaccgggaagacggcgaacaacacagagccttttaacagaacctctgaaagcagcagcaagttacctgatagcaagccagcatcatcagttgttgtctcggtgctagccgatccaagggaggctggtaatggggatggcgatccgagagtatctccgaaacccctgtccaagatatttgttgttgttcttgttgacggtgtgagatatgtcacttactcctgcacgcttcctttcaagagctccagcccacatcttgtgaactaa

SEQ ID NO: 11596 - DNA, 507 bp, Oryza sativa
  Clone ID: TFbOSC400025j.C1.o12.fg
atggccggcctccccttcccctccgactccgacaccgccctcgaggccttcctcgccgacattggcttcggcgcaccatgtccggaagctgctccggcgccgtctccgtcgcatccggacacgacggcggcggcggctactgatgagccggtgatggccggtgacgaccaggccgacgaggagcggcggcggcggctccggcggaggatctcgaaccgcgagtcggcgcgccggtcgcgcgcgcggaagcagcggcacctcgacgagctccgggccaaggcctccgcgctccgcgccaccagccgcgacctcgtcgcgcgcctccgcggcgccagggcgcgcgccgcgctcgtggcgctcaccaacgcgcaactccgcgacgaggccggcaagctcgcgcttcgcctcgccgccgcccgccgcgtcatagctctccggcagctctactccgccgccgccgccggcggtggcttcgagatgcaggcgctcgcctcgttgatcgcgtag

SEQ ID NO: 11597 - DNA, 531 bp, Oryza sativa
  Clone ID: TFbOSC33872j.C1.o21.fg
atgacgattaaaaggaaggacgacgggcaggtcgtgaagcaatcagtcaaagcggttggcgggggacttctagaaagggtggatagcgacgacgaggagatagtagggagggtgccggagttcgggctggcgctgccggggacgtcgacgtcgggcagaggtagtgttcgggttgcaggtgacgcggcggcgacggcggccgggacgtcgtcgtcgtcgcccgcggcgcaggccggcgtcgccggcagcagcagcagcgggcgccgccgcggacgcagccccgccgacaaggagcaccggcgcctcaaaagattgctgaggaaccgggtgtcagcgcagcaggctcgggagaggaagaaggcgtacatgagtgagctggaggcgagggtgaaggacctggagaggagcaactcagagctggaggagaggctctctaccctgcaaaacgagaaccagatgcttaggcaggtgctgaagaacacaacagcaaacagaagagggccagacagcagtgccggcggagacagctag

SEQ ID NO: 11598 - DNA, 1329 bp, Oryza sativa
  Clone ID: TFbOSC400036j.C1.o47.fg
atggagcaaactttggacgtacctagatcgttgagactactggcgccaaaagctcaacaacaaatggatgaattttggagggatcgacaaaaggagattgaaacaacaaaggactttagcgagcatgcgatccctatggcccgcttgaagaagatcgtatcttctcaaaagggtaacatgatgatgacctttgacatgccagcattcttatcgaagatgtgtgagctcttcgtacaagaacttgctgtgcgtgcatgggcatctgctcaatcccataatcgttgcatcatactagacacggatattgctaaagccattgcctccacagagtcttatgactttcttgttgatatcctccataatcatcgtgtgaaacacaaatccactccttgttctacacttactacaaagcgttgtaggttagtcgatcaaccttccacatctcacatgccctaccaacatcagctgccacaatttgctcctacatatactccggccatccctattactcctagtttaatgccaccaatttctcactatataccgttccaatatccatccttatcacaagaagtgtccccgatgatggcttctgcacccatagtgaatagatcaatgttgctcattcacaacatagcaaggggtctaggcttacaaggaaacaatatcagcacgttcgccaacaataatatcccagacaatattgttggttgtagtagccccacagttcttgcaagtatgatgagtcctgctttactagaagttgcagggacatcactaaatccaccaaactctcattccatctgcacaatgaacatgatcaactcgagtgatcctagtggatctagtattggtgacattaatgttgcaaatcaagcaagtcttgctccctctggacgttttaaccctgctatccttcgagagtcatcatgtccttcgttcttacatagtaacaatgacacaattgttgctataccggagggtgtagatattagtggcaccatggatgttgctagtgatgttgctgctatagttatcaatggtcaagaagaacatgagagggaaacaaatgttgagcatcatcagcaaaatgagatatatgaaagcattgatataggaataatcaatgcaagtgttgcggatgataataaatatagtattagctgggatgaattgggaatggctgatgattcattgctagacaaatttttggaggagtttcaagtaagaaatgacggtgttttgcgcactgggattgagttgcatgaagacccattccttggtgacgtgatgttagcaaacccaagtacaagcaatgccaataagtaa

SEQ ID NO: 11599 - DNA, 1104 bp, Oryza sativa
  Clone ID: TFbOSC900254j.C1.o20.gm
atggatcccaccaaatccagcacgccgccgccggtgatgggcgcgcccgtcggcttcccgcctggcgcgtaccctccgcctccccccgccggcgccgccgccgccgcctacgcgcagcagctctacgcgccccccgccgccgcggcggcgcagcaggcggcggcggcgcagcagcagctgcagatgttctgggcggagcagtaccgcgagatcgaggccaccaccgacttcaagaaccacaacctccccctggcccgcatcaagaagatcatgaaggccgacgaggacgtccgcatgatcgccgccgagggcccccgtcgtgttcgcccgcgcctgcgagatgttcatcctcgagctcacccacgcggggttggggcgcacgccgaggagaacaagcgccgtacgctgcagaagtcggacattgccgccgccatcgcgcgcaccgaggtgttcgacttcctcgtcgacatcgtgccccgcgacgacgccaaggacgccgacgccgccgcggccgcggcggcggccggcatcccccgccccgccgccggtgtgccggccaccgatccgctcgcctactactatgtgccccagcagccagccggcggggcgaaaggtcgccggggcgagaagggagaggagaaggcccgacggctggcgacaggcgacgaggcggcggcggcgacgcgggagcaggccggttggggaggaggccggcgacacagaggccataggccgtgcgggccgccgccagggacatctccacggccgccgtcgtctgggcgctcacgcacgtcgtccagcacggcgacaccatcctgctcctcgccgtcatgctgctgccgcacagggcacaactctggcaagaagtcctgggagtttccgctctttgcagggggttgtgcgagcggccacaggagcgtgttgattcagaattcggatgtcgcttatttgtgtaatcaaatgatgctaaaacttcgtgatttttatgatccgagcaagtggtgggagacggcggggcggtggccgtcatcaagcggcggcgcctgggcttgttttggacgggggagggccggcgcgggtaaccggtcggagggacgcacgtga

SEQ ID NO: 11600 - DNA, 1008 bp, Oryza sativa
  Clone ID: TFbOSC401168j.C1.o5.fg
atgccgatcccggaaaaggacggggtggaggacaatcaagaggatgatacattttcaaggttgcaattgcttgcacaacaacgacatgccatggagaagttctggaggatgagccaggaacagatcgaagaatccgcaggcaacgaagagcttatactgccgatttcccgtgtcaagaatatcatccatgcaaaggagggtggtatgatgttatctgctgataccccagcttttgtaacaaaactttgtgaacttttcgtccaggagctcatccttcgtgcttgggtgtgcgccaactcacacaatcgtgaaatcatacttggcacagatattgctgaggcaatcaccaccacagaatcctatcactttcttgctaatgtagtccatggccaccaggcgctaggaagcaacataccagagataggggtttctgcttggaagcgccataagctagatgaaatgacctcactctgccatcctccccaagcagtgcaggtcacagatttagctaaccatccacccaatattcctgtttgtcctcctataggtcaatcgggtactcagcacacaacatctacacatgttttgatgatgcaaggagaatctattcacaaggcaagtaaagaaaaatccccactgaaggaagtgatggtgccgaccaacaaggtgggcatgaccaacagctcttatggagttcctaatggtggtggtgctactagtagtaaagttgttattgatagcccgaaaggcgaaacagcacaagttttctcttcccagcatgcatgtccttccctagaagataactatgttattcccattcctgctggacatggtgatagttttcgtactcttgatgaggccaatataccccagctacatcaggagcagaaaaactttatttcacaagatgctattgttggtgaaaacattccgctgaatgagtctttggaaaagagcaagcataaggatgaggacttactttttcctgacaaagatcttcctgagtga

SEQ ID NO: 11601 - DNA, 777 bp, Oryza sativa
  Clone ID: TFbOSC401409j.C1.o13.fg
atgaggaagaagctgggcacccgcttccccgcggcacggatcaaaaagatcatgcaggctgatgaggacgttggcaagattgcactagctgtacctgttttagtatcgagggcccttgaattgtttttgcaagatttaattgaccgaacttacgaaattacactgcaaagtggtgcaaagacattgaattccttccacctaaagcaatgtgtgaggaggtacagttcttttgacttcctaactgaggttgtcaacaaggtaccggacctcggtggcgctgactcatgtggagatgatagagcattacccagaagaagaaaagccttgccaaatggaagtgacccagagaatgaggaatctcgatcaagcaaaatggccgtaagaagtgcaaatatcagtcccagaggacgtgggagaggtcgaggtagagggcgaggacgaccacccaccaagcggaaggaagttggttatgtacaatttgaggatgagagcagcatgtttgctgatcagggcgaagccttaccaggagaggagacggttccagagaccatccatggcaccgagagcgtacctccaagcacacaccctccagcagaagccccatcggcagcagagataccagctccaaatccaaaggtggaagaagcgaaaaacgacgaccatcagccggattggcctatgccagatgcgattggaaacatcggtgtcggaccatccggttttggacatcttacggtgcaagttgacgaggatgaggactacgacaacgaggattag

SEQ ID NO: 11602 - DNA, 870 bp, Oryza sativa
  Clone ID: TFbOSC418198j.C1.o28.fg
atggccgggaagaagaaggccctaacaaatcccgcctctccctccgcctccgcctccgcttccacccctaagaaatccaccgccacctccaaggaccgctccacgccgaaaccccgcaaaaaccccaaccccaaggaggaggcaccaccgccgccgcccgccaacaacaagcgcctcaacccccaagggggatccaaccgtaagaagaaggccgatgcggggacgccctccaagaagccgaagcgccagccgccggagcccaaacctcggaagcacaagggggccaagagcgagaagccgcaccgggtttccggcgaaggggagaagcccacgcccacgaagaagaagaagaagaaggagagcagcaaggagcccaagcgcgagaagcagcaagcgtccgcgcctatgtcgactccctcgaagaagaacaaggaagccaaacgcgacacaggaggagcggggaagcccacgcccaccaagaggaagctcggcgacgtggatcccccacaggagcgaccgtccggtgaaggccaggcaagctctcccacgcccgccaagaagcggaaggacaaggcggcggcggcggaggcggttgccgaccacggcgccggcagcttcccgatggctcgggtgcggcagataatgcgggccgaggacgccaccatccgcccctccaatgaggctgtcttcctcatcaacaaggccaccgagatattcttgaagaggtttgcagacgatgcttatcgaaatgctttgaaggatcggaagaagtcaattgtgtatgataacctttattttgttccacagaaagttacagctgaagatgctttgaaggctccagttagcagccaagtgaaccaaccacaataa

SEQ ID NO: 11603 - DNA, 873 bp, Oryza sativa
  Clone ID: TFbOSC416336j.C1.o2.fg
atgaggaagaagctggacacccgcttccccgcgcctcggattaagaaaatcatgcaagcagatgaagatgttggcaagattgctttagctgtacctgttctagtgtcaaaagcattggaattatttctgcaagacttgtgtaataggacatatgacattacagtgcaaagaggggtcaagactctgagttcttcccatttgaaacagtgcatacatagttataatgtttacgatttcttgagggatgtcgtcagtaaagttccagacatgggtacatctgatgctggtgttgatgataaacttggcaaaaggaggaaaactgctgaagatgacagtgaagaggaatcaaagcggacaagaaatgaggcagcaagccagacaagcactggtagagggcgtgggaggggtcggggaagaggccgacgtggtgggcgtgtgtctgagagggagattatttccgcttacgaaaaatttgaggagaaccatgagtttcctccaggtcaatttagcaagccttctcagctgaaggtagatgtttcagttgatggtacagatgcaattgaaacaaaggaggctaccccattaagcaacgcaagagcttctctaaggaacattgacttaaacatagagcttactgactatgatgatgagggttcagctccactggaggtccagcctccagctccggcagcaggtgtggttacaacctcttcaggaccacttgtttcggaggtgaacgaagaggcgaagaccaaagactttctaggatggcaattgcctgagctgaccaagatggccatggaccctgttcagtttgccttgtcttcaaaccataggttagaggaggatgaggattatgacaacgaagaatga

SEQ ID NO: 11604 - DNA, 417 bp, Oryza sativa
  Clone ID: TFbOSC420787j.C1.o13.fg
atgagttccgcgggcggcggcggcgggagggggaagtcgaagggctccaagtcggtgtcgcggtcgtccaaggccggcctccagttccccgtcggccgcatcgccaggtacctcaaggccggcaagtacgccgagcgcgtcggcgccggcgcccccgtctacctctccgccgtcctcgagtacctcgccgccgaggtgctggagctggcggggaacgcggcgagggacaacaagaagaaccggatcgtgccgaggcacatccagctggcggtgcgcaacgacgaggagctgagcaggctgctcggcgccgtcaccatcgccgccggcggcgtgctgcccaacatccaccagacgctgctccccaagaagggcggcaaggacaaggccgacatcggatccgcctcccaggagttctag

SEQ ID NO: 11605 - DNA, 891 bp, Oryza sativa
  Clone ID: TFbOSC27280j.C1.o3.fg
atggatccgatggatatcgtggggaagtccaaggaggacgtctccctccccaaatcaacaatgtttaagattataaaggagatgttgccccctgatgttcgagtggcaagagatgcacaagatcttcttgtggaatgctgtgtagagttcatcaacctcctatcttctgaatccaatgaagtttgcagccgagaggacaagaaaactattgctcctgagcatgttcttagagctctgcaggatcttggctttagggagtacattgaagaggttcaagcggcctacgaacaccataagcatgataccctggattctccaaaagcaagcaaattcactggtgtggagatgacagaggaacaagctgtagctgagcaacagaggatgtttgctgaggcccgagcaaggatgaacaatggtgccgccaaaccgaaggagccagaacctgaagcgcagcaacaaacacaacagccaccacagcctcagctgcaccctcaaccacagcaacccctgcagcctcaacttcagctccatcctcaaccacaacaacagccctcacagctacatcctcaacagctgctgcatcctcaatcgcagcaaactccgcagcctcaacctcaggtccaccctcaaccacagcagcctccacagctgcaaccgcaacctcagcttctccagcaaccgcagctgccccaacagctgcagccgcaatctcagctccccccacaaccgcagcagcccccacagctgcagctgcaatctcagctccacccacaaccgcagcagcccccacagctgcagccgcaacctcagctccatcagcaaccgcagccgcaggcagagctgcaatcacagtcacaaccacaaacagaacatggcttggacagttcatga

SEQ ID NO: 11606 - DNA, 690 bp, Oryza sativa
  Clone ID: TFbOSC401854j.C1.o11.fg
atgccggattcggacaacgagtcaggggggccgagcaacgcgggggagtacgcgtcggcgagggagcaggacaggttcctgccgatcgcgaacgtgagcaggatcatgaagagggcgctcccggcgaacgccaagatcagcaaggacgccaaggagacggtgcaggagtgcgtctcggagttcatctccttcatcaccggcgaggcctccgacaagtgccagcgggagaagcgcaagaccatcaacggcgacgacctcctctgggcgatgaccacgctcggcttcgaggactacatcgacccgctcaagctctacctccacaagttccgcgagctcgagggcgagaaggccatcggcgccgccggcagcggcggcggtggcgccgcctcctccggcggctccggctccggctccggctcgcaccaccaccaggatgcttcccggaacaatggcggatacggcatgtacggcggcggcggcggcatgatcatgatgatgggacagcctatgtacggctcgccgccggcgtcgtcagctgggtacgcgcagccgccgccgccccaccaccaccaccaccagatggtgatgggagggaaaggaaaggtagaagaagtacaaagcaaaggaaaaatccgagactttctacaactacaagcaagcatgcttgagttgatccagggagaaaattaa

SEQ ID NO: 11607 - DNA, 378 bp, Oryza sativa
  Clone ID: TFbOSC401203j.C1.o25.fg
atgaggcaggcgaggccctactcggcgatgttcgccggcggcgtgtcggcgcggactgggccgcacgcgctgccgctggctcgcatcaagaagatcatgaagcggtcggcgggggacagcagcgtcgtcgacggcggcggcggcggcggcggcggggcgaggatgatctccggggaggcgccggtggtgttctccaaggcgtgcgagctgttcatcgccgagctgacgcgccgcgcctgggccgccacgctcgagggcaagcgccggactgtgcacaaggaggacgtcgccgccgccgtgcagaacaccgatctcttcgacttcctcgtcgacgtcgtcacggcagacctcggcgacgatcatacggactataagtaa

SEQ ID NO: 11608 - DNA, 858 bp, Oryza sativa
  Clone ID: TFbOSC5489j.C1.o2.fg
atggcggacgcggggcacgacgagagcgggagcccgccgaggagcggcggggtgagggagcaggacaggttcctgcccatcgccaacatcagccgcatcatgaagaaggccgtcccggcgaacggcaagatcgccaaggacgccaaggagaccctgcaggagtgcgtctcggagttcatctccttcgtcaccagcgaggcgagcgacaaatgtcagaaggagaagcgcaagaccatcaacggggaagatctcctctttgcgatgggtacgcttggctttgaggagtacgttgatccgttgaagatctatttacacaagtacagagagatggagggtgatagtaagctgtcctcaaaggctggtgatggttcagtaaagaaggatacaattggtccgcacagtggcgctagtagctcaagtgcgcaagggatggttggggcttacacccaagggatgggttatatgcaacctcagagcaattttcacatattggtagttctgcaatcttttgcattcccatacatgtatcaggtggcacaaatctattgcaacaaatatgaagtgtcaagggagcaaatatgggatacccctcagataatggaactctccccatggataccgtacaccataaaccgtatttggaaagagactcatggtagccaggatattcgtattcagggaaggccgcgcgaggctgcaaatagcgctttggactggcaatggccatcaaagcactcatcgctggctagcaacttctatggtacacgagtggtgggaggccatcatgagtaccagagaagcaccaaaaaggacactacgcacgttaactttgctagtggcctgggagatctaggatga

SEQ ID NO: 11609 - DNA, 435 bp, Oryza sativa
  Clone ID: TFbOSC400992j.C1.o58.fg
atgacgaacgggcaggacaacctgctgccgatcgccaacgtgggccggatcatgaaggacgggctgccgccgcaggcgaagatatcgaagcgggccaaggagacgatccaggagtgcgcgacggagttcatcagcttcgtcaccggcgaggcgtcggagcggtgccggcgggagcggcggaagacggtgaacggcgacgacgtctgccacgccatgaggagcctcggcctcgaccactacgccgacgccatgcacaggtacctgcagaggtaccgcgagggcgaggagctcgccgcgtcgctcaacagcagcagcagcgccgccgccgccgccgccgccgccggcagcaggggcggtggcgccatacagatcgacgtgagagctgagctctccatcttcagatcaggcaacaaccaaggtcgtccaaacaattaa

SEQ ID NO: 11610 - DNA, 453 bp, Oryza sativa
  Clone ID: TFbOSC900366j.C1.o10.gm
atggctggggagacgggggaaggtgggggatcccattcccaacctgagaagcagccgggccaagcggcggcggcggcgtccatggcggaggcggaggtggaggagctgcccaaggccatcgtgcggcgcctagtgaaggagaagctcgcccaggtcgccgccggaggggccgaggtcatcgtcaacaaggacgccatgtccgccttcgccgagagcgcccgcatcttcatccactacctctccgccactgccaatgacatgtgcaaagaatcaaagaggcagacgatcaacgctgatgatgtcctcaaggcactcgatgaaatggagttccctgagtttgtagagccccttaatacttctttgcaagccaaggaggtcggagatttaaactccgaccacccctctgatgctctactgtgttcaatcctaagcttctcataccggatctggtaa

SEQ ID NO: 11611 - DNA, 599 bp, Oryza sativa
  unsure (1)..(599): unsure at all n locations
  Clone ID: TFbOSC402631j.C1.o11.gm
atgaagagtaggaagagctatgggcacttgctgagcccggggggcagcccgccgttggacaacgagtccggcgaggcggcggcggcggctgcggctggcggcggcggctgcgggagcaacgccgggtatgtcgtctacggcggcggcggcggtggggactcgccggcgaaggagcaggacaggttcctgccgatcgcgaacgtgagccgcatcatgaagcgggcgctgccggcgaacgccaagatctccaaggagtcgaaggagacgggccaagagtgcgtgtcggagttcatcagcttcgttacaggcgagggcctccgacaagggccaccgcgagaagcggaagaccatcaacggggacgacctcctctgggccatgaccacgcgtggggtgcgaggcctacggggggccgcgtcaagtcctacctaaccggtaccgggaggcccagggcgaaaagggccnactggctcaggggcgccgggggcggccaccagggagcgcctagggagagggcgggtcctagaaggaagacggggggggggaacgaggggtttgatgaggtggggggaaccgggggtgggggtatagacgggggcag

SEQ ID NO: 11612 - DNA, 894 bp, Oryza sativa
  Clone ID: TFbOSC30077j.C1.o6.fg
atgaagagtaggaagagctatgggcacttgctgagcccggtgggcagcccgccgttggacaacgagtccggcgaggcggcggcggcggctgcggctggcggcggcggctgcgggagcagcgccgggtatgtcgtctacggcggcggcggcggtggggactcgccggcgaaggagcaggacaggttcctgccgatcgcgaacgtgagccgcatcatgaagcggtcgctgccggcgaacgccaagatctccaaggagtcgaaggagacggtgcaggagtgcgtgtcggagttcatcagcttcgttacaggcgaggcctccgacaagtgccagcgcgagaagcggaagaccatcaacggcgacgacctcctctgggccatgaccacgctggggttcgaggcctacgtcggcccgctcaagtcctacctcaaccgctaccgcgaggccgagggcgagaaggccgacgtgctcggcggcgccggcggcgccgccgcggcgcgccacggcgagggcggttgctgcggcggcggcggcggcggcgccgatggcgtcgtcatcgacgggcattacccgctcgccggcggcctgtcacactcacaccatggtcatcagcagcaggacggcggcggcgacgtcgggctcatgatgggcggcggcgacgccggcgtcgggtacaacgccggggccgggtcgacgacgacggcgttctacgcgccggcggcgacggcggcgtcagggaacaaggcgtactgcggcggcgacgggtcgagggtgatggagttcgagggcatcggcggcgaggaggagagcggaggcggcggcggcggcggcgagagggggttcgccggccacctccatggcgtgcaatggtttagactaaagaggaatactaattag

SEQ ID NO: 11613 - DNA, 963 bp, Oryza sativa
  Clone ID: TFbOSC401807j.C1.o27.gm
atgccctccttcaccatcgcgatcgtactctcctctgtttccgatctgcagtgcgagctggagttcctcgcctgcgtgactagcaagaagcacggaggaacacatagccatggtatgaactgccctgccatgacagctgcaactgcagctggggcctttggctttggacggacaagagctgacatggaaccatcctcacagcctcagcctgtgatgggtgttgccactggtgggtcacaagcatatcctcctcctgctgctgcatatccacctcaagccatggttcctggagctcctgctgttgttcctcctggctcacagccatcagcaccattccccactaatccagctcaactcagtgctcagcaccagctagtctaccaacaagcccagcaatttcatcagcagctgcagcaacagcaacagcagcaactccgtgagttctgggctaaccaaatggaagagattgagcaaacaaccgacttcaagaaccacagcttgccactcgcaaggataaagaagataatgaaggctgatgaggatgtccggatgatctcggcagaagcccccgttgtcttcgcaaaggcatgcgaggtattcatattagagttaacattgaggtcgtggatgcacacggaggagaacaagcgccggaccttgcagaagaatgacattgcagctgccatcaccaggactgatatctatgacttcttggtggacatagttcccagggatgaaatgaaagaagaagggcttgggcttccgagggttggcctaccgcctaatgtggggggcgcagcagacacatatccatattactacgtgccagcgcagcaggggcctggatcaggaatgatgtacggtggacagcaaggtcacccggtgacgtatgtgtggcagcagcctcaagagcaacaggaagaggcccctgaagagcagcactctctgccagaaagtagctaa

SEQ ID NO: 11614 - DNA, 753 bp, Oryza sativa
  Clone ID: TFbOSC414618j.C1.o4.fg
atggagcccgcatttcccaacggaggtgcggctgctccaccaccgcccatggcggcggagcagctgccgccggcggcggcggtggtccgggagcaggaccgcctgatgccgatcgcgaacgtgatccgcatcatgcggcgcgtgctcccgccgcacgccaagatctccgacgacgccaaggaggtgatccaggagtgcgtgtcggagttcatcagcttcgtcaccggcgaggccaacgaccggtgccaccgcgagcaccgcaagacggtcaccgccgaggacctcgtctgggccatggaccgcctcggcttcgacgactacgtcccgccgctcaccgcctacctccgccgcatgcgcgagtacgagggcggcggatcaggtggtggtggtggtggtggccgtggcgccgccgccgcccccgccgtcgtgccgccgccgccgccgccgcctcccgaggacgcgttccgctacgtgcaggtccatcatcccgtgtacgcggcgccaggtgagccggtgcaggggtacggttaccccgtggccatgtcgtctgctctgccggcgccgcacgtgcacgtcggcgtccgcggcggcgggcagcacgaggtgttcggtggcgggccggcgcccctggctgtctactacggaggagcgccgtacggcgaggccagcagccgcggcggctgctctgccgccgacgaggggagctcgtcgtcgagcgcctcgccggcgccggtcggccccaactatgagtaa

SEQ ID NO: 11615 - DNA, 1593 bp, Oryza sativa
  Clone ID: TFbOSC419121j.C1.o2.fg
atgttatcctctatgttcctcttcctcctccctctctcccttctctctttctctctcttgggcaatctgtgggcaggggcggcgacgtcggcgggcgagggctggagcagcgtcgggctgcggctcatgctactaggaggtgctactccatttttctacattaacatcgagacggtgatcatcaccaacatgaactactacccggaggggtccaacccggtgtacttcgccgtgctcgtcaagtacgaggacctcgacggcgacgtcgtgcaggtcgacctcatggagtccaagtcggcgtacggcggcgccatcggagtgtggacaccgatgagggagtcatggggctccgcatcggcagtgacatcggcaagaccctttgtcaccaacaacgtcatcccagccatctggtctcgaatcgcgccatcactgcctccgtcaccccttccgcgccgacctcgttccgcgctcgcccactgccgcgcctctcccgcctcggtctctccctctgcccgcgcctccccgacgccaccctcgccgcgctcaccgccgcaccgtccatctcgcagtcgacatctcctgctctcggggattcctgctgctgcgcttgtcgttgcatgcccgaatctgaatgatctcgacttctccaatgaccactatggctcgacctcaggaatgcggcggcggcggaggtggccaagttgtgtggggttttgggggggttttggcgatggagatggtgatcgttattccatcaccttctctgcatatattgtagtgttaagaactcaagaggcatatgtgcagatcctacagcagttgcataggagtacatctttagaaatggacccacattcacacaagaaggcacatgaaggtctgattggtgacaaccctgacgcgtatgccgtgacgacataccaacctgtgctgatggtagaaccatcagccgctgctgccttccctccagctccccaggttgctccagcctatccagtgaacccaatgcagcttccagagcatcagcagcacgcaatccagcaagttcagcagctccagcagcagcagaaggagcagctccaggcgttctgggccgaccagatggccgaggttgaacagatgactgagttcaagctccccaacctcccgcttgcaaggatcaagaagatcatgaaggccgatgaggacgtcaagatgatcgcgggcgaggcaccggcgctcttcgccaaggcctgcgagatgttcatcctggacatgacgctgcggtcctggcagcacaccgaggagggcaggaggaggacgctgcagaggagcgacgtcgaggcggtgatcaagaagaccgacatcttcgatttcttggtggatatcatcactgatgataagatgaaggatgatggcatgggctctcaggctgcatccatggtttcgccatatacctcaggaggaatgggattttcctttgatctgtacccgaaccagcatcacctcgcatatatgtggcctccacaagagcagcaggagcagtggcctccacaggagcagcaggagcagaagcagaagcaggattctgatggtggtggacaagatgaatga

SEQ ID NO: 11616 - DNA, 534 bp, Oryza sativa
  Clone ID: TFbOSC400992j.C1.o59.fg
atggccgaccaccatggcggccaccacgccgacgggcatcgccggcagcagcagctgcagggggaggcggcggatcaggcggcggcggagatcatcaaggagcaggacaggttgctgccaatcgcgaacgtggggcgaatcatgaagcagatcctcccccccaacgccaagatctccaaggaggccaaggagacgatgcaggagtgcgtctcggagttcatcagcttcgtcaccggcgaggcctccgacaagtgccacaaggagaagcgcaagacggtcaacggcgacgacgtctgctgggccttcggcgccctcggcttcgacgactacgtcgaccccatgcgcaggtacctcaacaagtaccgcgagctcgagggcgaccgcgccgccgccgccgccacctcccgctccggcgccggcgccgccgcgggccccgaccacccttcctcctcctcctccgccgccgccgccaccgccggtcatttcatgttcaacgccatggacaggtcgacggatagctccaggcagttctag

SEQ ID NO: 11617 - DNA, 726 bp, Oryza sativa
  Clone ID: TFbOSC413083j.C1.o3.fg
atgtcggaggggttcgacgggacggagaacggcggcggcggcggcggaggcggagtagggaaggagcaggaccggttcctgccgatcgccaacatcggccgcatcatgcgccgggccgtgccggagaacggcaagatcgccaaggactccaaggagtccgtccaggagtgcgtctccgagttcatcagcttcatcaccagcgaagcaagcgacaagtgcctcaaggagaagcgcaagaccatcaatggggacgacctgatctggtcaatgggcacgctcggattcgaggactatgtcgagcctctcaagctctacctcaggctctaccgggagggtgacacaaagggttcaagagcttctgaactgccagtaaagaaagatgttgtacttaatggagatcctggatcatcgcttgtcaactacggggcccaaagagcagacgccaatgcaaaccacctcgacctcttcttcctcctccgtaaaaatccagagagcaccactgccaactgcatgcgggaggatgaagcgaagccggtgaccgtgaagatcatcgagacggtgtacgtggaggccgacaccgccgacgacttcaagtccgtcgtccagaggctcaccggcaaggacgccgtcgccggcgatgcaccggagctgaatagtgcccagaggtttggctcagggagagaggccagtcgccatggcgatcacaaggtcagaatctatgaataa

SEQ ID NO: 11618 - DNA, 618 bp, Oryza sativa
  Clone ID: TFbOSC400603j.C1.o33.fg
atggagcccaaatccaccacccctcctccgcctcctccgccccccgtgctgggcgcccccgtcccttacccgccggcgggagcctaccccccacccgtcgggccctacgcccacgcgccgccgctctacgccccgcctccccccgccgccgccgccgcctccgccgccgccaccgccgcctcgcagcaggccgccgccgcgcagctccagaacttctgggcggagcagtaccgcgagatcgagcacaccaccgacttcaagaaccacaacctccccctcgcccgcatcaagaagatcatgaaggccgacgaggacgtccgcatgatcgccgccgaggcccccgtcgtgttcgccagggcgtgcgagatgttcatcctcgagctcacccaccgcggctgggcgcacgccgaggagaacaagcgccgcacgctccagaagtccgacatcgccgccgccatcgcccgcaccgaggtcttcgacttcctcgtcgacatcgtgccccgcgacgaggccaaggacgccgaggccgccgccgccgttgccgccgggatcccccaccccgccgccggtttgcccgccaccgaccccatggcctactactatgtccagccgcagtaa

SEQ ID NO: 11619 - DNA, 904 bp, Oryza sativa
  Clone ID: TFbOSC419400j.C1.o11.gm
atggatcccaccaaatccagcacgccgccgccggtgatgggcgcgcccgtcggcttcccgcctggcgcgtaccctccgcctccccccgccggcgccgccgccgccgcctacgcgcagcagctctacgcgccccccgccgccgcggcggcgcagcaggcggcggcggcgcagcagcagctgcagatgttctgggcggagcagtaccgcgagatcgaggccaccaccgacttcaagaaccacaacctccccctggcccgcatcaagaagatcatgaaggccgacgaggacgtccgcatgatcgccgccgaggcccccgtcgtgttcgcccgcgcctgcgagatgttcatcctcgagctcacccaccgcggctgggcgcacgccgaggagaacaagcgccgtacgctgcagaagtccgacattgccgccgccatcgcgcgcaccgaggtgttcgacttcctcgtcgacatcgtgccccgcgacgacgccaaggacgccgacgccgccgcggccgcggcggcggccggcatcccccgccccgccgccggtgtgccggccaccgatccgctcgcctactactatgtgccccagcaggacatctccacggccgccgtcgtctgggcgctcacgcacgtcgtccagcacggcgacaccatcctgctcctcgccgtcatgctgctgccgcacagggcacaactctggcaagaagtcctgggagtttccgctctttgcagggggttgtgcgagcggccacaggagcgtgttgattcagaattcggatgtcgcttatttgtcacaagcacaagcacaacaaaagcacgatggcagtggtgggagacggcggggcggtggccgtcatcgagcggcggcgcctgggcttgttttggacgggggagggccggcgcgg

SEQ ID NO: 11620 - DNA, 753 bp, Oryza sativa
  Clone ID: TFbOSC407812j.C1.o9.fg
atggagccatcatcacaacctcagccggcaattggtgttgttgctggtggatcacaagtgtaccctgcataccggcctgcagcaacagtgcctacagctcctgctgtcattcctgccggttcacagccagcaccgtcgttccctgccaaccctgatcaactgagtgctcagcaccagctcgtctatcagcaagcccagcaatttcaccagcagcttcagcagcagcaacagcgtcaactccagcagttttgggctgaacgtctggtcgatattgaacaaactactgacttcaagaaccacagcttgccacttgctaggataaagaagatcatgaaggcagatgaggacgttcgcatgatctccgcagaggctcctgtgatctttgcgaaagcatgtgagatattcatactggagctgaccctgagatcatggatgcacacggaggagaacaagcgccgtaccttgcagaagaatgacatagcagctgccatcaccaggacggatatgtacgatttcttggtagatatagttcccagggatgacttgaaggaggagggagttgggctccctagggctggattgccgcccttgggtgtccctgctgactcatatccgtatggctactatgtgccacagcagcaggtcccaggtgcaggaatagcgtatggtggtcagcaaggtcatccggggtatctgtggcaggatcctcaggaacagcaggaagagcctcctgcagagcagcaaagtgattaa

SEQ ID NO: 11621 - DNA, 717 bp, Oryza sativa
  Clone ID: TFbOSC400426j.C1.o12.fg
atggccgccgccgccgtcgccgacgaggtcaccgaggcgatggagcaagtcgaaggggagcgtgaggaggccgacgcggtcgctgatgaggccgccgaggtgatggagcaagccgaaggggagcgggaggaagccatcgatgcggtcgccggcgaggccggcgaggtgatgaaggaagtcgtcgaaggggagcgggaggaggcgaatgccatggccgatgaggccgatgaggcgatggagccggaaggggagcgggaggaggaggcagacgccgtcgccgacgaggccaccgagccgatggagcaagtcgaaggggagggggaggatggcgacgccgccgcgcaacggccggcgctgccgctggggagggtgaagcggatcatccgggtggaccgtgacatcaagaaggtgaccaacgaggcggcgctgctcatcgccgcggccacggagctcttcgtcggctccctcgccgcgggcgcccacagggccgcctcccggcgcggccggcgcgcggtgcgtgccgtgcacgtgcgggccgccgcgcgcgagcaccgccccaccgccgacttcctcctcgactgcctccccgccgccgaggaggcggcgcctgctcgcgcggctgccgccggtcccagccgcggcggcggaagaggagaggcaaagccgttgccacgtgggacccgccgcatcgacgcgttcttccagaagaccacctag

SEQ ID NO: 11622 - DNA, 561 bp, Oryza sativa
  Clone ID: TFbOSC400070j.C1.o19.fg
atggcagggaacaaaaagcgtggtggcaggaacatggatcaggtcaagaaggcggcagtgagatcggatggggtgggaggtagtgcgaccaacgccgagctgccgatggccaacctcgtacgcctgataaagaaggtgctcccagggaaagcgaagatcgggggagcagccaagggtctcacccatgattgcgcggtggagttcgtcgggttcgtcggcgacgaggcctccgagaaggccaaggcagagcaccgccgcaccgtagcgccggaagactacttgggctcattcggcgaccttggcttcgatcgctacgtcgaccccatggatgcctacatccatggttaccgtgagtttgagagggctggtgggaataggagggtggcgccgcctcctccggcggcagctacaccgctgacgcccggtggaccgacattcactgacgcagagctgcagtttctccggtcggtgatcccctccagaagtgatgatgaatatagcggctcatcaccagccataggcggctatggctatggatatggctatggaaaaaatatgtga

SEQ ID NO: 11623 - DNA, 546 bp, Oryza sativa
  Clone ID: TFbOSC6715j.C1.o2.fg
atggcgattccaacaaaggaggaggtggagcagaatgaggaggacaatacattttcaaggttgcaattgcttgcacaacaacggcatgccatggaggaattctggaggaggagccaggaacaaatcgaggcatctgcaggcaaccatgagcatatactaccaattgactgcgtgaagaatgtcattcgaccaaagaatgatgctatgatgctatctgctgacacaccaacttttgtgacaaaactttgtgagctcttcgtgcaggagctcaccctccgtgcatgggtatgtgccaactctcacaaccgtgacatcatattaggcacagacattgctgaggcaatcaccaccactgaatcctatcactttcttggtaatgtacttcgtagccacaaggcactaggaagtactgctcctgacatagatacttctgctaggaagcatattaagctagaccaaatgacctcactctaccatcctacccaagaaatgcaggcctcacgtttagctgggtatccaccccatgttcctatatatcctccatag

SEQ ID NO: 11624 - DNA, 765 bp, Oryza sativa
  Clone ID: TFbOSC400069j.C1.o6.fg
atggaggccggctacccgggcacggcggcgaacggcgctgccgccgacgggaacggtggcgcgcagcaggcggcggccgcgccggctatacgtgagcaggaccggctgatgccgatcgcgaacgtgatccgcatcatgcgccgcgtgctcccggcgcacgccaagatctcggacgacgccaaggagacgatccaggagtgcgtgtcggagtacatcagcttcatcaccggggaggccaacgagcggtgccagcgcgagcagcgcaagaccatcaccgccgaggacgtgctctgggccatgagccgcctcggcttcgacgactacgtcgagcccctcggcgtctacctccaccgctaccgcgagttcgagggggagtcccgcggcgtcggcgtcggcgtcggcgccgcgcgcggcgaccaccaccatggtcacgtcggtgggatgctcaagtcccgcgtgcagggctccatggtgacgcaccacgacatgcagatgcacgccgccatgtacggtggcggcgcggtgccgccgccgccgcatcctcctccgcaccaccacgcgttccaccagctcatgccgccgcaccacggccagtacgcgccgccgtacgacatgtacggcggcgagcacgggatggcggcgtactacggcgggatgtacgcgcccggcagcggcggcgacgggagcggcagcagcggcagcggtggcgccggcacgccgcagaccgtcaacttcgagcaccagcatccgttcggatacaagtag

SEQ ID NO: 11625 - DNA, 2814 bp, Oryza sativa
  Clone ID: TFbOSC7036j.C1.o3.fg
atggagggaggccctcttcaagctaaaggtttgaaaggtcgcgacatgcaagcaagaccttatcgctattctccgttacaaaaagacgagattgagaaacaggtgaaagaaatgattgatgctggtttaattacacctagtatgagtccctatgcatcacctgttttacttgtcaagaaaaaggatggtagttggcgtttttgtgtggattacagaagattaaatgctctcaccattaaaagtaagtttcctatgccggttgttgatgaattattggatgagctctcaggcactaaattcttctctaaactggacttgaaagctgggtatcatcaaattcgaatggtggaaactgatgaagccaagacagcctttaagacacatcatgggcaatttcagtttagggttatgccatttggtctcacgaatgcaccctccacctttcagtgccttatgaactcagtccttgcaccatttatcaggaagtttgtgttggtgtttatggatgatatcttagtttatagccctgaccttgatagtcatttgcatcatcttcagcaagtttttgttattttgaggcagcaccagttgtttgctaggaggtctaaatgctcttttgcttgcactcaactggaatacttaggacatatcatttctgacaaaggagttagtactgatcctgagaagacagcagcaatgctggcttggcctgtgcctacttctgttactgaattgaggggatttttgggactgacaggctattacagaaaatttgttcagggttatagtatcatagcacgaccattgacactcttgttgaagaagaaggcctttctttggactgatgctgctcagcttgcttttgatcagttgaagacagctatgagtaacactccaatgttagctttgcccaattttcagcttccttttactttggagactgatgcatgtgcttatggtcttggtgctgttttaagtcagcagggtcaccctattgcttattatagcaaaactttgggccctgttaatcagaaattgtccatttacgaaaaagagtttctagctattatgatggctgtggataagtggagatgttatctgcagagaggtccatttatcattaaaacatatcacaaaatcttgtgtcatttggatgatcaaatattggggactgaattacagcaaaaggcaatgactaaattgatgggtttgcaatattcttttcaatacaagagaggggttaataatattgttgctgatgctttatctagaatgccttcctcctctcaattttgtgctttttctgtggtccaaccgatctggattcaggagatgatcaattcttatacagtggatcctcaagctcagcagctactagctgagttggctgtgcattctcctaattctcaagggtattcattgacacaagggattattagattccagaataagatttggattggatccaatgcaggactgcatactaagttgattcaagcttttcatgcttctgcacttggtggccattctgggattgctgctacttatcatcggattaagaaattatttgcttggcctggtctcaagttggatgttgaaaattttgtgaagcaatgtcaggtttgccaacaggccaaacatgaacactgtcggcttcctggactgttagctcctctcccaattccaaaagaggcctggcaggacatctccatggattttattgaaggtttaccgcgctctgatggctataatgcaattttggtggtggtggatcgttttactaagtatgcgaatttcattcctttgcgtcatccattcactgcatcacaagtggctcatctggtggacaaaactgtatttaaaactcatggcatccctcgttctattgtgtctgatcgtgatcgtctctttactagcaagttctggacaactctttttgctacttgggacactcaattacagatgagcacagcatatcacccgcaaacagatggccaaatagagcgtgtcaatcagtgtttggaaatgtatttacgatgcatgactcaggctaaccctaagaagtggagccattggattcatttggcagaattttggtacaatacaaattatcatacatatcttggctgttctcctcataaggctctttttggggtggatcctcattattctcaagttcctgatctgacattggctactctgcctgatgtggtggatgttcagactgaaaggcagcacttgtctgaatttttacagcagcagttaactcgagcccagctgcgcatgaagaacaaggttgataaaggtcgttctgaccgtgtttttgctgtgggtgatgctgttttcttgaagttacagccttatgctcagtcctcagtagttaatagaccatatcctaagttggcttataagttctttggcccttttactgttttggagcgcattggagtggcggcttatcgtttggatctacctgccagcagcactgtgcatccggtgtttcatgtttctcaactcaaagctcaggtgccagatcatactcctgtttatacttctttgccatcccaagtggttcttgatgctgctgacgttgttcctgaggcgattttggagcgtcgactagtgaagcgcagcaatgcagctcatgtccaggtgttgctgaaatggtcttcattaccagcagatcatgctacttgggaggactatcatgttgtgaagactcgctttccagatgctccagcttggggacaagctgaaactcctgcgggcggcactgtcatgaccggcaatggtgacactgagaaagaggtttaa

SEQ ID NO: 11626 - DNA, 3453 bp, Oryza sativa
  Clone ID: TFbOSC403247j.C1.o47.fg
atgccgccggcgagaggcgggaggcgtgggagggggcgaggtaggcgaggtggacgcggaggcgccgcctctagggcgcgaggcgagaacgtcgtagacgtcgagccgatcaagctcggtgatgatgatgcgaaggtagatccacagacgaagtcacctaacgaagaaataacaagcgcggaggtttgcgaggtggagacctctgaggctagcccgcttggtgccccggaggaagatgaggggaagccaggttccactaggaacctgaagcgtcttcggaagacgatcacgatcgattccgcagccgctgaggagcatggggcagagagtgacgatgaagagtttgatgttcttgccacagcaagttgccaagagttggctccatgcagaaggtccaagcgcctaaggtgcaaaccaactaggaagaggtccaaaccaactgggaagagggatttgggtggcaaggagagtgaagatgatgtatttgcaaatagctcgagcagttcccaggatgacgccgggaagttagcttctagaagatcaaagcgtctcagggagaggcttacatctgattattttgatggtgatatgaaaattgttcggctccccgccgaggatcaaaacgccttcggaacagactgggccccagaaatatttcatatgctgatgatgatagcgacaccgatgatacatgttacattaactactgaaattaccacagatcgcaagaagattgtcccatgcaggagaacgtcaaagcgcctacaggagaagcggaaagctcatgatgtttcagaggagagttacactgaagcttcgtcttgcatgttgtcgacttcttcttcatcagatgatgaattattgcacaattctataaaacctggcagacgtaattcgggtggacctagttgttcgatctgtaagattggaattgcctgctctttcctcatcaaatgcaagaattccacttgttctcgtagcttccacaccttttgtcttgatcctcctttgcaagagattataggcacctgggaatgttcttggtgcaaaagcaatgcagcaccagcagtcaaggtgacagaagtgttaacatcaaaaaaaatccaaagacttgttggccacagacgaattcttcaggaggcagatttccagtatcaattcctcgtgaaatggcaatctctttctcatcatcatgactgctgggttccgcttgaatggcttcatgtatctgatcctttacgagtacagagctatctaaacaagaactgcttgcctaaggaagtttattcagaggatcaaaggaagcttgagtggtttgaagtagatcatgccattgcatgtcggaggaagttccatcatgaaggtttatgtgatgtcttggctactttccaggataaccaagatttcgacgggtatgagttccttgtgaaatggaagggccttgattactgtgaagctacatgggagccatgttgtaccgatggtgtgcaacaggctgtttctatgcttgtcaggaggcataaaaatgcttcaaaaagagttaacatcagccaaacatgtctagatggatcaaaaatagaagaggtgcactgtggtgctctatatgactatcaacttcaaggtttacaatggttaatagataacttcaaaactaggagaagcgttattcttgctgatgaaatgggtcttgggaaaaccgttcaagttgtttgctttctgtaccacattattaaggaaagtttgactgcatccccagcattgatccttgctccaaagagcatcctcctgcaatgggaaaaggaattttgccagtgggctagtgatcttaatgttattgtttatcaaggagacagagactctcgaaagtgtatccaagtccatgaaatgtactcttctgatgggaaacctttatttgatgctctagtgacgagttatgagtttgtccaaattgacaaggcagttctacagaaattcaagtggtctacaattgtcattgacgaggctcacagaatgaagaagcttgactgcaaccttgcagcttgcctaaaacgatactgctctgaatttcggttgctccttacgggaacaccgttacaaaataacatcatggaactgttttctttgcttcattatattgatccggatgagttctctgatccaaaggctgatggattgttctcaccaattgaatctggaagggatttgacaatggatgaaaaagttgctaggattcacaatattttaaagcccaggatgttgcggagaatgaaatctgatgttctaacagattctatgccagtaaagaagtgggttgaagttccatgtgcacttgcagattcccagagagaactttacattaatattttagagaggaattactcaaagcttaacagtgccattcggaatggcagaaaactttctctgaacaacatacttatggaactcagaaaatgctgcaatcatccagtaggacttgaagttggacagcaagcaactgaagatgtgtttttatcacttattgcttcatcaggcaaacttcaacttcttcataagttgctcccaagattgaaagaaaggggaaatcgtgtactgattttctcgcagatgaccaggatgcttgacattcttgaggattttctttgttccctgggatacaaatatgcacgcatcgatgggcagacatcactctctgctaggcaggagagcatagaagagtacaaaaacattgatagtgaaacatttattttcttgatgtcaactcgtgctggtggcatgggagttgacctgcctggtgcagatagggtaattatatacgatcctgacttcaatccatttatggacttgcaagcacaatctcgggctcatcggatcgggcagacaagaccagtggttgtttaccaactcattacaaagtgttctgtcgaggaaaagatactgcagaagtcaaagcagaagttggccatcgaaaatatgttgatgaactcttccaagaagccaagtgctgatgagttgcagtctatattactccatggagcaaagacaattgtggacaggaagatcagtgcaacatccatccattatgacaatgaagccattgagaatctcctcaagttagacccttccactggtgagaaatgctcgtcggatgataacggttatcttggcagcattgtgagctttgctcatggcgtcgaggatgaagcaccttcttccccaaaggttgaggatctgaaagttctcaagcctgctactcccaaggttgatctcggccgtgggaagaggcaaaggaaagtcgtgaactacgctgacgaggttgagaatgaagacagtgatgatatgtatgccccggaaggttcgtcgacttccgaattcagcagttcgtcctccgatgatgaaactgacagcgctctgcagctgcaaatagttacagtaccggacattgatgcagattag

SEQ ID NO: 11627 - DNA, 3402 bp, Oryza sativa
  Clone ID: TFbOSC401367j.C1.o45.fg
atggagtccaaactcttggagaagttggaaggcatcacaaagtggatgcacgagattgatcagcggctggattcccaaggtggcagtctcgagaaggtgactaccaaggtggatctcgccatggattccgtcggcaagtttagaatggcagtcgaaacagaatttgagggtgttgtggaacgtgagaaaatgtctgcactagatactctgactcaaactggtacaatgactgagtataaacaacaatttgattctcttgtctatcagatcagagtgtttgatccatctgtgggggaaattcgagctgctgttgttgttcaattgcctgacactgtacagcaagcatctgctattgctcttatgcaggaatctgtcttggctagtagagctaccaaagctctcaaagggaaatttgtgaaacttcctcagtacaagagtgatatcagttctgatactgctccaggtcgagtagataaagaggatctatggaaggctaagcagttgaaagactatcgacgtgctcagggtctttgttttaagtgtggtgacaaatatactcctgaacatcgttgtgctgttggaggccaaatcaaagctatgcagttggaagaggtgctcactgatgacatattggatgttgttattgctgcagaacaatctgatgatgaggaggactgtcatatttctctgaatgcattgacaggagctcaccttcctactgctattcatttgagagcattggttcacagtaaagtcttgttacttttggtggattctggcagctctcacagctttattgattacaactttgcacagatgctgggtttacctctaaaaccaattccttctactctggtgaaagttgctaatggtgattgcttaccttgtcagtatgtggttcctggtttttcttggtggattcaggggcacacatttacttatgacatgagggtggtcactttggggggtcacgatgccatcttaggtagggactggcttgagcaatggggggaaatgtcttgtcattgggctaataaaacactcaagtttcagtatcaagggtcttggatttctcttcaaggagtacaagatgctgcagtcccttctgaaattgctgctgtcactctgccacaacttttgaaatggcataagggttgtgaaatatggactgctgctttgttggaacattcccaggatgatgtccagcatgtgattccttcttcagtgcaacaattgttaactgactttgacgatgtctttcacgatcctaagtgtcttcccccacacagggtttttgatcatgctatttctctagtacctgatgctattcctgtcaactgcagaccttatcgctattatccattacaaaaagacgagattgagaaacaggtgaacgaaatgattgatgctggtttaattacacctagtatgagtccctatgcatcacctgttttacttgtcaagaaaaaggatggttgttggcgtttttgtgtggattacagaagattaaatgctctcaccattaaaagtaagtttcctatgctggttgttgatgaattattggatgagctctcaggcactaaattcttctctaaactggacttgaaagctgggtatcatcaaattcgaatggtggaaactgatgaagccaagacagcctttaagacacatcatgggcaatttcagtttaggcaccagttgtttgctaagaggtctaaatgctcttttgcttgcactcaactagaatacttaggacatatcatttctgacaaaggagttagtactgatcctgagaagacagcagcaatgctggcttggcctgtgcctacttctgttactgaattgaggggatttttgggactgacaggctattacagaaaatttgttcagggttatagtatcataacacgaccattgacactcttgttgaagaagaatgcctttctttggactgatgctgctcagcttgcttttgatcagttgaagacaactatgagtaacactccagtgttagctttgcccaattttcagcttccttttactttggagactgatgcatgtgcttatggtcttggtgttgttttaagtcagcagggtcaccctattgcttattatagcaaaactttgggtcctgttaatcagaaattgtccatttacgaaaaagagtttctagctattatgatggctgtggataagtggagatgttatctgcagagaggtccatttatcattaaaacagatcacaaaagcttgtgtcatttggatgatcaaatattggggactgaattacagcaaaaggcaatgactaaattgatgggtttgcaatattcttttcaatacaagagaggggttgataatattgttgctgatgctttatctagaatgccttcctcctctcaattttgtgctctttctgtggtccaaccgatctggattcaggaggtgatcaattcttatacagtggatcctcaagctcagcagctactagctgagttggctgtgcattctcctaattctcaagggtattcattgacacaagggattattagattccagaataagatttggattggatccaatgcaggactgcatactaagttgattcaagcttttcatgcttctgcacttggtggccattctgggattgctgctacttatcatcgaattaagaaattatttgcttggcctggtctcaagttggatgttgaaaattttgtgaagcaatgtcaggctctttttggggtggatcctcattattctcaagttcctgatctgacattggctactctgcctgatgtggtggatgttcagactgaaaggcagcacttgtctgaatttttacagcagcagttaactcgagcccagctgcgtatgaagaacaaggctgataaaggtcgttctgaccgtgtttttgctatgggtgatgctgttttcttgaagttacagccttatgctcagtcctcagtagttaatagaccatatcctaagttggcttataagttctttggcccttttactgttttggagcgcattggagtggcggcttatcgtttggatctacctgccagcagcactgtgcatccagtgtttcatgtttctcaactcaaagctcaggtgccagatcatactcctgtttatacttctttgccatccccagtggttcttaatgctgctgacattgttcctgaggcgattttggagcgtcgactagtgaagcgctgcaatgcagctcatgtccaggtgttgctgaaatggtcttcattaccagcagatcatgctacttgggaggactatcatgttgtgaagactcgctttccagatgctccagcttggggacaagctgaaactcctgcgggcggcactgtcatgaccggcaatggtgacactgagaaagaggtttaa

SEQ ID NO: 11628 - DNA, 4176 bp, Oryza sativa
  Clone ID: TFbOSC401857j.C1.o18.fg
atggaggctaagcttctcgagaagctggactccctcacgctgtgtatggaggctttggacgacaagttaaccaagcagagcggccgaattgatcaagtcgctaccaaggtggatctcgccatggatgctgtggccgctttgcagaaggagcaagtgcaggcggcgcagctgcacaagcaagccatggcttcagaaccgatgtaccagattcctcctgtatttcaagtttcagcagctgttcttcacatgtcggggaatgctgcccagtggtatcaatcgtttaagctcgtggaggaagttgctaattggtctcagtttcgacatgctgttgtttgtgagtttgagagcacctcgcaacgtgagaagattcaggctctgcaaactttaagacaggcaggttctgtggctgaatataagcatcaatttgattctcttgtctatcagatccgtgtatttgatccatcagtgggagcagtgatggttcagttgcctaccacagttcagcaagctgctgctgtggcattgatgcaagagagtgttctacttgaattgagtactaagcaatctaagcgattgatgtataaaccattgcctaccaaaggggagttgcctcagggtggtactgatactcctgctattaagcctgaacgagcagaactatggaaggctcgacagttaagggattatcgaagagccaatggtctttgtttcaaatgtggggataaatattctcctgagcaccagtgtgcgctgggtggtcagattaaagctatgcaagttactgaagtgattccggatgatcttttgaatgcagtgactgctgaagaagactctgaccaggatgagaattgtcatatttcactcaattccctgtctggtgctagtcatgtgaacactatcagactccgagctttggtccagaataaggtgttgctcttactggtcgactctggcagttctcatagtttcttggactataactttgctcaactcttgggattgcagttgcagcccattgctccctccctggttaaagtagctaatggtgattgtatacactgtcagtttatggttcctcagtttacttggtggtttcaagggcgtactttcacttatgatatgagagttgttcctttgggtggacatgatgctattttggggatggactggttggcacagtggggtgatatgtcttgcaattgggccaacaaaactttgaagtttatgtatcagggtacttgggttgaacttcagggagtccctgattctcctccccaaactgagttgagtgctatgtctttgtctcaggttcttaagtgtcaaaaagggtgtgatatatgggcagctgcactgctggaaacagctgacttcccttctgctgattcagttccacctgctgtttctcagttagtgcatgagtttgctgatgtttttcaagatccacacagtttaccacctcacagagtttatgatcacgctattactcttttccctggttcagctcctgtgaatagcaaaccttatcggtattctcctttgcaaaaagatgagattgaaagtcaggtcaaggacatgattgattctgggttgatcactcccagtatgagcccttttgcttctcctgttttattggttaaaaagaaggatggcacgtggcgtttttgtgtggattatcgcaaactcaactctattactgtgaaaagtaagtttcctatgcctattgttgatgaattgcttgatgagcttgctggtactcgtttcttctctaaacttgacttgaaagctggctatcatcaaatatggatggtggaggatgatgaatataaaactgcttttaaaacacaccatggtcaatttcaattccatgtgatgccgtttgggttgaccaatgccccttctacttttcaatgtgtgatgaattcagtgtttgcacccttaatcaggaagtatgttttggtgtttatggatgatattctagtgtacagtcctgatttaccgtctcatctcacacacttgaaacaagtttttgaactgctgagacaacacaagttatatgccaaaaggtccaagtgttcttttgcctgttctcaattggagtatttgggacacataatttcagatcaaggagtcagtactgatcctactaagactgcagctatgttggcttggccagtccctgccaatgtgacagaactcagagggtttttggggcttacagggtattatagaaagtttgttaaaaattatagtatcctggcaaaacctttaactgtcttactacagaagaaagcgttccagtggtctgatgatgctcagcaggcttttcagaagctgaaacttgctatgagttcaactcctgtactggctttgcccgatttctcccaaccttttattttggaaactgatgcttgtgcgtttggagtgggagctgtcctcagtcagcataatcatcctattgcatattatagcaagacattgggagtggctaatcagaagctttctatatatgaaaaagagttcctggttctggggactgatttacagcaaaaggcaatgactaaattgatggggttacaatatactttccagtataagaaaggagtggagaacgtggtagctgatgctttgtctcgagtgcctcctcagtctcacttatctgctctgtcagtggctagccccatttggttgcaggaagtgttaaactcgtatgctgtggatactcaggctcagaagttattggtagaattggcagtccattctcctaatgatcagggttattctttgactgatggtctcattcgtcatcatggtcgcatttggataggagctaatctgggtttgcagactaagttaatcactgcttttcattcctctccaattggtggtcactcgggcactatggccacttatcaccggctcaaaaagttgttctcttgggttggtctgaaaactgcagtattcaactttgttaaacagtgtcaaatctgccaacaagctaaacatgagcattgtcgattgcctgggttgttagttcctttaccagtaccgaaagaagcttggatcgacatctcgatggattttattgaaggtttgcccaaatctgatggttacactgttatacttgttgtggtggatcgtttcactaaatttgctagtttcattcctttgagacacccttatactgcttcacaagtagcggtcacagtggataaatttgtgtttaagacccatggcttaccacagtcaattgtgtcggatcatgacaaagtgttcactagtcgtttttggggtgatttgtttaaagtatggaacactcaattgaacatgagtacggcatatcatcctcaaaccgacgggcaaaccgaaagagtgaatcagtgtctcgagatgtatttgaggtgcatgattcaagctactcccaccaaatggaacagttggctgcatttggctgagtactggtataatacatcttttcatacatctttgggttgttcccctcacaaagctttgtttggagtggaacctcatatcagtcaagtgccggtgctgctgtcctcagttcatcattctgtggtggacttaatttctgaacgcaatcagttgtctgtctttttacagcaacagttacaacgagcacaattgcgtatgaagcataaggctgataaagggcgatctgagcgttccttttctgttggtgatcatgtctttcttcgcttgcaaccttatgctcagtcttcggtggtgaatcgcccatatcccaaactggcattcaagttctttggaccatttcaaatcttggagaaagttgggtcggcagcttatcgtctggctttacctgaaggcagtgcggtccatcctgtgtttcatgtgtctcaactcaaagctcatgtgccagatcacactccagtgtttacttctctacccacaccggttgtactggatgctgccgatgtgtggcctgaactgattctggacaggcgtctggtaaaaaaggggaatgcagctcatgttcaggtgcttatcaagtggtcatctctgtctgctgatgatgccacctgggaggattatgatgtgttgaagacacgattcccttctgcgccagcttggggacaagctgcatctttggcgggcggtactgtcacagctgatggtattcagtgcgacgcgccacagtag

SEQ ID NO: 11629 - DNA, 3177 bp, Oryza sativa
  Clone ID: TFbOSC400864j.C1.o5.fg
atggagcaacaattggcggaacttgtggaggtcatgtctgcgattcagaagcagaattcggcgattcaaacttcggttggatcgctggaggagatcaagcccctggtggtggagttagcgagttggaagccggcgatggacaaggcggtgacagagctgcatgaggagatgggggatctgcgccaacaagtggagcggatagcccgtaatccggtgctctccgtcaagccatcggagttgccggcgctgcttcctacaccgactcggcctcgggataccgctcccaaggaggaggaggtctctccaagtgtgggtggcgaaggtcacgggccgttaggccaccgcgttgcttcgattccacgggggaaggcgtgtgggaaggagtcctctccatcgtctctcccggccaaggagggttcgaatcggggttttactgcggggtttcacggaggaaacgctcgggtagattgtccacagtttgatggggagaaccctagagcctggaaaatgaagtgcgaaacctatttccgtgtgagtggaatttgctctgaagtgtgggaggctatgacgagttaccgagctacggcccgttctgctacaccgtcgtttgcttccaagacatttggtggtggccgagctgatgaacggacactgccagtggaagataaggtagctgccctgagagcttatcgcaaagcaaagggattatgccatacatgtggggaacggtggagtcgcgatcacaagtgtggacctactgttcagttgcatattgtggaagagcttttggaattgttagctgattctgctgctgatggtatgcctgagattattgaaccaactactgacattgggtctgagtctgaacctcaaggcgaagtctgtcagatttctcgtgatgctatgattgcccagaaggatgagattgaacggcaagtgaaggatatgctgcagcagggagttattcaaccaagttcaagtcccttctcttctccggtgctgttggtgcagaaaaaggacctcacttggcagttttgtgttgactgccgtcacctgaatgctgttacagttaaaaatcgctatccccttccaatcattgatgaattattggacgaattgtcaggtgctagtctgtttaccagcttggatctgcgcgcggggtatcatcagattagaatgcgagctgaagatgagtataagacggcgtttaaaacgcataatggtcattatgagtttcgggttatgtcctatggacttacaggagccccggccacttttcaagggttgatgaacatgatttttgcaccgttattgaggaagggagttttggtgttcattgatgatatattggtgtacagtcgtaatttgcaggaccatgtcatgctgttgcgtcaagtggtcttcgtttggacttcagaacatcaagctgcatttgaagctcttaaggctgctttggtttctgccccagtgttggcgttgcccgatttttctgggacctttgtaattgagactgaagcttctgatttgggggtgggtgcggtgttaatgcaggatggacatcccttggctttccttagcaaatccctgggtccacgcaacagaggcctgtcaacttacgaaaaagagtgtctcgctatattgctggctgttgatcattggcgctcttatctgcagtttggtgagtttatcattcgtacggatcagcgcagcttgattcatcttgatgatcagcgtttggtgacatcttggcaacaacgagcattaaccaaattacttggcttatcttaccggctggtatacaagaaaggtcttgagaataaggcagctgatgtgttgtctcgttgcagatccaatgaggtgtatcaattgagtactgtgtcatcttgcgtgccctcttggttggaggaagttcagaagggttatgattctgatatttgcacttctcaattgctcgctaaagtgttgctctctcctagtcaatttccttcttattctctgaagaatggtattctctattatatgaggctcatttggctgggtgcaaactctgaattgcaacttaaaattctgtctgctttccattgctctgccgtgggtgggcattctggtatacaagttacttacagcagagtgcggcgcttgtttgcatggccgggtttgaagcaggccgttcgccagtttgtgtccaactgttcgatctgtaagcaagcaaaagctgaacgtgtgcgttaccccggtcttttgcaacctctacctgtgccggagcatgcctgggtaactgtttcacttgattttattgaagggttgccttcttcagcaggttttgactgcatactggtggtcgttgataaattcagtaagtatgcccatttcctggctttagtgcacccattcaccgcttttgatgttgctttggcttatctgaacaatgtttataaactttatggattgccacatcatatcatttcggacagagtccgtatttttaccagcgccttgtggacagagttatttcagttgacggatactcgtctgaagttaagtactgcttatcacctacagacggatgggcaaacggagcgtgtcaaccagtgtttggagacatttctccgctgttttgtgcatgcctgtccaaagaagtggttccgttggtgggctttagcagaattttggtataacactgcttatcattcagcgcttgagaggtctccatttgaggtactgaataaggtgggagcagtggcttatcgactacgattgccggatgattgctcgattcatcccgttgttcatgtctcccaacttcgacaagctgtggcaccaaccactgcgactgatgttcgtgctcttcctaccatggcaccagaggaggtggttcctgttcaagttctcgcccggcgagtttcgaagaaaggagctggagctgtggaacaagtcttggttcgttggacaggtcaatcatcaagtgaggctacctgggaagatgctgcggctttgcgtcttcgatttccggatgcgccggcttgggggcaagccgctttcgaagggggaaggaatgttacgggtgctgctactgtatctgaaccggtaagggagaataatcctgtgaagtctgggaaacgacctcaaagggagagaaggccgaatgtccgagtctctgggccggagtggtcttag

SEQ ID NO: 11630 - DNA, 2283 bp, Oryza sativa
  Clone ID: TFbOSC400896j.C1.o18.fg
atgggggaagtgggggaggagagagaggcgggattcgaaaatcgaatcccggccatctcgggcgcgggcgcgggcgggagagagaggggagtgggcgcggggaacgcggcgcacgcgcggcgtgggcgacgtggcccggaggaggcggagacgtgggcacggcggcggttgcgggcgcggcggggcggcgggagcggcgggaggttgggggaggacccgacagggtttactcttgctttgcaccggtattttcttagggcctcttataaattaaattttaggcttgggaggagaacttcggggtgtgacactgatgctactcagcttgcttttgatcagttgaagacagctatgagtaacactccagtgttagctttgccctattttcagcttccttttactttggagactgatgcatgtgcttatggtcttggtgctgttttaagtcagcagggtcaccctattgcttattatagcaaaactttgggtcctgttaatcagaaattgtccatttacgaaaaagagtttctagctattatgatggttgtggataagtggagatgttatctgcagagaggtccatttatcattaaaacagatcacaaaagcttgtgtcatttggatgatgaaatattggggactgaattacagcaaaaggcaatgactaaattgatgggtttgcaatattcttttcaatacaagagaggggttgataatattgttgctgatgctttatctagaatgccttcctcctctcaattttgtgctctttctgtggtccaaccgatctggattcaggaggtgatcaattcttatacagtggatcctcaagctcagcagctactagctgagttggctgtgcattctcctaattctcaagggtattcattgacacaagggattattagattccagaataagatttggattggatccaatgcaggactgcatactaagttgattcaagcttttcatgcttctgcacttggtggccattctgggattgctgctacttatcatcagattaagaaattatttgcttggcctggtctcaagttggatgttgaaaattttgtgaagcaatgtcaggtttgccaacaggccaaacatgaacactgtcggcttcctggactgttagctcctctcccaattccaaaagaggcctggcaggacatctccatggattttattgaaggtttaccgcgctctgatggttataatgcaattttggtggtggtggatcgttttactaagtatgcgaatttcattcctttgtgtcatccattcactgcatcacaagtggctcatctggtggacaaaactgtatttaaaactcatggcatccctcgttctattgtgtctgatcgtgatcgtctctttactagcaagttctggacaactctttttgctacttgggacactcaattacagatgagcacagcatatcacccgcaaatagatggccaaacagagcgtgtcaatcagtgtttggaaatgtatttacgatgcatgactcaggctaaccctaagaagtggagccattggattcatttggcagaattttggtacaatacaaattatcatacatctcttggctgttctcctcataaggctctttttggggtggatcctcattattctcaagttcctgatctgacattggctactctgcctgatgtggtggatgttcagactgaaaggcagcacttgtctgaatttttacagcagcagttaactcgagcccagctgcgtatgaagaacaaggctgataaaggtcgttctgaccgtgtttttgctgtgggtgatgctgttttcttgaagttacagccttatgctcagtcctcagtagttaatagaccatatcctaagttggcttataagttctttggcccttttactgttttggagcgcattggagtggcggcttatcgtttggatctacctgccagcagcactgtgcatccggtgtttcatgtttctcaactcaaagctcaggtgccagatcatactcctgtttatacttctttgccatccccagtggttcttgatgctgctgacgttgttcctgaggcgattttggagcgtcgactagtgaagcgcggcaatgcagctcatgtccaggtgttgctgaaatggtctttattaccagcagatcatgctacttgggaggactatcatgttgtgaagactcgctttccagatgctccagcttggggacaagctgaaactcctgcgggcggcactgtcatgaccgacaatggtgacactgagaaagaggtttaa

SEQ ID NO: 11631 - DNA, 4446 bp, Oryza sativa
  Clone ID: TFbOSC411208j.C1.o7.fg
atggcgtacagggcgcctactctccggccgcagctcgcggcgtctccggcgagccgagttccgctatctgattctcgtcggccgccagtatattccggaagtaacggcttctggagcggcagaggcagatcgggtcgcgcttcgaccagctcgagtagggttgaggacaaggtactccgacgacgaggtttggatggtgaccaaacttcagtccgcgctttctcgagcccaagagaaggggcgaattggatgggcagtagtcccgcttcctctagcagcagcagtagtagccatgcttcctcctcgagcgaaagttggattagagataagctgtccggtgtccgtccgtcatcgctcgccgggcgggcaccgaccaccggcaccaagaggcagtgcagcagtcctccgccatcagctgatcgttcagagaagaaggcgaaagaagatctggcgatggaggagcctccggaggctctggcaatggaggagcagcaggatgcacttgcaactaaggagcaagctctggcaatggaggaggagcagggtgcccctgcaactaagggggagcaggaggtgttgcccgagatggaggaggagcaactggtgatggaggaggagcaggagtcgttggcgatggataagatggagtcggggatggaggagcagccagggatagaggaggaggtgttgccggagatggaggagcaactgatgatagaggaggagcaggagttgtcggcgatggataagatggagtcggggatggaggagcagccagggatagaggaggaggtgttgccggagatggaggagcaactgatgatagaggaggagcaggagttgtcggcgatggataagatggagtcggggatggaggagcagccagggatagaggaggaggtgttgccggagatggaggagcaactgatgatagaggaggagcaggagttgtcggcgatggataagatggagtcggggatggaggagcagcctgggatagaggaggagcaaccggcgacggaggagttgggcgccgatgatgcgctccctagtgcgaatactcatctggatctggtctcctcccatctccgcgatgatggcaactggctcactgtgatgtcctctttatgccatcccagcaggggttggtgcctctgggctatctttgggtcgcacgcttttgccattgacaccaccgcggacgcagacattttgacattggatttggctggactgaaagaaactacttcttgccctagagcaaaaggtaataatgtaaagcactgtggcactgagagctgcgcatcatcatggatcaagccaggaattctgcaagcccctttgaagcaagctatggactccatggagtccaaactcttggagaagttggaaggcatcacaaagtggatgcacgagattgatcagcggctggattcccaaagtggcagtctcgagaaggtgactaccaaggtggatctcgccatggattccgtcggcaaggtgcagcaagagtgtgctgagttggcccgttcgatgaagcgggtggccagctgctctgatcaggccgggattttgggttcgcctttcgggatctcgcaggttagtgcaagtggttccgcgactcctccgccgttgaatccacttgttcctcctgtgttggatggggttgatttgggtcatggttttggtgatgggatttatcggcgtcatcagccacttcctaaaatggattttcctcgtttcgatggttctgatgtgcggatttggttggatatgtgtgagacttattttgacatgtaccaaatcactcaaaatttcaaagtctctgctgctgtgttgcatatgtcgggaaatgcggctcaatggtatcattcttataagttagtgaatgaggttaactcttgggatcagtttagaatggcagtcgcaacagaatttgagtgtgttgtggaacgtgagaaaatgtctgcactagatactctgactcaaactggtacaatgactgagtataaacaacaatttgattctcttgtctatcagatcagagtgtttgatccatctatggggggtaaaatgttagtgactcattttatgaatggtcttactgaagaaattcgagctgctgttgttattcaattgcctgacactgtacagcaagcatctgctattgctcttatgcaggaatctgtcttggctagtagagctaccaaagctctcaaagggaaatttgtgaaacttcctcagtacaagagtgatgtcagttctgatactactctaggtcgagtagataaaggggatctatggaaggctaagcagttgaaagactatcgacgtgctcagggtctttgttttaagtgtggtgacaaatatactcctgaacatcgttgtgctgttggaggccaaatcaaagctatgaagttggaagaggtgctcactgatgacatattggatgctgttattgctgcagaacaatctgatgatgaggaggactgtcatatttctctgaatgcatttacaggagctcaccttcctactgctattcatttgagagcattggttcacagtaaagtcttgttacttttggtggattctggcagctctcacagctttattgattacaactttgcacatatgctgggtttacctctaaaaccaattccttctactctggtgaaagttgctaatggtgattgcttaccttgtcaaccttatcgctattctccgttacaaaaagacgagattgagaaacaggtgaaagaaatgattgatgctggtttaattacacctagtatgagtccctatacatcacctgttttacttgtcaagaaaaaggatggtagttggcgtttttgtgtggattacagaagattaaatgctctcaccattaaaagtactaaattcttctctaaactggacttgaaagctgggtatcatcaaattcgaatggtggaaactgatgaagccaagacagcctttaagacacatcatgggcaatttcagtttagggaggtgatcaattcttatacagtggatcctcaagctcagcagctactagctgagttggctgtgcattctcctaattctcaagggtattcattgacacaagggattattagattccagaataagatttggattggatccaatgcaggactgcatactaagttgattcaagcttttcatgcttctgcacttggtggccattctgggattgctgctacttatcatcggattaagaaattatttgcttggcctggtctcaagttggatgttgaaaattttgtgaagcaatgtcaggtttgccaacaggccaaacatgaacactgtcagcttcctggactgttagctcctctcccaattccaaaagaggcctggcaggacatctccatggattttattgaaggtttaccgcgctctgatggttataatgcaattttggtggtggtggatcgttttactaagtatgcgaatttcattcctttgcgtcatccattcactgcatcacaagtggctcatttggtggacaaaactgtatttaaaactcatggcatccctcgttctattgtgtctgatcgtgatcatctctttactagcaagttctggacaactctttttgctacttgggacactcaattacagatgagcacagcatatcacccgcaaacagatagccaaacagagcgtgtcaatcaatgtttggaaatgtatttacgatgcatgactcaggctaaccctaagaagtggagccattggattcatttggcagaattttggtgcaatacaaattatcatacatctcttggctgttctcctcataaggctctttttggggtggatcctcattattctcaagttcctgatctgacattggctactctgcctgatgtgcagcagttaactcgagcccagctgcgtatgaagaacaaggctgataaaggtcgttctgaccgtgtttttgctgtgggtgatgctgttttcttgaagttacagccttatgctcagtcctcagtagttaatagaccatatcctaagttggcttataagttctttggcccttttactgttttggagcgcattggagtggcggcttatcgtttggatctacctgccagcagcactgtgcatccggtgtttcatgtttctcaactcaaagctcaggtgccagatcatactcctgtttatacttctttgccatccccagtggttcttgatgctgctgacgttgttcctgaggcgattttggagcgtcgactagtgaagcgcggcaatgcagctcatgtccaggtgttgctgaaatggtctttattaccagcagatcatgctacttgggaggactatcatgttgtgaagactcgctttccagatgctccagcttggggacaagctaaaactcctgcgggcggcactgtcatgaccggcaatggtgacactgagaaagaggtttaa

SEQ ID NO: 11632 - DNA, 3999 bp, Oryza sativa
  Clone ID: TFbOSC13017j.C1.o6.fg
atgccggctcgcaccaggtccgttaacagtttggatagtgtggatggatttgacgctagagctgagatcctgcagcttaggcgggagatgacagatctgagtaatctgagaggtgagatgggagaaatcaaggaccttttgaagagtatttgcacagctctacctggatttcactctgctggtgcgagtactagtgggacggctggtgcaggtggatctgcagggacccaggctatggctggtgcaagtgtatctgcaggagcacaggctgctactgggacaggggctttgattgcaccattagttccccctggattttcatcagtggcaccaattttatctacgggaggaatgcagtcaggagtggctctacctcaaactgctgatgagactcaggtaaactcaactaatgcaattccttccagtcagatacatgctggtatgggaagtgtttttccatcaacaagtcttccaccaatttttccaatacacatgtctggtgctgttccttctgttggacatgtgaatttttctattgagccaaacactgttaacccaaattttgcaccaatattcacctcagcaccaatattcacttcagctactagaactcaggctggtcatttacctggggggttaaatatacatggagtggagtctcaggaggatgtgggaatgaatcattatggaatagaaacaaaccagccatggaggtatccgcagatgcagccaacagccagacctcatctgaatgctacagggatacatatggcaaatggaggaggacctgtttggccagaaggacccagacatctgtttggtgggatgcctaatccatatgctgacatgacactaagaagccagaggttggagttaacaatatttaatggagaagatgctattgggtggttacaacaatgcgagaagttctttgaaatgacaggaacaccagtagagcaatgggtgaatttagccactgggcacttggtaggaagagctgggaagtggtttagaaatcttgggataccatggcattatattaattggccccaattttacttgatgatttcagatagatttactgaggcaaatgcacacgaagctgtggagcagttgcagaatgtgaggcagactggttctgtcatgcattatattgataaatttgaggatagtgttgcattggttaaaagggatcatccctatctgattgagtattatattttgagctgctttattgggggtcttagagctgatatcaaacatgatcataagtgcaggacagggaaggtgatacatatgatggaagaagtagaggatgaagaagaggaatcaggaagtcctgaagaaaaccaggaaggggaatatcaaacagcacctggaagtcctgctaagaaagaagatgataatgaagaacaactgatgcagatttctactcatgcaatacagggtacatatggaatcaatacattctctttgattacctatgttaaaggaaggaaagttgtggcattggttgacagtggtagcactaataccttcatgaattatgaatttgcattgagaagtgggtgtgaaatcatagaatttgaccacaatagagtcatggtagctgggggaggaatacttaattccacagctaaaaccgaggtgatccagtacaaggtccagggatatcttttcgtacatactctcaagactttggagatggagaatgtgccagtccctgattctgtagcaactatcctagctggatttgcagaggtttttgctgagcccaaggggttaccacccagaagagaatgtgatcatgctatcccacttaagatgggagctgaaccccctaatcagagaccatatagagtaccacaccagcagaagaatgcaatggaggaaattataaaggaactcctggagtctgaagagattaggcccaatttgagtccttactcttcaccagctgttatggtcagaaaaagggatggcagctggagaatgtgtgtggactatagacaattgaatgcaagaactattaagaacaagtttcctatgccaattgtagaggacttgctagatgagttgaatggtgctaagctggtgagaaaatgtgtactggtattcttcgatgacatattgatttacagcaaaaatctggaagagcatgaaaaacaattgcagtgtgtcctatctattttgagatcccacaagttatatgctaagaggagtaaatgcacatttgcagcaccaagtgtagaatatctggggcatatagtatcaggagaaggagtggcaaccaagcccagcaaaattaaagatgttctagaatgggcagtcccagtgaatataactaagttaaggggctttttgagattgacaggttactacagaagatttgttcaggggtatggtgctatctgtagaccactacatgatttattaaagaaggataatttccattggggtcctgaacagcagaaggcttttgaccaactaaagaagattatgactacttgtccagtattagctcttcctgatttcagcaaaccgtttgtattggaaacagatgcttgtggttcaagcattggggcagtactaattcaagagggcagaccaatagcttattatagcaaagctctggggcagagagcagcagggtcatccacttatgaaaaagaagcaattgccattttggaagcacttaaaaaatggaggcattatttgctgggtaatcaagtgattataagaattgatcagcagagtcttaagtatatggctacacataaactttcagaaggaatacaacacaaattattgctgaaactcctggagcttgactataacattgaatataaaaaagggaaagaaaatgcagcagctgatgcattatcaaggagagacaccaaagaagtggaagagaaggaaaaatgctatgcaatcacattggtctatcctgaatggatagaggatgtgaagagcagttatctaaatgatgcccaatatatgaaattggtggatggggaggaactaaatgaagaatctagcaatttttctttgggtgctggaatactaagatacaaaaacaggatatatgttggcagtactactaatatcaggaacaaactgatacaagctttccacaaatcagcttttgggggtcattctggagttaaagtcacttaccaccgaatcaagaagattttctattggccacagcttaagaaggaagtggagaaaattgtctctgaatgccccacttgccagattacaaaagctgagcatgttcattctcctggtcttctagatcctctgcaaatacctgaaatggcttggacacatatttctatggattttattgaagggctgccaaagtctcaaggcaaagatgtcacaccgtatgaagcactatatggtgtacatccacctcagaatggggagcaagctatccctggaaatgtaactgaagaaatcagaatcactgctcaacagagagaagagttgatgttgagattgaaagataacttgttgagggctcagaatcgaatcaggaaatttgcagacagacttaggtctgaaagaagttttcaggagggagacatggtgtatctaaagatgcaaccttatagacagaacgcttttggcttgaggggatcactgaagcttcgtgcaaagttctatgggccatttagaatcctgaaaagaattgggaaagtggcttaccatctgcagttaccggaggaagctggaatacatccagtgttccacgtaagccagctgaagaaacatgtgggaaatttggttgtaccacttcctaatcttccattggtggatgaagatggtaacatcaagactgaacctgtcgctgtactagcaagaagggtagttccaagaagaaatgagccggtcactcaatggcttgttcactgggaaaatctatctcctgaggatgctacttgggaggactctgcttttattcaagcaacgtttccacattttcgaccttga

SEQ ID NO: 11633 - DNA, 4134 bp, Oryza sativa
  Clone ID: TFbOSC400920j.C1.o23.fg
atgccggctcgcaccaggtccgttaacagtttggatagtgtggatggatttgacgctagagctgagatcctgcagcttaggcgggagatgacagatctgagtaatctgagaggtgagatgggagaaatcaaggaccttttgaagagtatttgcacagctctacctggatttcactctgctggtgcgagtactagtgggacggctggtgcaggtggatctgcagggacccaggctatggctggtgcaagtgtatctgcaggagcacaggctgctactgggacaggggctttgattgcaccattagttccccctggattttcatcagtggcaccaattttatctacgggaggaatgcagtcaggagtggctctacctcaaactgctgatgagactcaggtaaactcaactaatgcaattccttccagtcagatacatgctggtatgggaagtgtttttccatcaacaagtcttccaccaatttttccaatacacatgtctggtgctgttccttctgttggacatgtgaatttttctattgagccaaacactgttaacccaaattttgcaccaatattcacctcagcaccaatattcacttcagctactagaactcaggctggtcatttacctggggggttaaatatacatggagtggagtctcaggaggatgtgggaatgaatcattatggaatagaaacaaaccagccatggaggtatccgcagatgcagccaacagccagacctcatctgaatgctacagggatacatatggcaaatggaggaggacctgtttggccagaaggacccagacatctgtttggtgggatgcctaatccatatgctgacatgacactaagaagccagaggttggagttaacaatatttaatggagaagatgctattgggtggttacaacaatgcgagaagttctttgaaatgacaggaacaccagtagagcaatgggtgaatttagccactgggcacttggtaggaagagctgggaagtggtttagaaatcttgggataccatggcattatattaattggccccaattttacttgatgatttcagatagatttactgaggcaaatgcacacgaagctgtggagcagttgcagaatgtgaggcagactggttctgtcatgcattatattgataaatttgaggatagtgttgcattggttaaaagggatcatccctatctgattgagtattatattttgagctgctttattgggggtcttagagctgatatcaaacatgatcataagtgcaggacagggaaggtgatacatatgatggaagaagtagaggatgaagaagaggaatcaggaagtcctgaagaaaaccaggaaggggaatatcaaacagcacctggaagtcctgctaagaaagaagatgataatgaagaacaactgatgcagatttctactcatgcaatacagggtacatatggaatcaatacattctctttgattacctatgttaaaggaaggaaagttgtggcattggttgacagtggtagcactaataccttcatgaattatgaatttgcattgagaagtgggtgtgaaatcatagaatttgaccacaatagagtcatggtagctgggggaggaatacttaattccacagctaaaaccgaggtgatccagtacaaggtccagggatatcttttcggtaaagcattccagttgattcctttaaaggggtatgatattgttttgggggcagactggatatatgagcacagtccaattaatttggacttgaagcagagaactctgacaatgaacaaaatgctggacaaaaatgttatggggtttgtaattgaagtacatactctcaagactttggagatggagaatgtgccagtccctgattctgtagcaactatcctagctggatttgcagaggtttttgctgagcccaaggggttaccacccagaagagaatgtgatcatgctatcccacttaagatgggagctgaaccccctaatcagagaccatatagagtaccacaccagcagaagaatgcaatggaggaaattataaaggaactcctggagtctgaagagattaggcccaatttgagtccttactcttcaccagctgttatggtcagaaaaagggatggcagctggagaatgtgtgtggactatagacaattgaatgcaagaactattaagaacaagtttcctatgccaattgtagaggacttgctagatgagttgaatggtgctaaggtattctccaaactggatctgagatcaggcaaaaatctggaagagcatgaaaaacaattgcagtgtgtcctatctattttgagatcccacaagttatatgctaagaggagtaaatgcacatttgcagcaccaagtgtagaatatctggggcatatagtatcaggagaaggagtggcaaccaagcccagcaaaattaaagatgttctagaatgggcagtcccagtgaatataactaagttaaggggctttttgagattgacaggttactacagaagatttgttcaggggtatggtgctatctgtagaccactacatgatttattaaagaaggataatttccattggggtcctgaacagcagaaggcttttgaccaactaaagaagattatgactacttgtccagtattagctcttcctgatttcagcaaaccgtttgtattggaaacagatgcttgtggttcaagcattggggcagtactaattcaagagggcagaccaatagcttattatagcaaagctctggggcagagagcagcagggtcatccacttatgaaaaagaagcaattgccattttggaagcacttaaaaaatggaggcattatttgctgggtaatcaagtgattataagaattgatcagcagagtcttaagtatatggctacacataaactttcagaaggaatacaacacaaattattgctgaaactcctggagcttgactataacattgaatataaaaaagggaaagaaaatgcagcagctgatgcattatcaaggagagacaccaaagaagtggaagagaaggaaaaatgctatgcaatcacattggtctatcctgaatggatagaggatgtgaagagcagttatctaaatgatgcccaatatatgaaattggtggatggggaggaactaaatgaagaatctagcaatttttctttgggtgctggaatactaagatacaaaaacaggatatatgttggcagtactactaatatcaggaacaaactgatacaagctttccacaaatcagcttttgggggtcattctggagttaaagtcacttaccaccgaatcaagaagattttctattggccacagcttaagaaggaagtggagaaaattgtctctgaatgccccacttgccagattacaaaagctgagcatgttcattctcctggtcttctagatcctctgcaaatacctgaaatggcttggacacatatttctatggattttattgaagggctgccaaagtctcaaggcaaagatgtcacaccgtatgaagcactatatggtgtacatccacctcagaatggggagcaagctatccctggaaatgtaactgaagaaatcagaatcactgctcaacagagagaagagttgatgttgagattgaaagataacttgttgagggctcagaatcgaatcaggaaatttgcagacagacttaggtctgaaagaagttttcaggagggagacatggtgtatctaaagatgcaaccttatagacagaacgcttttggcttgaggggatcactgaagcttcgtgcaaagttctatgggccatttagaatcctgaaaagaattgggaaagtggcttaccatctgcagttaccggaggaagctggaatacatccagtgttccacgtaagccagctgaagaaacatgtgggaaatttggttgtaccacttcctaatcttccattggtggatgaagatggtaacatcaagactgaacctgtcgctgtactagcaagaagggtagttccaagaagaaatgagccggtcactcaatggcttgttcactgggaaaatctatctcctgaggatgctacttgggaggactctgcttttattcaagcaacgtttccacattttcgaccttga

SEQ ID NO: 11634 - DNA, 5454 bp, Oryza sativa
  Clone ID: TFbOSC416668j.C1.o17.fg
atggagaagagtggccgccggccatctcgctcttgcacgcgctcgccggtaagactagggagctcgcctagctccttcccaccggtcgtcgcccttgtccccgatggctgccgtgtcagggactctccactgtcaactgttgagggtggtgccattggcgggaaggatctgaatgcagaagaggaggaggacgtccagacttctcaaagcgacatctccacaggcaatggtcatcggccggttcgggagcgtaggcccaacccaagagtgttaggccctgaatgggtggcgcgtaggcggcggcggctcgatcctgtcggatctgagaggaaataccacatagttgccacaatttcgcatatatctgagttgttcttgagagtccctaacaatctggtatcagagccattcgcgctgcaaaatcctcttggtttagccgtaaaatttccgggagagaggtgggatcctgctaccttggtggcgtgtgatccacaaaagcttcggctccctcaatctgagaatgaaaggaagagagaggaagcggaggtccgaaccagggcggagtacctggatctgaagaagtcggtggaatctcgtattccggcggtggagaagagggtagaagatctgggcgcctcgctgcagtcgctgagtaccaaggtcgagcacctcgagggcagtctgatgcgtcacaccaagttggagccagatgctagtactgccaagactgggggatctggaattatcaaggaagagcagaaccaacccaacacagatctgacttccccttctttcggtatgaatgaaaatttttctctatcccgtgctccttttggatttgaacctagaacaccttctcttgacagtggaattgctagttacaatttgagtagcactattcctcccatgacatgcccccagttttgtggtgacaacccacagatgtggaaggttaattgcgaacaatattttgatgtgtttggtatccagcaaattcattgggttaaaattgctactctcaatttttgtggtaatgccgcattttggttgcaatctgtccgaaatcagcttggtggtattacttgggtgggtctctgtgatttagtgtgttccagattctctaaggatagacaacaagctcttattagacaatggttccatatcagacaagatggttcagttgctgaatacgttgagaaattcgatagtctaatgcatcagctccttgcttatgataattctctattgccagtctattttgtcactaaatttgtggaagggcttagaagtgatatcagagttgtagtcctagttcagagaccccaggatatggactcagcttgtgctgtggccttacttcaggaagaggccttggagggtgttcagtctactcagtataaaaaacctgacacctcaatacctattcgcaatagtcacaagggtgctggggttcttccatccaccttgccacctaaacaattgttatcaccacaatctgaagataggaggggcactgaatcagcaagagcaagagatgataagctctctgctctaaaggcttacagacgatccaagggactctgttttacttgtggtgaaaggtggagtagagaccataagtgtagtactgctgtgcaattacatgtggtccaagaattgctagatgccttgcaagatgttaaaactgttgaggtgtctgatggggaacagtttctgcactgtgaggacaccagtgatttaatggctatctctcagcaggctatctggggtacagaatctcctaactcattcagattaagaggatgggtccagggtactgaattacttatgcttgtggactctggtagtacccattcctttatggaggaaagtattggtctcaaattggctggagttaaacccttgagaagcaagttatctgttaagttggctgatggcgaaactctttcttgctcatatgaagttaccaattgtaggtggtggatgcagggacataactttattaacaatttcaggctcctgaaccttggtggttatgatatcattctgggcatggattggctggaacaattcagtccaatgcaggttaactgggtggacaaatggatggatatcactatttctggacagcctgtcaggttgcaaggtattgtatcccaggtttctcattgctctcctatttccacagaacaatgtctgggtatggtcagacaaggatctctcatgtatttggttcaactcacttcttctgaccctgtgactaaggaacccattcctgctgctgtacagcaacttattgattcatttcaggcagtttttgctgaacccaatggactacctcctaaaagatattgtgatcataccattcctcttgtccctggagcagcccctgttaacttgagaccttacagatttaatccagctctcaaggatgaaattgaacaacagatttcagatatgcttaagtctggggttatccaaccaagtcatagtgccttttcttccccagcccttctagtcaaaaagaaagatggtacttggagattggtgattgattacagaaagctgaatgctatcactgtcaaaggtacttatcctatgcctgttatagatgagttgcttgatgaacttgctcatgctaaatggtttactaagcttgaccttagagctggataccaccaaattcgcatggctcctggtgaagagtataaaacagcttttcagactcatactggccattatgagtataccgttatgtcctttgggcttactggggcacctgccacttttcaaggggcaatgaatgagacattgagtcccgtgcttaggaagtttgcacttgtgttttttgatgatattcttatctatagccctgatttctcatctcacttggaccatattgctcaagttctctcactcctctccaagcatcagtggtatgtcaagttatccaagtgttcttttgcacagaaacaactgacatacttgggtcacactataagtgcagctggagttcatactgaccaaggtaagattcaggaggtagtgaactggaaggtgcccactactgtgaaaaaacttaggggttttctgggtcttgctggttactaccgcaaatttgttaagggatttggagttatcagtaagcctctgactaatctcttgcgaaaaggagttcctttcatttggactcctgaaactgatgctgctttccataaccttaaacaggctttggtttctgctcctgttctggcattacctgactttcaaaaggtgtttacagttgagactgatgcttctgattccggcattggagctgttctctctcaagatggacacccagttgcttatatcagtaaggctttaggtcccagaactaaaggtctttccacttatgaaaaagagtgcatggcagttttactggcagttgatcaatggagatcttatttgcaacttggtgactttattattctcactgatcatcatagtttaatgcatctctcggatcaacgtttgcatacaccatggcagcataaagcttttaccaaactcctgggtctatcttataagatttgttacagaagggggtctcataatggggcagctgatgctttatctaggaaatttcagcatgatgaggaagaattatgccacatttcagcctgtactccaacctggctccaggaagttaccacagggtatgccagtgattcttattccagtcagttgctcactgaattaactgtacagcccaatgcaagaaaacatttctctcttcatgctgggttgcttaaatataaaggaaggatatggattgggaataacagacagctccaattgaaattactaactgaagttcattccaatccaattggggggcattctggtttccctgttacttataggaaactaaagcaactttttgcttggcccagtatgaaaaaaatgactaaactatttgtgcagcagtgccagatatgtttacaggctaaacctgatagagctaaatatcctggtctccttcagcctttacctgttcctgagggtgcttggcaggtggtctctttggattttattgaagacggccaaacagaaagggttaatcaatgtctggagatctatctgaggtgctttgttcattcagctcctagcaagtgggcagcttggttacatcttgcagaatattggtataatacctcatatcactctgctgtccagtctactccctttgaagtgctctatggtcattccccttgtcattttggcatcagtttacaagattgtgccattcctgatttacatgtttggttaaaggaaaggcagttgatgcagaagcttgttcaacagcatcttcacagagcacagcagcagatgaagcattttgctgataagaaaaggagttttcgtacttttgctattggagactgggtgtacctcaaattacagccctatgttcaaacttctgtggctgtcagagctaatcacaaattggctttcaaatattttgggccatttcaaattacagcacagattggaactgttgcttataaattgcagttacctcccaccagttctatacacccagtttttcatgtgtctcaattgaaatctgctactggctttacaggacatgttcagtctcatctgccatcgtctatctctgccttgcaagttccttggcgcattctggacaggcggcttgctaagaagggtaattctactatctctcaagttttggtgcagtggtctgagtcccctccagaagatgccacttgggaagactatgaagaattgcatgctcgatttcctgctgcattggcttgggggcaagccaattctcaaggggtggggcttgtcagggactctccactgtcaactgttgagggtggtgccattggcgggaaggatctgaatgcagaagaggaggaggacgtccagacttctcaaagcgacatctccacaggcaatggtcatcggccggttcgggagcgtaggcccaacccaagagtgttaggccctgaatgggtggcagctgacaacgacaagttgctgcgcccactcgccgtacatggcgcgcgccatgggcacgccgacgacgagcgagttggtcagcgtggacagcgagaagctggtgatggaccagcgacggcgcagccgcctttgctcatgaaccgtgcccagacgccgatgacggcgatgggttcgtctggactagattcagatcccttgggatccaccaagagaggcttgagctcggcagaggcggcgagggggtcgggtgaggcgcgggcagcacgaagtcgagcggcgaggtcgggctacgaggaggcagcggcgaggtgctcctgccgctcgtggagctcgtcgcgggcggcgaggaggcggtcggagaggcctggggacgaggagagcggcgcgagcgccaaagcgagagaggaaaggggagagagatga

SEQ ID NO: 11635 - DNA, 4392 bp, Oryza sativa
  Clone ID: TFbOSC400800j.C1.o14.fg
atggccgagcccaccatcgccgacctcttgaaggagatcaagaacatgtccgccgaactcacctccctgaaggccgatatggcgaccatgaaggacaaggcctcgacggccgcaagcaccgagactcgccaccctgatgggttgcgcgacctcgacctgcctccccggcccaagaagtgggattttccccgctacgacggcaccacggatccgctgctcttcctcaacaaattcgaggcgtacttccgtcaccaccgtaccatggccgaagagcgcgtcggcatggcgtcctaccacctggacgacgtcacgcagacttggtacacccagctgctcgaggatgagggaaccccgacgtgggggcgcttcaaggaactcgtgaacctgcgtttcgggccacccctgcgttcggccccgctcttcgaactttccgagtgccgacgcacgggaacagtggaggaatactccaaccgcttccaggccctcctgccgcgcgcgggtcggctcgacgagtcccagcgcgtccagctcttcaccggcggtcttctgccgcctctcagccacgccgtccgcatccaccatccggagacgctcgccgccgccatgagcctggcacgccaggtggagttgatggagcgtgatcggccggcgccacctccactacgtgctccgccgcgtgggctgctacctgcgcctgcgccacggctcgcgttacccgcgcccgcgcagcagttggcgctgcctgccccaccagcggccgccccacagggtcgcgacgcggccaacccacggcgcctgacgccggaagagatggccgaacgctgccgccaaggtctgtgcttcaattgcaacgagaaattcacccgtggccacaacaggttctgccgtcgcctcttcttcgtcgacggggtggagatcgacgacgtcgcaatcgagggtgacgcggcggccgccgccggggatacggaggcgcccgtgttctccctgcatgccgtcgccggcgtgcccatcgcggacacgatccagctccaggtgaccgtcggcgatgcctccctcctcgccttgctggatggaggctcgacgcacagcttcatcggtgaggaggcggcaaggcgcgccggcctcccgatccagtccagcccgcgcatgacggccatcgtcgccaacggcgaacgcgtggcctgccctggtgtcatccgggacgcggcgttcaccatcaacggctccacattccacaccgatctctttgtgatgcccctcgcaggtttcgacgtggtgcttggcactcggtggctcggcacgttgggtcccatcgtgtgggacttcacctcccggtcgatggcgttccagcgagacgggcaacgcttcgcctggaagggcgtggcctcgacctcaacaacgcacctgcgtaccctagccgcggccagtgggacgctcctggatgagctcctggtcgcctatgaggacgtcttcggcgaaccgacgggcctcccacctccacgtggccgcgaccacgccatcgtcctcaagcctagctccgctcccgtggcggtccgtccgtaccgctacccagcggcgcacaaggacgagctggaacgccagtgcgccgcgatgatcgagcagggcgtcgtccgccgcagcgactcgcccttctcctcgccggtcctgctcgtcaagaaggccgacggctcgtggcgtttctgcgtcgattaccgcgccctcaacgccctcaccgtcaaggacgcgttcccgattcccgtcgtcgacgagctccacggcgcccgcttcttcaccaagctcgatctgcgatcggggtatcaccaagtgcggatgaggcccgaggacgtccacaagaccgccttccgtacacacgacggcctctacgagttcctcgtcatgccgttcgggctgtgcaacgccccggcaacgttccaggcgctgatgaacgacgtgctccgaccgtttctgcgacgcttcgtgcttgtcttctttgatgacattttgatttacagtgagacttggaccgaccacctgcggcacctgcgtaccgtcctatccgtgctccgtcagcaccggctcttcgtcaagcgcagcaagtgcaccttcggctccccctcggtgtcctacctcggccacgtcatatccgaggcgggcgtcgccatggatccggccaaggttcaggctatccacgagtggctggttccccgttcggcacgggcggtgcgcagcttcctcggcctcgccggttactaccggaagttcgtccacaactacggcaccatcgctgccccgctgacggccctcaccaagaaagacgggttctcctggacggaggacaccgccgctgccttcgacgcccttaaggcagcggtgacttcggcgcccgtcctcgccatgccggacttcgccaagccgttcaccgtcgagggcgacgcgtccacccacgggttcggcgctgtgctggtccaggacggccaccccgtggcgttcttcagccgccccgtcgtgctgcgtcatcgtgccctcgctgcctacgaaagggagctgatcggcctggtgcacgccgtacgtcactggcggccgtacctctggggccggcgcttcgtcgtcaagaccgaccactactccctcaagtacctgctggaccagcgcctcgccaccattcctcagcatcattgggtgggcaagttgctgggattcgacttcgccgtggaatacaagccgggcgctgcaaacactgttgcggacgccctgtcaaggcgcgacacggaggagggcgccatcttggcactgtctgcgcctcgctttgacttcatcagcaagctgcatgacgcgcagcgccaggacccggcgctcactgccctccgcgacgaggtcagcgccggcacgcgcacgggcccctgggcgctcgtcgacgacctgctgcagtacaacagctggttatacattcccccggcatcgcccttagctcgggagatcatcgaggctacacatgaggacgggcacgagggtgtcaagcgcaccatgcaccgcctccggcgcgagttccacatccccaacatgaagcagctcgtccaggactgggtacgctcctgcgcagtgtgccaacgctacaagtccgagcacttgagcccggccggcctcctgctgcccctgccggtgccccagggcgtttggaccgacatcgctctagatttcatcgaggcgctaccacgagtgcgcggcaagtccgtcatcctgacggtggtggacaggttcagcaaatactgccacttcatcccactggcgcacccgtactccgccgagtccgtcgctcaagccttcttcgccgagatcgttcatctacatggcgttccgcagtccatggtgtcggaccgcgaccccatcttcacctcgacgttttggcgcgaactcatgcggctgatgggcaccaagctgcacatgacgacggcattccacccacagtcggatgggcagtccgaggctgctaaccgggtgattattatgtacttgcgttgcttgacaggggaccgtccacggcaatggctgcgctggctcccatgggcggagttcatcttcaacacggcgtaccagtcctcgcttcgggacaccccgttccgggtcgtctatggcagggatccaccctccatccgctcctacgaagcgggggacacgcgggtcgccgccgtcgccaaaagcatggaggagcgggctgagttcctctttgacatccgctaccggctcgagcaagctcaggcggtccagaagctgcactatgacaagcaccaccgccacgttgcataccaggtgggcgactgggcgctcctccgcctgcgccagcggcccaccacgtcgctccctcagtccggcacgggcaagctgaagccccgcttctatgggccataccgcatcaccgagctcatcaacgacgtggccgtccgcctggagctaccggccggcgctcgtctccatgacgtgttccacattggcctgctcaagaagttccacgggccgccaccgggtgcaccaccggcgctgcctcctctccatcacggcgccatcgcccctgagccggaacgtgctgttcggtttcgtttggcgcgaggcgtgcgccaggcccttgttcagtggaagggcgagtctccggcttcggcaacttgggaggacatcgaagttctccgtgccaagtaccctgcccttcagctcgaggacgagctgagtctcgaggaggggggagatgtcatgtgggggaagacctacaccaggagacaccgagccagagatgtgcgccgggcagcagaacgtgcgggcgcacgcatggacgcagaacgcgcggtgatcgcgggcacggcgcatgcaaccgaggatgaagcgatcagcgcaagtggctga

SEQ ID NO: 11636 - DNA, 4275 bp, Oryza sativa
  Clone ID: TFbOSC900060j.C1.o13.fg
atggcggcggcggaaactgagttgggagatctgagtcagaaggtggtgaatctcacaagcaacctcaacaacatcctgggatcactcaccaagctggagacatggattccggcggttgatgtgggaattcaaggtttgaacaatgtggtggaggagatctcagcaagggtgacgaagctggagagcatgctagcgacggcgacgttcgcggcggctcaaacgcccgtaggacccgacaatgttgagaatcaccagggcaacgcatccaaagcccttgtggctcatgagcgaaccctggtcaagggtaagtctcggttgccgatttcccccgtcaatttcgatttgggtgaagcgtctgtgcagagtcagtttagcagtcgatccagtagccctagattgccaaaaactaatttcccaaggtttgatggagataacccaaaactgtggaagaagaactctgaaaaatactttgatatgtaccaagttccctatgatagttgggcaaattttgctactctgcactttgtgggtaatgctgcactgtggttgcaaacttatgaggctttgcatagtgttgagacttggcctgaactttgtgtagtagtgcataataagtttgggaaagataaatatcaggagcacttagaggagttagagagtcttaggcaaaccagtggggttgatgcatattatagcaaatttgaggagttgatgcacagagtcttagtgtataatcaggcttttgatgagacatattttgttaccaaatttgtgggtggccttaaaactgaaatcaaagcagcaatcaagctgcataaacctagaactgttgatgcggctttgtctcttgctaaaacgcaggaagatttggcgttggagataaagaaaggaggtcagaagtccacttataaggaaggatttaaatcaacagctttcagggtaaactaccaaggcaaaggtatactgggacaagctcctgatgacaccaccaagacagaagaaaagccaaagtgggaggattgctttgagtctctcaaggctgccagaaaagcaaagggagaatgttttaagtgtggtgagaaatggggaccaggtcacaaatgtccaaaatatgtccaacttcatgtccttgaggaattattggaagtgtttcaacttcgtgaggatgacgaggtgtgtcagaatgaagaggctgagagtagtgaagaggaacttgttgtctcagaatgtgttgtgtctggaactatgggaaagaagaccatcaggttgcaaggattgatacagaatcatgaagttctgattctcattgattcaggaagctccaacagtttcatttctcaacagttggtggaaaagttggggttggctgttacagatattcctttatctcaggtgataattgcggatggtggggttatgcagtgtgataagttggctataggggtggagtggtggtgtcaaggacacagtttcacaaatgaccttaaggttctgaaactgggtggttatgatatcattttgggaatggactggttggagcatcatagtccaatgtggatacattggcagaggaaaaagcttaggtttacataccagggaaagagaattaatctagttggggtgaaggaaaatttgtctgattgtaaatctgtcacttccaagcagttgaaaggaatgcttaagactggagcagtttcccaagtggttcagttatgctcaattgctgaagaaagtttggagactgaactacccccaactattagtgcagtcttgaaggaatttcaagaacagttcaaggcaccttcaggactaccacctcacaggagttttgaccatagcatacctttactgtcaggatctaaaccagtcaatgttaaaccctacagatatgctcccaagcaaaaggatgagatagagaggcaggttaaggaaatgttgctccagggcatcattaaacccagctcaagcccatttgcttctcctgtgttgctggtgaaaaagaaggatgggacttggagattttgtgtggattacagaggtttgaacgatattacagtgaagaataaatatccaatgctagtggtagatgagttgcttgatgaattatcaggggctcaatggttcacaaagttagacctcagatcgggttaccaccaaattcggttggtccagcaggatgaacataaaaccacctttaagactcatcaagaattgtatgaattcagagtaatgcctttcggattgactaatgcaccagcttctttccaaggactcatgaacacaatctttgacaaaatgatcagaaggaatgtgctggtatttgtggatgacatactagtttacagtaaaactctcgaggaacatgtgcaacatttgagggaagtctttgcagttctgcagcaacacaaattgtttgtcaaggcaagcaaatgttcatttgctaaacaacagttggaatacttgggacacataattggagctcaaggtgtggccacagatccttccgaggtacatgctgttcaagattggctagttccaaggaatctcaaacagctaaggggttttttgggactgacaagctattacaggaagttcataaaaaattatggaattatgaccagacccttaactgcattgctcaagaaaggggtgcctttcaagtgggctgaattgcaacaacaggcatttagtcaagttaagtgggctatggttcaagcacctgtgttggctttaccagatttttcccaggaatttattgtggaaactgatgcttgtgataaaggaattggggctgtgctacttcagaatgggcacccaattgcttatttgagtaaagctttaggggttaaagctcaagcattgttcacttatgagaaagagtgtcttgcaatattgatggcagttaacaaatggagagcttatttacagaacaatgaatttgttatacagactaaccacaagagtcttacacatttgggggaacagaaattgactactagcatgcaacacaaagcattcatcaagttgatgggtttgcaatataagatcagatataaacaaggggcagaaaacagggtggctgatgccttatctaggagggatgcagatgaggagttgtcggcaatctctgttggaagacctaaatggttggaatctgtggttgattggtatgatcaagatgaggaggcaaaacagttgctggctcaactgataatcaatctagtaggggtagaacatttcaccttgactaatggagtaatcagtgggctaggaggacattctagaataacagccacctataatagaattaaaaatctattctattggccgggaatgaaaaaagatgtttaccagtatgtgtcatcctgtgacatctgtcagcaagccaaacctgaacattgtaagagtcctggtaaactacagcctttaccaattccagagcaagcttggtcaaccattagcatggattttattgaaggtttacccaagtcagaaggctttgatacaattcttgtagtggttgacaagttctcaaaatttgctaagtttatacctctcatcctttcacagcactacaagttgccacagcttttatcaagaatgtttatgatacatttgggatgccacagtgctctgaagaaatctccctatgaagtgctctttgcaaggaagccaactccttttggtcttattgatgttggaaaaagtacagtccctgatgtgcaaatttggttgcaaaacagagctcatatgaatgaggttctacatcaacaactgactagagcacaacagaggatgaaacatcaggctgacaagcatcgttctgagagggtttttgcagttggtgacatggtttatttgaaacttcaaccatatgtgcaaatgatagtagcacgaaggagttgtcaaaaactgtgtttcatgtactttggcccctacaagattctggaacgtatcggtgaagtagcttatcggctggatcttctccagagtagccaaattcatccattagtgcatgtgtttttgctcaagaaggtgattcattctggcatacaagtccaggcggatcttcctgaaaactgtgtttctgaagaagctgaggtggttccagaagaaatacttagtcgtcaactcattaagagaggtaattctgcagttccttacgggttaattcgctggactggtttacctgcatcgctggctacatgggagaatctgcgtcaacttcagcttcgttttccaggagctccggcttggggacaagccgtttcttaa

SEQ ID NO: 11637 - DNA, 1515 bp, Oryza sativa
  Clone ID: TFbOSC401061j.C1.o30.fg
atggcgcgtgggaagaatcacccggacggggaggaggaggaggcgccggcggcggcgggggaggaggaggcgccggtggagatggacgaggagggggagatggaggaggaggaggaggaggagcagggggagggggagggggaggagagagacgaaggggaggaggaggaggagtgggaggatgcggaggaagtggaggggggagaggagagcgagcaggcggcggcggaggaggaggattcgccgctggtggtggtggaggccgaggcggcggcgcctgtggtggatggctccccgccgaagctggcggaggggtactacgagatcgaggacatccgccgccgccgcctccgcaaggggaagctccagtaccttgtcaaatggggttctcaatgggagggtggggcatgggacctcgcagccccggagctgtcaggaaggataagaacagaggactggaaagaccaagaggaaataacttattgtttgcctaaacaagtgcgtgttgatgtggaccatgtggtaaaagtgcccaggttgagaatggctgtggacactcatattgccatatttgggacaatacacctctacgagttcagctatgaagaccaagaacaggattgcgttcagaagaagcagcagtacggcaggcgtggatggccggaaagtgctaacacatgggagcccctagaaaacctgagtgcctgctctgacattattgatgctttcgagatgcggttacaatctccaaggcccggtcggaagcgtaagcggaagataacaactactccagtagcaggctcaaacccatctcatggtaaacggggccgccctcgcttggatgctaagtcccacactcgagctcctgcaccagaacctaagcaactgccctgtcggacaagttgtaggagagcgactaattgtagtagtaagacagttgcagggcttgatgcgtcagggagtgtggtgaggaaccagcttgcacagaacattgtacaggagggtagttccagtgtgatttcaaggacaccatgtcaggagctaccgctctcaattaggttgacggaccaacaaaacgagcatcaccttgtgaatggttcgtctaattctgagaacttagtgaaggtacctccatctcagggtggccaggtaactggtgccaagaagcgtaaatctggaaatgtgaggaggtttgagcagaataaaccaacacaaggacaaggagaatgtggagcattagtggtggctgaggatgttggttccactgaaggagaaactggcgataagaaaaagacagagggctgtcctaaccgagttcatatcaccaagatcatcaagccagtgcgatttgcagcagctgtgaacaacgatgtgcagcaagtttcaattacattcaaagcactcaggtctgatgggcaggaagtcatggtggacgacaaagaattgaaagcaaataatcccttgctgcttattagctactacgagcagtgccttcgttataatccgacttcgtga

SEQ ID NO: 11638 - DNA, 8799 bp, Oryza sativa
  Clone ID: TFbOSC400390j.C1.o75.fg
atgacgaagccatcatctaagacggaggtggagccatctcatgtgataccggtcacattggatgactttgaaggagaggatcgtaaagccatggaagagcacatcaacgagctcacacgggaggcgttgatgagagcaactactaggactcgtcaaggcgtgatcatcaagcccgggccacgtcccaaactcgctcccgacatggaaaaggttgatgggtttttaaggaataggctaggttctcttatggatgattacacattaaaagataaagcctataccactgttagtcaatctcccatagatccaatagggtctaaaaccgacggagcggcgttcacggccggtccgaccgggcctgatggccggggatatcctcccgatactaggcaaggccaatataatcatattgcgtcacaaactcaacctattaggccaccaaacccaccaccaaatccacaagggcctaataacatggaggatatgattagtgatattatgaggaatagattcgggatcgaaactaggaatcgtgctagagcttacaaaaagccatatcccgattattatgataatgtgtcgtttcctagaaattatagagttcccgaattttccaaatttagtggtgaagatgttgattactctgatgctagtgatagtgaggaggagggtgatcatgatatttatgttgccgaatggtcatggactaacaaaaataaaccttttgtttgttctaacttaatgccgactcttcgtaaagatcggcaaagtgaggttaaatatagttttgatgtggctaagtgtgataagattttgattatcttttgcaagagaagcaaattagattacctaaaggccatgtcataccttctcaagaagcgtcgagcatattgtaaatggcataattctcattctcactctactaatgattgcaatgtgtttcgacgacaggttcaatcggccatagatgagggacgattgaaattcaccgatggctccaagatgaagtttgatcatgatccttttccggtgaatacaattaatttcaataataagaaggtgttgattcggccggagcaagccgaatctaccaagggaaagaaagtggtcattggtgagccaaggcctaagatgatggtgccaaagaagcaggagattggcgtttggaaggagaataagggtgaagcttcgacttctaaggcccctagaaagaccaaagtgacttttgatatgcttttggaaaagtatgagaggcaaggtggtgagagggatcacaacaaagggaaaagaccaagatcacctcctagggagcgatttggtcattcgccaagacggtcatgttcacctccatattttcatccacaagacatgtcatggggtccttatccaatgccgccgccgggttatccttatccttactttatgccagggggggcaacgccgccaatgtacaatcatatgccgccaatgagattcaaccaaggatggggaggaccacggaggccaattcatgagcgtttatcttcaccaaacaaaagccgattttatggtaaaaatcgggttaatgaagagaagagggaaggaaagcgcgtcaagatagaagagaggacttcggaggtgattaccatcaagataggatcccatgatgtgcctataccttccgaagatggagttggaaagtccccaagtaaaaagtccgaagccggttctagctcctcgcagtcggccggtctgaccaggccttctggccggtctgaccgcggccatgttgccggtccgaccgggccatctggccggtctgaccgccgatctgacgacggtctgaccgacgcctcaggccggtctgaccgtgtgtctaacgtcgatctaaccggcgcatctggccggtctgaccggcggtctgctgccggtctgaccggtttccagcgccggtttgacgggagagttgcaaaaggcgatgtaagggcttcatcgtcttcaaacaaggttaataaaggacattatttacctcctggaacagagccgaatcctaggtggatgcctaaggatttgacggctacacaaaagagaaggttgcaacgtcttcgggcccaagaattaagggagaaaaaggccgaagagaaaagggataaaaggttcaatgagttgcgaccaccaccattttgtgctatggatgaagccgaggttgcccaattcttattaggtcctaaagacgcggtttttgagaaacccgatgaatcaaaccgtcacatgaagcctctctatctcaaaggccatgttgatgggaagccggtctctaggatgctagtggatggaggtgccgccgtgaacttgatgccgtattcgctattcaagaagttggggcgtgagggtgatgagttgaagaagaccaacatgattctcaatggattcaatggtgaaccaacggaggcgaggggtattttttcggcggagctcaccgtgggaaataagacgctaccaaccgctttcttcatcgtcgatgtgcaagaggctagtttagagtggttacaaaagagggtgcaagaatatcggtctacaaagaacgatattggtgaaactgttgaagattttgatgaagttgagaagcttggacaagggtttacatcggccgatccattggaagaagtagatataggtgatggaactaaaccaaggccgacttttgtacagaaaaacatgaaagccgattataaggttaaggtaatcgagctacttaaagagtatgttgattgctttgcatgggagtaccatgagatgccgggtcttagccgtgagcttgttgagcatcggcttccagttaaaccgggttttaggccttataagcaaccacttcgtcgttttaatcctttattatatgaccgagtcaaagaggagattgatcggttattaaaggcggggtttattaggccatgtcgttatgcggagtgggtttctagcatagtcccagtggagaagaaggggagtggtaaaattagagtttgcatagattttagatatttaaataaagccactcctaaagatgagtatcctatgcctatagctgacctgatgattaatgatgccttgggtcataaggtgattagctttttagatggtaatgtcggctacaatcaaatctttatggcggaagaggatatgtacaagacggcttttaggtgcccggggtttgttggtttatttgagtgggttgtcatgacctttgggttgaagaatgccggtgcaacgtatcaaagggcaatgaatttgatctttcatgatttgctaggtattatcttagagatctatattgatgatattgttgtcaaatcggatggtatggaaggccatatagccgatttgagattagcttttgagaggatgcgccggtatggtttgaagatgaacccacttaaatgtgcttttggtgtgtcggcggggaagttcttaggattcatggtgcatgagagaggagttgagattgatcctaagaagatagaaaaaattcatgatttcaaagcgccgacatgcaagaaagaggtccaaaagttgctaggtaaggtgaattatttgaggaggtttatttctaacctagcgggtaaaatcgatgcttttgttcctatacttcgcttgaaaaaagaagccgattttacttggggggcaaaacaaaaagagacgtttgaagagttgaagaggtatttatctactccacccgttgtgcgagcgcctaaagccggaaagccttttcggttatatgttgcctccgaggacaaagtcattggtgccgttttgacgcaagaggaagatggcaaggaatatatcattacatatttgagccgccgtcttttggatgctgaaacgagacatattgctaggtgtgataattctagagcaaatgacttggcacaacaaacatctggttataatgtaaaaagggggttatttctgatattagaagagccggtgcttgattttaaatttttgcgcaaaattggcaaagttggggaccagaggcggtctgaccgacgttgcacggccggtctgaccgtgaccaggggcggtctgaccggccacatgccgccggggcataggttcgtgctagtcgctacggattacttcaccaagtgggccgaagccgtacctttgaagaatatgactcatacggaggctaatggacaagccgagtcgagtaataagacattgttaaagctagtaaaaaagaagattgaggaacacccgaagaggtggcatgaggtgctttctgaagcattgtgggcacataggatatataaacatggtgccactaaagtcactccttttgagttggtttatggtcaagaagccgttttaccggtggaggtaaatcttggttctcttcgttatatcaagcaagatgatttgtcaagtgaagattacgagacgtttatgggagacaaccttgatgaagtcaccgacaagcgcttgaaggcattggaagagatagagaaagagaagaagagggtggccaaagcgtacaacaagagagtgaaagcaaaattgtttcaagttggagacttgatcgaggtggttggcgactctaggatcaccgcaaagcttaaggtgctgcgatcgtgcttgtcaacttgtcaaaaaagttgccaacagttccagaagatggactttccccgctatgatggcacgaccgatcccctgatcttcgtcaacagatgtgaatcttatttccatcaacaacgcatcatggaggaggagaaagtatggatggcttcatacaacctggaggacgtggcccaattgtggtatatccaactccaggaggacgagggtactcccagatggaatcgcttcaaggacctcctccacctgcgctttggaccgcccctgcgctcagcgccgctgttcgagctcgccgagtgccggcgcacgggtaccgtcaaggagtaccagaacagcttccaggcgctcctaccacgcgccggtccactgcaggaagcccagctggtccagctattcacggggggactccttccgccgctgagtcacgctgtgcggattcacaacccgcagtcgctcgcggccgccatgagcctggcccgtcaagttgagttgatggagctcgacaagccggctccagttcccgcccggccagcgccccgcggcctgctgccggcactgccccagcgcctcgcgctccctgcaccgccggcgagcgcacccgtggccaagatggaggccaaaccggtgaaacgcctctcccaggaggagcaggcggaacgtcgccgcctcgggctgtgctacaattgcgacgaaaagtactcccgtggccataaccgggtctgccgccgcatcttctacatcgacggcgtgacgctcaccgacgccgaggacgccgcgttggacgcggaccaagatggggaggcccctgtcttctctttgcaggcggtcgcaggagtcccgatctgcgacacgatgcaagtccgggtgatgctgggcgcggtcaccctcaccgccctcctcgacaccagctccacccacaatttcatcgccgaggaggcggcgcgccgcaccaacctggccatccagcccaagccgcgcctcacggccacagtggccaatggcgagaagatccagtgcccgggcgtgctccgacaggcgccgatcaccatcgatggagaggagttccacgtggacctcttcgtcatgccgttggcgggatacgatctcgttctgggaacccaatggatggttaccctggggccgataacatgggacttcacggcgcgcaccatgtcgttctcgcgccacggcatggaggttcgctggtccgacgtggcggcgcgcccggagccgactgtcgccgtcatagcagcctcggaggtccttctcgatgggctgctggcctctttcgaaggggtcttcgccgagccatccggtctgccaccacagcgcgctcgggaccacagcatcgtcttaaagccgggtgcgctgccagtggccgtccgcccctatcgttacctggcggctcacaaggatgaattggagctgcaatgtgccgccataatcgagcaaggcattgtccgccgcagcgactccgcgttctcgtccccggtcctcctcgtcaagaagccggacggatcgtggcgcttttgcgtcgactaccgcgccctcaacgcgctcacggtcaaggatgcgtttccgatccccgtcatcgacgagctgctcgatgagctccacggggcgcgcttcttcaccaagctagatctccgctccgggtaccaccaggtgcggatgcggccggccgacgttcacaagaccgcgttccatacccacgacggcctctacgagttcctcgtcatgccgttcgggctgtgcaatgccccggtgacgttccaggctctgatgaacgacgtacttcggccgttccttcgccgtttcgttcttgtgttttttgatgatatactaatttacagcaagacctgggcggatcatctgcgccacatccgcgccgtcctcagcgagcttcagcggcaccagctcttcctcaagcgcgccaagtgcgccttcgccagcgcgtccgtcgcgtacctcggccacgtcatctctgaggcgggcgtcgccatggacccggccaaggtgcaggctgtgcgggattggccggcgccacgctcggcgcgcgcagtccgcagcttcctcggcttggcgggctactaccgcaagtttgtgcacaactacggcgccatcgccgcgcccctcaccgccctcctcaagaaagatagtttctcctggtcaggggaggccgcaacggcgttcgacgcgctcaaggcagcagtcaccaccgccccggtgctcgccatgccggacttctccaagcccttcatcgtcgaatgcgacgcttcgtctcatggcttcggagcggtgctcgtccaggacagccaccctgttgccttcttcagtaggccggtggcaccccgccatcgcgcgctcgcagcatacgagcgtgagctgatcggcttcgtgcacgctgtacgtcactggcggccgtacttgtgggggcgccgcttcgtcgtcaagaccgaccactacagcctcaagtacctgctcgatcagaggctcgcgacgattcctcagcatcactgggtggggaagcttctcgggttcgacttcaccgtcgagtacaagccgggacatgccaatgccgtagcggacgcgctgtcgcgccgggacacaccggaggatggcaccatcttggcgctctcggccccacgctttgacttcgtcgacaggctccgccacgcgcaaaccactgacccggccctcgtcgccatgcatgaagagctcacctcgggctcccaagctctgccgtgggcggccgtggacgggatgatccagtacagcgggcggctgtacattcccccggcctcgcctctgctgccggagctcatggcggctgtccacgaggaaggacacgaaggcgtccagcgcacgctgcaccggctgcggcgtgattttcattttcctaacatgaaacagctcgtgcaggatttggtgcgggcatgccctacgtgccagcgctacaagtcggagcatctacatccggctggccttcttctaccgctgcccgtgccacaaggagtctggacggacatcgccctagacttcgtcgaggcgctaccacgcgtccggggcaagtcagtcattctgacggtggtggacaggttcagcaagtactgccacttcatccccctgtctcacccgtactccgcggagaccgtcgcccaggccttcttcgccgacatcgttcgcctccatggcatgccacagtccatcgtgtcggaccgggacacggttttcacctcccacttctggcgcgagctgatgtggttggtgggtaccaagttgcacatgacgacggcctttcacccacagtcagatgggcagtcagagtccgccaaccgcgtcattgtcatgtacctgcggtgcctcactggtgatcgaccgcggcagtggctccagtggcttccgtgggcggagtacgtcttcaacaccgcctaccaaacgtcactgcgggacacaccgttccgcgtcgtctacggccgcgatcccccatccatccggtcatatgagcccggagacaccagggtggccgccgtcgccaagaccatggaagagcgggataagttcctcgctgacattcgcagccgccttgaacaagcacaggcgacccagaagcgccactatgacaaggcacatcgccatgtcacgtaccaggtgggtgactgggccctactacgcctcaggcagcgcgcggcatcttcactgccacagaccgtcgccggcaagctgaggccccgcttctacgggccctaccgcatcaccgagctcatcaacgacgtcgcggttcgcctcgctctgccaccccgagctcgtctgcacgacgttttccacatcggcctcctcaagaagttccatggctccccgccggatgctccaccgcccctgcctgctgttcaccatggtgccgtggtcccggagccggaacgagccgtcaagacgcgcctcgcacgtggtgtgcgccagctgctgatccaatggaagggagagtccccagcttcggcgacgtgggaagacgccgacgctttcatcgccaagtaccccgacttccagctcggggacgagctggctctcgatgaggggggagatgtcatgtggggccgcacgtacgcgagacgccgtcgcgcgcgtgacgtgcgccgcgctacagagcgcgcccagcgcacagctgaggaagccaccgggagtggctaa

SEQ ID NO: 11639 - DNA, 2171 bp, Oryza sativa
  Clone ID: TFbOSC401613j.C1.o1.np
agtcagttaccaagtggaccccacctaagaccgtgtcacagattcggagttttcttggacttgcgggttgttaccgtcggttcattgaaaatttctccaggattgccagacctatgacttagttgcttaagaaagacgagaaatttaaatagacggccgagtgtgacaagagttttgaggaactcaagaagagattagtgtctgctccagttctgattctgcccgaccaaacaaaggacttccaggtctactgtgatgcgtcccgccacgagcttggatgtgttctaatgcaagagggcagagtggtcgcttatgcctcgtggcagttgcgtccacatgaagggaactatccaacgcatgacctggaattggtagcggtggttcatgctttgaaaatctggaggcactatctgattggcaaccgctgcgaagtatacacggatcacaagagtctgaaatatatcttcacccaacctgatctaaatctccgacagcgaagatggttggaactaatcaaagattatgacatgagcattcactaccatccgggcaaagccaatgtggtggcatatgcattaagcaggaagagctactgcaatgccttatgcaccgaggacgtgtgtaaggaattgcagcaggagcttgaacggctcaacgtgggaatcgtagaacacgggttcgtagctgctctagaggcacggcctacgctcgtggatcaagtcagagcagctcaagtaaatgatccggagatagctgaactgaaaaaaaaatatgagggtcggaaaagcccgggactttcttgaggatgaacatggcacaatctggatgggagaaagattatgcgtgcctgatgacaaagagctgaaagatctgatactcaccgaggctcatcaagctcaatattccattcatctgggtagtaccaagatgtaccaagatctcaaagaaaaattttggtgggccaacatgaggagggaaatagctaaattcgtcacgctctgcgatgtctgtcagcgagtttaagcagaacaccagagacccgcaggattgttacaacctcttcagatcccggaatggaaatgggaagaaattaaaatggatttcataacaggtctgcccaggacatcatcgggccatgattcaatctgggtagtcgtggattgacttaccaaagttgcttatttcattccagtgcatacttcttatacgggcaaaaggttggcggagctctatctctcgagaatcatgtgtctgcatggagtagccaaaaagatagtatctgattgagggagccaattcacttcaaagttctggcagaaattgcaagaggaattgggaacccggctgaacttcaacacagcctaccacccgcagaccatcccgatggtcagaccgagcgggtcaatcaaatattggaggatatgttaagggcttgtgtgcttgattttggtggaacatggtacaaaagcttgccgtatgcggagttctcttacaacaacagctatcaggccagtctacaaatggcgccgttcgaagcgttgtatggccggaagtgccgcacacctctcttctgggatcaaacaggcgaacgtcaactgtttggaacagaagtgttaacggaagcagaagagaaagtcagaaccgtcagagagaggctgagaattgcccagtttcgacataagagctacgcggacaaccgccgaagggagctcacttttgaagcaggggattacgtgtaccttcgtgttactccgctccggggagtgcaccgtttccagacgaaaggcaagttagcaccacgcttcgtgggaccatacaaaatcttggaacgaagaggagaagttgcttatcagctagaacttccatccaacatgatcggcatccatgacgtgttccatgtgtcccagttaaagaagtgcttgagggtacccgaagaacaagccgattcggagcacatcgacattcaagaagatctgacttatgtggaaaagccggtttgtattcttgagaccagagaaagaagaaccagaaataaggttaccaggttgtacagggttcagtggagccaccactcagaagaagaggcaacttgggaaagggaagatgagttaaaggccgcccatccgcacctcttcgccagctcttccgaatctcggggtcgagattctgtt

SEQ ID NO: 11640 - DNA, 3786 bp, Oryza sativa
  Clone ID: TFbOSC17178j.C1.o4.fg
atggtcaacaccaggaatggcagccgtgcagtaggtgagggcagcaacggcgaagaacgcaccgacggtgggcatcccaacagcgcctctggccacggtccaccaccactccccgagaacccgacgctcgcacaagtgatggcccatcagactcagatgatggcggccatgatgcagcagatgcagcagcagcaccagcagatgcaccagaggatgcagcagcaagccgagcagcagcagtttggtccccctccccctcagtccaagctaccagagtttctatgcgtcaggctacccactttctctagcaccaccaaccccatggaggtgaatgactggctccatgccataaagaagaagctaaaccttctgcaatgtaatgatcaggagaaggtcgcctttgccacacaccagctccagggccccgcgtcagcttggtgggacaatcacatggctacccgcccgccaggtacagaagtcacttgggcggagttctgtcgcagcttcaggaaggtgcaggtgccagacggggttgtggcacaggagaagagggaattccggatactccaccagggcaacaggacagtgactgagtatctccatgagttcaatcgtctagcgcgatattcaccggaggatgtccgcaccgacgccgagaagcaggagaagttcctagcaggcctggatgacgagctgaccaaccagttaatctctagagactatgccgactttgagaagctggttgacaaggcaatctgtcaggaggatcagcgcaacaaaatggacaggaagagaaaggcagcgcagttccggtccaaccaaggaagccaccagcgcccgcgcttcactcccggacagcagggtggacctaccaccatgatcgtccgccagcatcgccctttcaactcgagcagcttccaccagggcgccagtggcagccagaatcaccagggaactccatcagcccaagccaagaaggagactggagcaaagccaaggtcctgtttcaactgtggcgagcatggtcactttgctgacaagtgccctaagctaaggcgtgccgggccaaggtttgcccaagctcgtgccaaccacgcgtccgcagaagaggcgcaagcagcaccagaggtcgtactgggtacgtttcctattaactcaatccctacaaccgtacttttcgattctggtgcaacgcattcgttcatttcaaagaagtttgttgggatgcatgggttaagaaaagaagagattagtacactaatgagggttcataccccgggaaatagttcaacctcgatcagttatagcccttcagtgctaatagaaatacaccgatcacgatttctagccaacctcatccttcttgaatccaaagatctagatgtcatccttgggatggattggctgaccaagttcaagggagtcattgattgtgcgaatcgcacagtcaccttgaccaatgagaagggagaaactgtggtgtacaagtcactagtctcaccgaagcaaggaatctccttaaatcagattgaggtggaaaaccttgtggccaccgaggagaagagttcgcggaaattggaagatatccccatagtctgcgagtatccagaagtgttccccgaagacctcactaccatgccacccaagagagagattgaattccgggttgatttggcaccggggaccactccaatttacaagagatcgtacaggatggcagccaatgagctagcagaggtcaagaagcagaagaaggacaggacgaagagaatgtgtgttgattatcgcgcactcaatgaggtcacaatcaagaacaaatatcctttaccgcggcttgatgatttgtttgatcagctgaaaggagctaaagtgttttctaagatagacctgcgatcaggctatcaccagttgagaattcgggaagaggatatccccaagacagccttcaccactcggtatgggttgtatgagtgcatggttatgtcttttggacttaccaacgcacctgcattcttcatgaacccgatgaacaaggtgttcatggaatttctggataagtttgttgtggtattcattgacgacatactcatctattcaaaatctgaagaagaatatgagcaacatctccgtctggtactcgagaagttgaaggagcaccaattatatgccaagttcagcaagtgtgacttctggttgtcggaagtcaagtttctgggtcacgtcattacagctcagggcgtgacggccgagtgtgacaagagttttgaggaactcaagaagagattagtgtctgctccagttctgattctgcccgaccaaacaaaggacttccaggtctactgtgatgcgtcccgccacgagcttggatgtgttctaatgcaagagggcagagtggtcgcttatgcctcgtggcagttgcgtccacatgaagggaactatccaacgcatgacctggaattggtagcggtggttcatgctttgaaaatctggaggcactatctgattggcaaccgctgcgaagtatacacggatcacaagagtctgaaatatatcttcacccaacctgatctaaatctccgacagcgaagatggttggaactaatcaaagattatgacatgagcattcactaccatccgggcaaagccaatgtggtggcatatgcattaagcaggaagagctactgcaatgccttatgcaccgaggacgtgtgtaaggaattgcagcaggagcttgaacggctcaacgtgggaatcgtagaacacgggttcgtagctgctctagaggcacggcctacgctcgtggatcaagtcagagcagctcaacgagttaaagcagaacaccagagacccgcaggattgttacaacctcttcagatcccggaatggaaatgggaagaaattaaaatggatttcataacagttctggcagaaattgcaagaggaattgggaacccggctgaacttcaacacagcctaccacccgcagaccatcccgatggtcagaccgagcgggtcaatcaaatattggaggatatgttaagggcttgtgtgcttgattttggtggaacatggtacaaaagcttgccgtatgcggagttctcttacaacaacagctatcaggccagtctacaaatggcgccgttcgaagcgttgtatggccggaagtgccgcacacctctcttctgggatcaaacaggcgaacgtcaactgtttggaacagaagtgttaacggaagcagaagagaaagtcagaaccgtcagagagaggctgagaattgcccagtttcgacataagagctacgcggacaaccgccgaagggagctcacttttgaagcaggggattacgtgtaccttcgtgttactccgctccggggagtgcaccgtttccagacgaaaggcaagttagcaccacgcttcgtgggaccatacaaaatcttggaacgaagaggagaagttgcttatcagctagaacttccatccaacatgatcggcatccatgacgtgttccatgtgtcccagttaaagaagtgcttgagggtacccgaagaacaagccgattcggagcacatcgacattcaagaagatctgacttatgtggaaaagccggtttgtattcttgagaccagagaaagaagaaccagaaataaggttaccaggttgtacagggttcagtggagccaccactcagaagaagaggcaacttgggaaagggaagatgagttaaaggccgcccatccgcacctcttcgccagctcttccgaatctcggggtcgagattctgtttaa

SEQ ID NO: 11641 - DNA, 3770 bp, Oryza sativa
  Clone ID: TFbOSC23279j.C1.o1.fg
gagtgaggatgttggaccaacagaggaacatttatctgggtcaggcaggagaagggaatcagtacgctgaggctgtcctcaaggggccaagattagaaatccctctgttcagtggagaagatccaatagattggcttaagcagtgtgagaagttttttgagattacgggtacccctctggatcaatgggtgaatttagcggtggctcatttgaatggcagggcattgaaatggttcggaggaattggtctgccatggcaagtgatagcttggccacaatggtgcagcatggtctgtactcgattttctgctgcgagtgaacatgaggcaattgagttgttccaaaatgtgaaacaatttggaacaacagtggagcaatatattgacaagtttgaggattatgtggatttagtaaagagagaccacccttatctccaggagcaatatctgaccagctgtttcattgggggattgagagcagatattaaatacgatgtgtgtgggctgctaatgccagaaaaatggtgggaaatttcaaccgaaacaggaatcagaatccacttggaggtaatcaggggcggaatgctaaccataggggacaaaacagaggtgagggagataggagagaggaaaagaagtgctggttctgtaaagaaccttggtttccaaggcaccagtgattatgcccttaggaattcttatcccttgaaaaatactgacacaaagaaagtagtagttgctggtggtggagaacttaagactgatgtcatggtgccagacatcagctatgagattcaaggagaatgctttactaaccaatttaagttgcttcctctcaagggatatgatattatctggggtgctgattggatctataattatagccccatttcgctggatttgaagcaaagaattttgggaattacaaagggaaacaaagtaatactcttacaagatttcactaaaccaaataagcactttcagatcagtggtaaaagattggagaaaatgttaaagaagggggctcttggtatggtgatacaagtcaatgtcatgtctgaaactgtggaggaagaagggcatgttatacctgaagacattagtgacattatacaacaatttccagctgtgcttaaagaaccaaaggggctaccacctaagcgagaatgtgaccatgtgattaatttacagagtggggctgtaccacctaacatcaggccatacagagtgccacattatcagaaggaagcgatggaaaatattatcaatgagctgattgaatctaaggagattcaaactagtgatagtccctattcatctcctgctgtgatggttcgcaagaaagatggatcttggaggatgtgtgtcgattaccgacaattgaatgcacagactgttaagaacaaattcccaatgccaatcattgaagacttgttagatgaattaaatggagcaaggatattctctaaactagaccttcggtcagggtatcaccaaattaggatggctgagaaggatgttcataaaacagcatttagaacacatcttgggcattatgaatatcaagtaatgccattcggtttgacaaatgaccctgccactttccagtcacttatgaatcatgtcctagcaccattcttaagaagatttgtgttggtgtttttcgatgacatattaatctatagcaaaacaagggcagagcatctggagcatgtgaagttagtaatgcaagctttgcaagacaaccatcttgtaatcaagcttaaaaagtgtgcttttggacttgcaagtgtgtcttacctaggacatgtaatctctcaggatggggtggctacagatcccaagaaggtggggaaaattaaaaattggcccacacccaaggatgtcactgatgtaaggaaattcctggggatgacaggatactaccgaaggttcattcaaggctatggtaccatttgtagacctattcatgacatgctgaaaaagaatgggtttcaatggggagcagatcagaccacagcttttgagactctaaagcataagctgagaaccagccctgtcttggctttgccagactttgatcaagcattcaccatagaagcagatgcttgtggagtcggcattggggcagtactaatgcagggagggcgacccattgcatttttcagtaaggctttgggacccaaggcagctgggcaatccatatatgagaaggaggctatggctattcttgaagctcttaaaaagtggaggcactatgtgttgggcagtaaattgatcattaagactgaccagcaaagtttgaaattcatgatgggtcagagattggtagaggggatacaacacaaattgttgctaaaattgatggagtatgattataccatagagtataaatctggaaaagaaaatttagtggctgatgctctgtccaggctaccacaaaaggaagctgttgcagacaggtgtcacccaatgactgtggtgatacctgagtggattgtggatattcagaggagctatgaaaatgatgtacaagcacacaaaattctcagtttgattggtactgcagcagatccagatagagaatataagcttgaagcaggattgctaaaatacaaagggaggatctatgtgggagaagccacggatatcagaaggcaattgatcacaacctatcattcatcttcttttgggggtcactcagaaataccagatatggcatggactcatattactatggactttatagaggggctaccaaaatcacaagggaaagatgttattctggtagtggtggatcgtctgaccaaatatgctcatttcatagcattagcccatccatatgatgtggagcaggtggtagaggcgttcatgaacaatattcacaaactgcatggtatgccgatggtcatcatcactgacagggaccggatttttactagcagtctgtttcaggagattttcaaagcaatgaaggtcaagctgagatttagtactgcttatcacccacaaatggatggacaaactgaaagagtcaatcaatgcctggagtcctaccttagaaatatgacgttccaagaacctcacaaatggtattcatggctggcactagctgagtggtggtataacaccactttccacaccgcaattcagatgactccgttcaaagcaatgtatggttattctcccccacaaatcaatgaattttcagtgccatgtaacatatcagaagaagctagggtgactattgaagaaaaggaagcaatactgaacaaactcaagaatagtttggctgatgctcaacaccgaatgaagtattttgcagataaaaatagaactgaaagaaacttagaagttggggatatggtatatttaaaattgaaaccctatagacagtctgcatttgggatcagagggtctctcaagctaagatccaagttttatggaccattcaaggttcttcagaagattggccaattagcttataagcttcagttacctgatgatgctcagatccaccctgtgttccatgttagtcagctcaagaagcatctggggaagcatgctattcccatgtccaatttaccctcagtaggaccagatgggcagattaaaacagaaccactagcagttctacagaggagaatggtacccaggaaaggagttgctgtgactcaatggttgatattatggcagaatttgtctcctgctgaagccacatgggaagacgcatcagtcattcaagcaatgtttccatcgtttaatccttga

SEQ ID NO: 11642 - DNA, 617 bp, Oryza sativa
  Clone ID: TFbOSC10179j.C1.o2.np
atggtggtgcggactgcggaggaggagcgcgtcgattctgtgaaaaatccggcgcacgagtgcacgacggtgcgggggcgagagagcgcgaggaggaaatgcgtgggagatgcgggagaaagaggagggaagagcgagacacaggacggtggatgcggcgtgatttcgccatttcaggtgcgggaaggagaggagggggagaggtgggaatacggtctgtgggtattccccatcgacaactgttcatcgttttccctagttgaaggccagaaacaaaagagggggaagatgggcgcggtgctccgggttaacgacatcatgagttgttgtccggcaaaatccaccaccatccattcaatgaggtcttggtcaatgagcttggtgcagctagatgaggttggttttgttggatctagctcttcctcctttctactgcttggatttggtcttatttggttcaccctgtagctcccgatctctcgcgcacagccaccgcagactacgcttacacgccaccgtttgcctctctgtctccgcctatgggaacaaccatcagtgaggatgctgccgcctcaaccagcccacttgtgttggcagccgggcacctcttccatcta

SEQ ID NO: 11643 - DNA, 496 bp, Oryza sativa
  Clone ID: TFbOSC10179j.C1.o6.gp
acgatcaacgagatcgcatcgcctccgccgccaacgccgccattcgattgatctccaaagatacctttctgttcttacaagttttgtttatattcaacacactctctctcactggttgctgggtcccagccaggctgtcgacagagccatagccagctattacttacaagcccattcaggcccactcagacgaacattagacttcttaattctagtagctcgcttcagcggcctagtaattgtgttctcctgtgcttcgtcagacaacggcaactccctggaagcagtattgctgctgacaaaccccaccccttgaagactgacttgcccccaaggcagtgcagaagggaaacgctgcttgagctcttcttcatcttcccaggtggcttccactgcaggcaaattagaccagcaaacaagaatttgacggacaactttgttacctttcttctgtatccttgtatccaagatctgaacaggatactgaatatgatct

SEQ ID NO: 11644 - DNA, 4113 bp, Oryza sativa
  Clone ID: TFbOSC900333j.C1.o7.fg
atggaagctatggaaggtcggcttgtggacatgatccagtcgttggtgaagaaagtggaggaggtgaacgtaatgggatccaagctggagataattgataagaaattggagcagtatggggagcaattggggaaagtgcaggcgaaggtggatctatccatggattcccttgggcaagtgcagatggagcaagctttcgtgaccaaggcactcaaggaaggaaacccacacgctgcgccaacctcgactcgccccggcaaggctccgattctgcaaactccatcgacggcttctacgtcatcgacaccaccaactccaccaccgcttcctaatttgaatgggtatgcctctgttcagcccattcactctgctgcgcgtgatcatgctgaagtagaacacaaacgaaattggacccctaaaatggatttcccgaagtttgatggattgaaagatgaattgcactattcagttgctgctcagttgcctgaaaacgttcatcaagctttccaggttgctttaatctttgagagtgcacaccgtatgaaaaagggagttcataagaaggaagggtatctgactaagggaatagatacaccagcaaaagtaccaggagacatttggaaggcgcagcagttgaaggagtatcacaaaactcatggtttatgctttaagtgtggagacaaatatgcacctaggcatgtttgtgctaagcaagagggtccacagttgaaggcaatggaagtggagcaaaattctgaaatgttgactgatgaaatgttagatgtggtggcctgtttggagactcaaccagagaatatgttactgtctattcaagccatttctggttctgtggctcctaagaccattcagttaagggcattggtaaaagatcaggtggtactgattttagttgattctggaagctcacatagtttcattaatgaagctttatgtcagaagttgcaactgtcaacagtacctcatccttcttatgatgttaaagtagctaatggagctctcttgacttgtgcttctcatgtaccacactttaggtggctattgcagggacagacatttcagtttcctgtcaaagtactagctctgggaggttatgatatggtattgggaatggattggttggaacaacatagtcccatccaatgtgattggaatttgaagactatttctttcaatcatcagggttcttgggttactttacaagggattcaggccagtgctatgcattctttgactgcagcaactcctgatcagattatgaattggtttcagggtaatgatatttgggctatggctgttgttcaacagattactcctcccttgaactctgttataccatctacagtacaagccttgttggacaaatatcaatttgtattctctgcccctgactctttacctcctcatagagctgtggatcatgccttgccattactgcctggtgcagttccagtcaattgtcggccttacaggtattctcctgctcaaaaagatgagattgaaaaacaagtttgtgaaatgttggaggctggtctaatcactcatagctgtagtccttttgcttcacctgtcctattagttaagaagaaggataacacttggaggttttgtgtggattatcgtcgtttgaatactttaactgttaagaacaaatttcctcttccaattgtggatgagttgcttgatgaattaactggggctcaatacttttcgaagttagatttgaggagtggatatcatcaaatcagaatgttgcctgaggatgagtacaaaacagctttcaaaacacaccatggtcattttcaatctagagtaatgcctttcgggcttacaaatgcaccagctacatttcagtatttgatgaattctatatttgctccatttatgaggaagtttgtcctggttttcatggatgatatcctggtatatagtcactcttgggctgagcatttgtcccatttggagctggtctttcagacattacagaatcatcagttatttgctaaactctctaaatgctcctttgctacacccactttggaatatttgggacatactatatctaaagatggtgtggctactgatcctgcgaaaacagcatgtatgcaacaatggcctgttcctgctaatatcactgaactcagggggtttcttggtctcacaggatactatagaaaatttgttcaccattatgggattattgcaaaacctctgaccaaactgttacagaagaatgtgaagtttgtttggactcctgaagctgattctgcttttcacgccttgaagcaggctatgtgttctaccctagtgttagcactgcctgatttctctaagccctttgctctggaaactgacgcttgtgacattggaataggagctgtgctgcttcaagatggtcaccccattgccttttatagtaaagctataggcacacaaaacactattgggggacattctggaggtcaagccacttatcaacgactgaagaaattgtttatgtgggctggtctgaaacagcaggtggaggaatttgttcagcagtgtgctgtgtgtcagcaagctaaacacgaacactgcaaatatcctgggttgttgcagccactccctatacctgaaggtgcttggcaagaagtgtgtatggattttattaagggattacctctgtcccgaggatttgatgtcattttggtggtggtggataggtttactaaatatgctcatttcatccctttgaagcatcctttcactgccttacaagtggctgaagttttcctcaataatgttactaagttgtatgggttacctaagattattgtttctgatcgagacaaggtgtttaccagtgcattttggcaggctttgttcaagcgttttgaagttcatttgcatctaagctcagcttaccatcctcagtccgatggacaaacggaaagggtcaaccaatgtttggagatgtatttgaggtgtgctgtttctaatactccctctaagtggtgttattggttgccattagctcagtattggtacaacactacattccatactgctattcagtgttctccacataaggcattgtatggtgtggatcctcatcatggcattttaccctcctttgctttggaagatgttgacacctctacttcgtcctctgaggctgataacttgctgaaagatcgcactttctatgctagtttacttcgtcaccatttgactcgagctcagcatcgtatgaaacaggcagctaatgctaatcgcacgttgcgttcttttcaagttggtgacatggtttacttgaagctccagccttatgcccagcattcagttgtttctcgcccctgccccaaactggcaatgaagtattttggtccattctccattgtcagcaaaattggctcagtagcttacaagctacagttgcctgaagctagccgtatccatccggtattccatgtctctcaattgaagcaagtgatccctaataatgcaccagttttttctaccctccctatgtctttggagctagatgttcagtcattatctccttctgccatattggatcgtcgcatggttaaaagaggcaatgcggctgtcgtccaagttaaggtgcgctggggttctttgcctgaagatttttccacttgggaagactatgatgtcttgtgtgttcgttttccggaggttaaatcttggggacaagattcctctcatgggggcggcactgtcatagctgcagccatgacagagtcgaagtctaaagcagaggagaagaagaaaggcaaagcagagcgattggtgtggtttgatgattctcgaccttatgttgtgttgatgtgtacaatttcgcagggaattggtggatttgttttcggaaacgagaggtccgagtccaaggaagacagttacgtcgagagattccttgactgcataagcaacggtaccatacctgacgacagcaggcctgttctcctcaacgttctaaaagaagaccatgaagatgctgagcttgtgagaggtgctctagaaacctttgtgagtgcagtgactcctattgaaacctcaaaaaaccgaggttcagcctgcatcagtgaactctga

SEQ ID NO: 11645 - DNA, 4890 bp, Oryza sativa
  Clone ID: TFbOSC401333j.C1.o5.fg
atgttcaaggccttgttcttgatggtggatgaggaggagcccttgcagttggagacggagataaaccaagaaacaaggaccaagaaccaaaccctaggtaggataggaagaagagaggagaaggaagagagactcaaaagtgagaaggtggccagcggaggagacggtcgccggaggggagagcgccgcgtcgtcggagcgccgtcgaatcccagtcacgtccgtgtcaaggagcaaccactgtccgagggcgctaagtcagttgcagaagacgctggagatgatgctgattccggaaggagggaagatgaacttgaagcagctgaaggagaagtggtgcgccgtgcaacaaggcccgtcaagataaacctgaagtactatgggcctgactgggccgtgatgtcgcaggagagtaaacttgatgtcttgttgagaactattgaggagaatgagaagaagagaatggaggcggaggcgaggactcgggatgatctcgctgatctgaagaagatggtggagatttgtcttcccaagatggaggagaaggtggaaaaactcagcgagtccgtgcagacactaagccacaagcatcacaccgatctgagtactagtcttcctcctatgacttgccctaagtttgatggtgagaacccacagatgtggaagagcaattgtgagcaatactttgatatctatggtattaatcctatgcattgggtcaaggtggccacactcaatttcagtggtaatgcagcattttggcttcagtcgatccgttctcaaattatgggtattacttggcaaactctgtgtgacttgatctgtgctagattcactagagatatacaggaagcactaattagaaaatggttccatgcgcaacagaacagcacagtcactgaatatgttgaacaatttgacagtatcatgcaccagctaatggcatatgacagtgctctcacccctgtgtattttgttactaagttcattgaagggctcagggatgatgtcaggggtgcagttatgctacagagaccccaggaccttgactcagcttgttcaattgccttgctccaagaagaaatcctggaaagtaataagtctactacacacagaaggtctgataatcacattgcgttcaggccagtaccaaaactcaacaattatgtgccagtgcctccaggacagagatctgtagctgttagtgcacatgatgacaaaaagggagtggaatctgctaagtccagagaggacaaatttgcttctcttaagtcttacagaagggctaagggtctttgttttgtctgtggtgaaagatgggggagagaccataaatgtgctacttctgtccagctccatgttgtccaagaattattggaagcaatgcgctctgagtgtaattctgatgacatcctgacagctaaagaccctattgaatcagtagaggcaattgatggaggattgatggctatatctcagcaagctttattaaggggatgggttcaaggaacagagattcttatgttgattgactcaggcagtacacactccttcatagatgagagcattggcagcaagcttgtgggcctcattcctttaagtagatctgtaactgtgaaaatagcagatggtggtactatgaagtgcacacagcaaattctggggtgtcgttggtggactcaaggtcattatttcaagagcgacttcaagctgttgaatttgggctcttatgatgctattcttggcatggactggctagaacaatttagtcctatgcaggtggattgggttaacaaatggctagaggttgtgattgatgggcagcctgtcagactgtatgtcaatcctagacccaagggattacccccaaagagaatatgtgatcatcacattcctttacttcctgggtccaagcctgttaaccttcgcccttatagattcaatccagccctcaaggatgaaattgaggcacaaatttcagagatgttgcaaagtggtgttatccaaccgagtcagagtgcctttgcatctccagcccttctagtcaggaagaaggatggcacttggaggctagtaattgattacagacaactgaatgccatcactgtcaagtgttcctaccccatgcctgtgattgatgaattgctagatgaattacctggggctaaatggttttcaaaacttgaccttagggctggagctccagcaacctttcagggtgccatgaatgagacatttaaatcagtcctgaggaggtttgctctggtattttttgatgacattcttatttatagccctgatttgccctcacaccttgaccacctcaagcaagtgttaaccctgctgcagcaacatcattggcaagtaaagttatccaagtgttcttttgcacaacagcaacttacctacttaggtcatgtcataagtgcagagggggtatctactgatccaagcaagattcaagagattgttaattgggaaacaccaacaaccaaaaagaaactcaggggattcttgggtttggctggctattacagaaagtttgtgaaaggatttggattaatcagtaaaccaatcactcagttactacgaaaaggggtgccatataaatggactttggagactgaaactgccttccaacaattgaaacaagctctggtttctgccccagtgctggcattacctgattttagtttgccttttactgtcgaaattgatgcttcagattcagggattggggctgtcctgtctcagaacaaacacccaatagcctacattagcaaggcacttggtccccgaaatcgagggctatgtcacgcccggaatttctatccaaaattccaaacgcttacatacggccgagatcgatcggtccacgaccggctcacgggagagggcgacgatgacgtcggcgatgacgtcaccaccggcggcggcggctcggcggctcggacggcgcacgctcgccggcgaacggcggcgcttcggcacgaacggaggacaccaacgggtagcggacggcacggcgaactcaccggcgaccaaagcgatggcggaagaggaacggacggtgacggcgacgaggaggaagcggcggcaaacttcgggttgacggcggcgacggtgctccggcggtcttcggcggcggcgaaggagtggacgaggacggcggcgacttggcgaccacgacggcggtcttcccgagcgacggcgacggctggaacggcggcggcgcacggctggagcgacggcggcgacggcggcgctagggcacacggcgctagggcgtttccgacgacgagaggcgaaggcaaagggtgtgacaggctatcaacttatgagaaggaatgtatggctatcttgttagcagttgatcactggaggtcatacttgcaacttggggaatttataattctaactgatcaccatagcttgatgcacttatctgatcagcgtttacataccccatggcagcacaaggctttcaccaagttattgggcttaaactataaaatttgctatcgtaaagggaccagcaatgctgctgcagatgctctatcaagaaagtttcaaagtgattctgagttgtccatcatctctagttgtgttcccagttggttgcaagaggttgctaaggggtatgaacatgatccctattcttctgatctgctttcagccttgtctgttcagcttgactgcaaacctggatttcagttgcagtctggaattattaagtacaaggggcgcatttggattgtcacttacagtaagatcaagaaactgtttgcttggcagggtatgaaatctcaagtaaaggattttgtacagcaatgtcaaacttgtctgcaagcaaaacctgacagatctaagtacccagggcttctacaaccattacctgttcctgatggatcttgggaagtcatcatcatggactttattgaagatcgtgacaaaatttttactagccagctatggacttatcttttctctgcttctggaacaaaacttaatctgagcacttcttaccatccccagtctgatcgacagacggaacgagtaaaccagtgccttgagatttatctgcggtgttttgctcatgccaatccttctaaatgggtcacatggttgcacttggctgaatattggtacaatacttcttaccattcctctttaaagacttccccatttgaagtcctatatgggcactctcctaggcattttggaatcaatgtggacacttgtgaaattcctgatttgcaagaatggctaaaggagaggaaactgatgcaagcattggtgcaacagcatttacatagagcaaatcagcaaatgaagcatatggctgacaagaagagaagtttcagatcttttgcagttggagattgggtgttacggaaaattggcacagtagcatataaacttcagcttcctgcaactgccagtgtgcatcctgtctttcatgtatctcagttaagggcggctaagggttataaagagctttcatcacttcagttgcctaaagctaactctgctctgcaagttccttctcagattcttgatagcagggtggtcaagagggctaccgatgctgttcttcaagtgctgatccgctggtctgattctgcagccgaggatgccacttgggaaaacatggaggacttacgcactcgatttcctactgctttggcttggggacaagccaaatttcaaggggaggggattgtcaaggagcaaccactgtccgagggcgctaagtcagttgctaaagacgctggagatgatgctgattccggaaggagggaagatgaacttgaagcagctgaaggagaagtggtgcgccgtgcaacaaggcccgtcaagataaaccagaagtactatgggcctaactag

SEQ ID NO: 11646 - DNA, 2893 bp, Oryza sativa
  Clone ID: TFbOSC900010j.C1.o13.np
ccaccaaacttgagaccatatagagtacctcactatcaaaaggcagctatggaaaatataatcactgatctagttgagtcgaaagagatacaagaaagtgagagcccttatgcctcactagctgtcatggtaaggaagaaagatggctcctggagattatgtgtcgactacagagagctcaattcacagacagtcaaaaacaaattccctatgccaatcattgaggatctgttggatgagcttcacggggctagaatattttctaagctagacctgaggttaggctaccattaaattaggatggctgagcaagatgttcacaagacagccttcagaactcacatgggccattatgaataccaagttatgccctttgggctgactaatgccccagcaacctttcagtcacttatgaaccaagtgctcaaaccattttcgaggaaatttgaattagtgttctttgacgatatactgatttatagtcggagcaaagaagaacatttggatcatttgaagctagtcctacaagtcttgaaggagaatgatctggttatcaggttgaagaaatgtgcttttgggctatctgaagtttcatacctggggcatgttattttacagaattgggtagccacagatcccaagaaggtggataagatctcaaggtggcctattccaactgatgttacagagctcagaaaatttcttgggatgataggttactgtagaagatttataaaagggtatggggtgatatgcagaccaatgcatgacatgcttcagaaacaaggatttcagtggggtccagagcagactgctgcctttaatgaattaaaaagtaaaatgtgcacaagcctagttttggccatgcctgactttagcaaggagtttttgttgaagctgacgcatgtggttcaggcataggtgttgtcctgatgcaatctggcagaccaatagcattcctaagcaagtctttaggacccaaagctgatgggcaatcggtgtatgagaaggaagcaattgcaattttagaagcaattaagaaatggagacattacattctcggtgggaagctggtaattaggactgatcaacaaagtttgaagttcatgatgaaccaaagattggtagagggaatccaacacaaattaatgttgaaactgatggaatatgattactctgttgagtataagcagggcaagcaaaattatgtagcagatgcactatcaaggatgcccataatccaagagaaagaggaggaatcttgtcaagccatcaccatagtagttcctgactggattgaggacatcaaaaggagctatgatgatgatgtccaggctcacaaattgctaagtttggtgggaactgaagctgatccaaatggggaatatagacaagaatctggattgctgaagtacaaagggaggatatatgttggccagggcactaacatcagaaccgaactgttgagggcatgtcatgcatcctcttttggtggtcactctagtatgagagcaacttaccacagaatcaaactgttgttttactggccaagacttaagaaagaagtagaaaactttgtcagggaatgcccaacctgtcaagtaacaaaaggggagaatgtgcacattccaggtttgttggaacctttggaaatacctgatatggcatggtcacatattacaatggattttattgagggacttccaatgtccaggggtaaagatgtgatatttgttgtagtggataggctgaccaagtatgctcacttccttgcactatcccatccttatgcagtggagcaggtggtggaggattttatggacaacatacacaagttgcatggaatgcctaatgcaataattactgacagggataggatcttcaccagtgggttattccacaaaattttcaaagcaaagaaagtacaactgaggtttagtactgcttatcactctcaaaccgacggccaaactgagagagtgaatcaatgcctagagtcatacttgaggaatatgacgttccaagaaaccaaaaattgctctccttggctggcactggctgagtggtggtacaataccacctatcacacagcaatccagatgactccatttaaggcctagtatggttactcaccaactcaaataaatgaattttctataccttgcaatgtgtcagctgagggaagaatgactttggaggagaaagaagctattttgcagaagttaaaggggagcatggagttggctcaaaaaaggatgaaatactttgccggcaagaacagaactgaaagagtttttgaaactggagacatggtttaccttaagttacaaccatatcgtcaaactgcccttaggatcagaggttctctgaaactaagatcaaaatattatggaccattcaagattattcaaaaagtagggaaagttgcatataaattgcaactaccagctgaagctcagatccaccctattttccatgtaagtcagctgaaaagacaccttgggactcatgcaattcctatggccaaccttcctgctgccggacctgatggacaaattaaaacagaacctgttgctattttgcaaagaagaatggtgcctagaagatggtagcagtaactcagtggttagtgttatggcaaaacttgagcccagcagatgcaacttgggaagatgcgacggtgattcagggtatgtatctagattttcatccttgaggacaagaatgttgccatggagggggactgaccaaactatttgatgaaggttcatgcaggcggcgcgaagcatatgcccaagctgcagtgtgctaccagcattgaccgtacgcggtgccaggccgatggtcgcctcagctttcgagaggtcctcaacctcgctggtgagtcctactg

SEQ ID NO: 11647 - DNA, 4431 bp, Oryza sativa
  Clone ID: TFbOSC401054j.C1.o44.fg
atgggggacgatctcaagtccaccctggagaccctcgccaagaccctggcctccctgcaatcttcatccgaagccacgaccaaggcgatcgaggacaacacacaggccatcgcggccctgtccgttgctcggactaccgagaaggcttccacggaatcatcggggacacctgcaccagatcggccgccgaagcattggcgtccggagttccccaagtacgatggcaagaccgatccgctcgccttcatcaatcgatgcgagtcattcttcatccagcaacacgtcatcccggcggaacgcacgtggatggcttcgtacaatctgcaggacggcgcgcaactgtggtacatgcacgtccaggacaacgagggtacgccgacgtgggagcgtttcaaggaactcctcaacctccgctacgggcccccgctccgctccgtgccgctattcgagctctcggcgtgccgccgcacgagcaccgtggaagactaccaagatcggttccaggccctgcttccccgcgccggtcgtctcgaggaagcccagcaggtacagctgttcaccgggggcctcctcccgccgctcagcctccaggtccagcagcagaagccggcatccctggaagaggccatgagtctcgcccgacagttcgagctcatggagccctacctgttcccggccacgacatccgcgcgcggcgtactcccgacgccggccccccggccatcgaccggccccgtcgtcaagccggcaccggccaccgtcaccgtcgagggtcgcccggtcaagcggctctcccaagcccagcaggaggagcgccgtcgcctcgggctgtgctacaactgtgacgagaaatacagccgctcccacaacaaggtatgcaaacggttgttttttgtggagggtggtgcaatcgaagaaggcgacgacacggtggaggatgacaccgaagaggcgactgtcgaggcgcccgtgttctccttgcacgcggtggctggcatcccgttgggcaaaccgatcctgctccaagtgacgctcggtgccgcctccctcgttgccctggtggacacgggctccacccacaacttcatcggtgaggacgccgcgctccgcaccggcctgcccgtccagccgcgtccacggctcactgcgacggtggcgaacggggagaaggtttcctgtccgggtgtgctgcggcgggcaccgatcaccatccagggcatggcgttcgacgtcgacctttacgtcatgcccctcgccggctacgacatggtgctgggcactcagtggatggcccacctgggcaccaccatcgcctgggacgtgaccacggggaccgtgtccttccaacatcaagggcgcaccgtctcgtggcagagcctacccccgcaccagcgcgccgatgtccacgccgtcagcaccgggacgagcctcgttgcggccaccgggtcctcctccagcaccccggcgcccacgacggagcctgccctcctcgacggcctcctgggctccttcgacgacgtcttcgccgagccacggggcctgccaccaccacggggccgcgaccacgccatccacctcctgccaggcgccccgcccgtcgccgtgcgtccctaccgctacccggtggcgcacaaggatgaacttgagcggcagtgtgccgtcatgatggagcagggcctcattcgccggagcacgtcggcgttctcgtcccccgtcctgttggtcaagaaagccgacggctcgtggcgtttctgcgtcgactacagggccctcaacgccatcaccatcaaggacgcctacccgatcccggtggtggacgagctgctggacgagctgcacggcgccaagttcttcaccaagctcgatctgcgctcgggctatcatcaagtccggatgcgggctgaagacgtcgccaagacggcgttccggacgcacgatggcctctacgagttcttggtcatgccattcgggctgtgcaacgccccggcgacgttccaagcactaatgaacgacatcctccgcatatatcttcgccgttttgtccttgtgttttttgacgatattctcatctacagcaacacctgggcagaccatctgaggcacatccgggcggtgctcctcctgctgcgtcagcatcgcctgttcgtcaagcgttcaaagtgcgctttcggcgtcagctccatctcctacctgggccacatcatcggcgcgacgggcgtgtccatggacccggccaaggtgcaggctgtcgtggactggccgcaaccgcgctcggcccgcaccgtccggggcttcctggggctcgcgggctactaccgcaagttcgtccacgactacgggaccatcgccgcccccctcaccgcgctgaccaagaaggaggggttccggtggtccgacgaggtggcgactgcgttccacgccctcaagcacgccgtcaccacggccccggttctggcgctacccgacttcgtcaagccattcgtcgtcgagtgtgacgcctctacgcatgggttcggcgcggtactcctgcaggacaagcacccgctggcgttcttcagccgccccgtcgcgccgcgccaccgtgcgctcgctgcctacgagcgggagttgatcggcctcgtcctcgccatccgccactggcggccgtatctgtgggggcgtgcgttcgtggtgcggacggaccactacagcctcaagtacctgctcgatcaacgcctggcgaccatcccccaacaccattgggtgggcaagctcctcggcttcgacttcacggtggagtacaagtcgggcgcctccaacgtggtggccgatgccctctcgcgccgcgacacggacgagggtgccgtcttggcactgtcggcgccacggttcgactacatcgagcggttgcgggcagcccagaccacggagcctgctctcgtggccatccgcgacgccatccaggccggcacccgcagcgcgccgtgggcgcttcgcgacgggatggtgatgttcgactcccggctgtacattccgccatcgtcaccactgctccacgagatcttggcggcaatccacaccgacggacatgaaggcgtgcagcgtaccctgcacaggctgcgccgcgatttccactctcccgccatgcgccgggtggttcaggagttcgtccgggcgtgcgacacatgccagcgcaacaagtctgagcatttgcacccgggcggcctgcttcttcccctgccggttccaactacggtgtgggccgacattggcctcgacttcgtggaagctctgccccgtgtgggtgggaagacagtgatcctcaccgtcgtcgaccggttcagcaagtactgtcatttcatccctttggctcacccctacacagctgaatcagtagctcaggcgttctacgcggacattgtgcgcctccacggcataccccagtccatggtgtcggaccgggatccggtgttcacgtcatccttttggcgcgagttgatgcggctgaccggtacaaagatgcacatgacgacggccatccacccacaatctgatggccagacggaggccgccaacaaggtcatcgtcatgtacctgcggtgcttcaccggcgaccgacctcggcagtgggttcggtggctcccgtgggcggaatacatctacaataccgcctatcagacatctctccgcgacacgccgttccgggtggtatacgggcgcgacccgccgatcatcaggtcctacgagcccggcgagacgcgcgtggcggccgtcgctcgctccatggcggaccgtgacgagttcttggccgacgtgcgctaccggctagagcaggcccaggcgacgcacaagaagtactacgacaaaggccaccgtgcggtgtcctacgaggtgggcgacctcgttctcctgcgcctccgtcaccgcgccccggcatcgctgccccaagtgtccaagggcaagctcaagccccgctacttcgggccctaccgcgtcgtcgaggtgatcaaccccgtcgccgtccgcctcgagctcccgcctcgcgcaaagctccacgacgtgttccacgtgggcctactcaagaagttcgtgggagctgcgccaccatcgcctccggcactgcctgctgtccaccacggtgccattgatcccgagccagagcgcgtcacccgttctcggctagctcggggcgttcgtcaagttctggtccactggaagggggaatcggctgcgtccgccacatgggaagacctggacaccttcaaggagcgttacccggcgttccagctcgaggacgagctggctctcgaggaggggagagatgtcatgtggggccgaacctatgccaggcgccacagggcacgggacgtgcgccgagccggcgaacgcgccgcggcgcgcgcgcagagcacgtccagggagccacagggccaagtcaacaatagtggctag

SEQ ID NO: 11648 - DNA, 639 bp, Oryza sativa
  Clone ID: TFbOSC20914j.C1.o1.fg
atggagtattacgtttccaagggcgtatttggttgggtaataaggttgccgttcagtctaagattttggctgctttgcattgttctgctcttggtgggcattccggaatttaggtcacttatagtcatatacgccgtttgtttgcctggccaggttttcctcaaggctcagccctacgttcagagttcgctggctgttcgttccaaccacaagttgactttcagtcttgattttccggtacgtcttccactggtggttaatcctgacaccattgaacctgttcaagttttggctcgtcgggttttgaagaaaggagctggtacttctgagcaggtccttgttcgttggactggacaaatgtcggaggatgcaacttgggaagatgcggggatgcttcgtcagcaattccctactgcaccggcttggggacaagccgattttgatggagggaggaatgttgcagactctacagtatctggtacggttcctgatctggcaatctatgcgaatccagtgaaaaagataccagtgcgagcaaggcgggccaacgtaggaatgggcctgagttgtgttgtaaagatgcggctatataagcatctgtggtgtggagaaggggtatcgaatatgaaatggatgtga

SEQ ID NO: 11649 - DNA, 5013 bp, Oryza sativa
  Clone ID: TFbOSC400555j.C1.o16.gm
atgtgggactacctccaagcccccaggtacctgctcgtcgtcttcaacgacgtgcccgtcgagcaggctgacgccgggttcttcaacgtcgagctcaaaatctttgactccccacctgccgatcgtggcgataatccatctctgaatgaatacactccaccctctgccaaagcgttccagaatagcttcgagtacactgattatcctaatccgccgatcattgtggtcctccgtggtgtaaatgtcagccagcctctgatccatagggcccttgctggccagcttcagggcatccttctccgccgcaaacgtcgccttggcctctttccacattcgcttcaccctatggtagcgtggagggaggaaatcatcaacgggcgagtatatatcatcaggaaagatcttgacaaccccctccccttgaaaagtggcttgcccccaagccagtgccattggaaaacgctgctgaagatcttcccgatcctcccaggtggcatcctctgcaacagaatcagaccaatatacaagaacttgagaaacaagcgcgagacgttcgccgagctgcggaacgcgcggcgcgcgcagaggcagaacgcgcggctgcggcagatcaggccacgccaggggccagctaccctagggatcaacgcccttgacaacctggtatcgcggtcacgtcgatcttcgtcttccgttgccgactccacctctgccccagccaccaccgatcccatctacgactccaccaccactccagccgccgcccctgctgtcgctccgcccaatttcccacctgctgccgccgcctcccctgcgtcctcaccctcagtcgcgtcctgctcggcccaccacatgggtgacgacctcaaggcctccatcgaggccctctccaaggacatggcgctgatgcacgagtcgatcaaggccaacgccgcctccatcgcggccaacgccaaggcgatcgctgcgctcgccaccaccaccagttcatctacgtccggcgcccgccccggctttggcgatcagccgccagaccggccgcccaagcactggcgacccgacttcccgcactacgacggcaagagcgacccgctaatcttcatcaaccgctgcgaatccttcttcctgcaacagcgaatcatgcaagaggagaaggtttggatggcctcccacaacctcctcgagggcgcccaactttggtacatgcaggtccaagaagacgagcgcggcacgccgacgtggactcgcttcaaggagctcctcaatctccgctacgggccacctctgcggtccgctcccctgttcgagctgtcctcctgtcgccgcacgggtacagtggaggactaccaggaccggttccaggccctgctcccccgcgccggtcgcctcgacgaagaacagcgagtgcagctgttcaccggaggccttcttcctccgctcagcctccaagtccagatgcagaatccccagtcgctggcggctgccatgagcctcgcccgccagttcgagctgatcgagcagtacaccgccgttcccgccaaagctcctggtcggggtgtcctgccggcacctgcgcctcggccgcaactcgccttgccggctccagctggggctgccaagcccgcgccgcccgccgccaccgctgctgataaccggccggtcaggcgcctgaaccaggccgaacaggaggaacgtcgccgcctcggcttgtgcttcaactgcgacgaaaagtacagtcgcggccacaacaaggtttgcaaacgtctgttctttgtggacagcgtggaggacgaggacgaggaagcgccggaggacgaggtcgacgcggaggcaccgctgggcgcgaccacgctcgtcgccttggttgatacagggtcgacccacaacttcatcggcgagtcggcggccgctcgcaccgggctatccgtccagccgcggccacggatgacggccacggtcgccaacggcgaaaaggtggcctgcccaggcgtcctccgccacgcacccatcaccatcgagggcatgccgttccacgtcgacttgtacgtcatgcctctcgccggatatgacatcgtcctcggcacccagtggatggccaagctgggccggatgtcctgggatgtcaccacacgcgccctgacgttcgacctggagggccgtaccatctgctggcagggcgcgccaaaccaggacgggccggcagtccgcgcggccagcgcagacgactccctattgggggggctcctcgactccttcgccgacgtcttcaccgagcccacaggcctgcctccacagcgcggccgtgaccacgccatcgtcctcaagcagggcacgtcgccggtggctgtccggccctaccgttacccggcggctcataaagatgagctcgagcggcaatgcgccgccatgatctcccaaggcatcgtccgccgcagcgactcggcgttctcgtcgccggtcctcctcgtcaagaaggcggacagttcgtggcgcttctgcgtcgactacagagcgctaaatgcgcttaccgtcaaggacgcttttccgatccccgtcgtcgacgagcttctggacgagctccatggcgcgcgcttcttctccaagctcgacctgcggtccggctatcaccaagtgcgcatgcggcccgaagatatccacaagacggcgttccgcacccacgacgggctgtatgagttcttggtcatgccgttcgggctttgcaacgccccggcgacattccaagccctcatgaacgatgtgctccgctccttcttgcgccgctttgtccttgtgttttttgatgatattttgatctacagtgacacatgggctgatcatctccgtcacctccgggctgtgctgacggtgctcagggagcacaaactcttcatcaagcgcagcaagtgtgcctttggcgtcgactccgtggcataccttggccacgttatctcggctgctggtgttgccatggacccggcgaaggtccaggccattcgggagtggcctcagccacgctcggcgcgtgcggtgcgcggcttcctcggcttggcggggtactaccgcaaattcgtccacaactacggcaccatcgctgcgcccctcaccgccctgctcaagaaggaaggattcgcctggaccgaggcagccacggcggcgttcgacgccctcaaagccgcggtctcctcggcgccgatcctcgccatgccggacttcaccaaggccttcaccgtggagtgcgacgcctcctcccacggctttggcgcggtcctcattcaagacggccatccgctcgccttcttcagccgtcctgtggcgccacgtcaccgcgccctcgctgcgtacgagcgcgagctcatcggcttggtgctggccgtccggcattggaggccgtatctttggggccggcacttcaccgtcaagaccgaccactacagcctgaaatatcttctggatcagcggctgtccaccattccccagcaccattgggtgggcaaactgctgggcttcgacttcacggtggagtacaagccgggcgcagcaaatactgtggcggacgcgctgtctcgtcgcgacaccaccgaggacgcttctgtcttggtgctgtctgcgccacggttcgacttcatcgagcggcttcgccaagcacaggacgtcgacccggcgctggtggcgctacaggcggagatccgctccggcacacgcgcagggccgtggtccatggccgacggcatggtcctgttcgctggccgcctgtacctgcccccagcgtcgcccctgctccaggaggattttgtgcggacctgcgaggtctgtcagcgctacaaggccgagcacctccagcctgccggtcttctccttccactgccggtgccacaaggagtgtggactgacgtcgcactggactttgtcgaagcgctgccccgtgttcgcggcaagtccgtcatactgactgtggtggacagattcagcaagtactgccacttcatccctttggcgcacccatactcggcggaatccgtcgctcaagtcttcttcgccgagatcgtccgtctccatggcgttccacaatccatggtgtcggatcgcgacccggtcttcacgtccgcgttctggagcgagctgatgcgtctggtgggtacgaagctccacatgacgacggccttccaccctcagtccgacggccagtcggaggcagccaaccgtgtcatcatcatgtacctgcggtgccttactggtgatcgcccccggcagtggctgcgctggctcccgtgggcggaatttgtcttcaacaccgcctaccagacctcgctgcgggataccccgttccgggtggtctatggccgcgaccctccctccatccggtcgtatgaaccgggggacacccgcgtggcagctgtggccaaaagcatggaggagcgctcagagttcctggaggacattcgctaccgcctggaacaagctcaggccatccagaagaagtactacgacaagtcccatcgtgcagtgtcgtttcaggttggggactgggtccttctgcgtctccgccagcgcgccccagcgtccctgtcgctggcagtctccggcaagctgaagccgcggtatttcgggccctaccgcatcgcggagatgatcaacgaggtggctgctcgcttggcattgccggccggcgcccgccttcacgacgtgttccacatcgggctgctcaagaagtggcacggcgcgcctccagacgctcccccgccgctgccgaacgtgcaccacggcgcggtggcctgtgagcccgagcgagtcatcaaagcccgcttggcccgtggggtgcgccaagttctggtccagtggaagggcacttcagcggcgtctgctacctgggaggacagggagccattcttcgcccgctaccctgctctacagctcgaggacgagctgcctctcgacggagggggagatgtcataggcagaacgcgcggctgcggcagatcaggccacggtcagtggctaggatggaaaggataa

SEQ ID NO: 11650 - DNA, 4386 bp, Oryza sativa
  Clone ID: TFbOSC420199j.C1.o34.fg
atgggtgacgacctcaaggcctccatcgaggccctctccaaggacatggcgctgatgcacgagtcgatcaaggccaacgccgcctccatcgcggccaacgccaaggcgatcgctgcgctcgccaccaccaccagttcatctacgtccggcgcccgccccggctttggcgatcagccgccagaccggccgcccaagcactggcgacccgacttcccgcactacgacggcaagagcgacccgctaatcttcatcaaccgctgcgaatccttcttcctgcaacagcgaatcatgcaagaggagaaggtttggatggcctcccacaacctcctcgagggcgcccaactttggtacatgcaggtccaagaagacgagcgcggcacgccgacgtggactcgcttcaaggagctcctcaatctccgctacgggccacctctgcggtccgctcccctgttcgagctgtcctcctgtcgccgcacgggcacagtggaggactaccaggaccggttccaggccctgctcccccgcgccggtcgcctcgacgaagaacagcgagtgcagctgttcaccggaggccttcttcctccgctcagcctccaagtccagatgcagaatccccagtcgctggcggctgccatgagcctcgcccgccagttcgagctgatcgagcagtacaccgccgttcccgccaaagctcctggtcggggtgtcctgccggcacctgcgcctcggccgcaactcgccttgccggctccagctggggctgccaagcccgcgccgcccgccgccaccgctgctgataaccggccggtcaggcgcctgaaccaggccgaacaggaggaacgtcgccgcctcggcttgtgcttcaactgcgacgaaaagtacagtcgcggccacaacaaggtttgcaaacgtctgttctttgtggacagcgtggaggacgaggacgaggaagcgccggaggacgaggtcgacgcggaggcaccggtgttttctctccatgccgtggccggcgtcgccgtgggacacccgatcctgctccgggttcagctgggcgcgaccacgctcgtcgccttggttgatacagggtcgacccacaacttcatcggcgagtcggcggccgctcgcaccgggctgtccgtccagccgcggccacggatgacggccacggtcgccaacggcgaaaaggtggcctgcccaggcgtcctccgccacgcgcccatcaccatcgagggcatgccgttccacgtcgacttgtacgtcatgcctctcgccggatatgacatcgtcctcggcacccagtggatggccaagctgggccggatgtcctgggatgtcaccacacgcgccctgacgttcgacctggagggccgtaccatctgctggcagggcgcgccaaaccaggacgggccggcagtccgcgcggccagcgcagacgactccctattgggggggctcctcgactccttcgccgacgtcttcaccgagcccacaggcctgcctccacagcgcggccgtgaccacgccatcgtcctcaagcagggcacgtcgccggtggctgtccggccctaccgttacccggcggctcataaagatgagctcgagcggcaatgcgccgccatgatctcccaaggcatcgtccgccgcagcgactcggcgttctcgtcgccggtcctcctcgtcaagaaggcggacggttcgtggcgcttctgcgtcgactacagagcgctaaatgcgcttaccgtcaaggacgcttttccgatccccgtcgtcgacgagcttctggacgagctccatggcgcgcgcttcttctccaagctcgacctgcggtccggctatcaccaagtgcgcatgcggcccgaagatatccacaagacggcgttccgcacccacgacgggctgtatgagttcttggtcatgccgttcgggctttgcaacgccccggcgacattccaagccctcatgaacgatgtgctccgctccttcttgcgccgctttgtccttgtgttttttgatgatattttgatctacagtgacacatgggctgatcatctccgtcacctccgggctgtgctgacggtgctcagggagcacaaactcttcatcaagcgcagcaagtgtgcctttggcgtcgactccgtggcataccttggccacgttatctcggctgctggtgttgccatggacccggcgaaggtccaggccattcgggagtggcctcagccacgctcggcgcgtgcggtgcgcggcttcctcggcttggcggggtactaccgcaaattcgtccacaactacggcaccatcgctgcgcccctcaccgccctgctcaagaaggaaggattcgcctggaccgaggcagccacggcggcgttcgacgccctcaaagccgcggtctcctcggcgccgatcctcgccatgccggacttcaccaaggccttcaccgtggagtgcgacgcctcctcccacggctttggcgcggtcctcattcaagacggccatccgctcgccttcttcagccgtcctgtggcgccacgtcaccgcgccctcgctgcgtacgagcgcgagctcatcggcttggtgctggccgtccggcattggaggccgtatctttggggccggcacttcaccgtcaagaccgaccactacagcctgaaatatcttctggatcagcggctgtccaccattccccagcaccattgggtgggcaaactgctgggcttcgacttcacggtggagtacaagccgggcgcagcaaatactgtggcggacgcgctgtctcgtcgcgacaccaccgaggacgcttctgtcttggtgctgtctgcgccacggttcgacttcatcgagcggcttcgccaagcacaggacgtcgacccggcgctggtggcgctacaggcggagatccgctccggcacacgcgcagggccgtggtccatggccgacggcatggtcctgttcgctggccgcctgtacctgcccccagcgtcgcccctgctccaggaggtcctgcgcgctgtccatgaggagggacatgaaggcgtccagcgcactctccaccgactccgccgggatttccactttcctaacatgaagagcgttgtgcaggattttgtgcggacctgcgaggtctgtcagcgctacaaggccgagcacctccagcctgccggtcttctccttccactgccggtgccacaaggagtgtggactgacgtcgcactggactttgtcgaagcgctgccccgtgttcgcggcaagtccgtcatactgactgtggtggacagattcagcaagtactgccacttcatccctttggcgcacccatactcggcggaatccgtcgctcaagtcttcttcgccgagatcgtccgtctccatggcgttccacaatccatggtgtcggatcgcgacccggtcttcacgtccgcgttctggagcgagctgatgcgtctggtgggtacgaagctccacatgacgacggccttccaccctcagtccgacggccagtcggaggcatccaaccgtgtcatcatcatgtacctgcggtgccttactggtgatcgcccccggcagtggctgcgctggctcccgtgggcggaatttgtcttcaacaccgcctaccagacctcgctgcggcataccccgttccgggtggtctatggccgcgaccctccctccatccggtcgtatgaaccgggggacacccgcgtggcagctgtggccaaaagcatggaggagcgctcagagttcctggaggacattcgctaccgcctggaacaagctcaggccatccagaagaagtactacgacaagtcccatcgtgcagtgtcgtttcaggttggggactgggtccttctgcgtctccgccagcgcgccccagcgtccctgtcgctggcagtctccggcaagctgaagctgcggtatttcgggccctaccgcatcgcggagatgatcaacgaggtggctgctcgcttggcattgccggccggcgcccgccttcacgacgtgttccacatcgggctgctcaagaagtggcacggcgcgcctccagacgctcccccgccgctgccgaacgtgcaccacggcgcggtggcctgtgagcccgagcgagtcatcaaagcccgcttggcccgtggggtgcgccaagttctggtccagtggaagggcacttcagcggcgtctgctacctgggaggacagggagccattcttcgcccgctaccctgctctacagctcgaggacgagctgcctctcgacggagggggagatgtcatgtgggggcgcacgtatgtgcgacgccgcagagcgcgagacgttcgccgagctgcggaacgcgcggcgcgcgcagaggcagaacgcgcggctgcggcagatcaggccacggtcagtggctag

SEQ ID NO: 11651 - DNA, 3519 bp, Oryza sativa
  Clone ID: TFbOSC404812j.C1.o11.fg
atggaatctatggaggagcgtttgatggatactctcaaggcactagcactcaaggtggatggtgtggaggacatcgccaagcgtttgacgcagatcgacctcaagctggcgcagcaaggcgagtggctagatcgggtgcagacgaaagtggatctctccatgacgtccctcggccaggttcagcaagaacagagtcaggtgtggaagttagaagtgggttggcatgattggaccatgttaaaaatggctatcgctggagaatttgagggggcacagcttggtaatgtgggcaagagacattttcagaagagagatcctgttgtttggaaacaacctgaaaagcctaagttagccactggggagttatggaaagcacagcaactcaaggaatatcgtcgagctcacgacctttgtttcaagtgtggggataagtatgtgcctggacatgtgtgtgtgaaaccagataatgctcagctaaaggccatggaagttcaggaggatcaggtgattttgtctgatgataatttggatgctgtggtggcatctgacatggtggaagatgattgcaatttatctttgcatgccatggctggtacatgttctgcttctactttacagttgcgagcaatggtgggcaatcaagttattctgattttggtggattcaggcatggactggttgaccaaacatagccctatgcagtgtgattgggttgctagaagcattcaatttccctatcaaggtgatttgataaccttgcaaggcattcagtctactcctttttctgcagttactgaggcatctgttcatcaggtggttaagtggactcaaggcaattatatttgggctatggcagtacttgaaccagatttctctaagggctccccacctgttgaactagctgttcagtcagtattggataagttttcttccgtctttactgctaccaattctttgcctcctcatcgtgtgttggaccactctattgctttgattccaaattcggtccctgttaattccagaccttataggtattctccaacacaaaaagatgagattgaaaagcaagttttggagatgttgaatgctggtttgattactcctagttgcagtccatttgcttcacctgttttgttagttaagaagcaggataattcttggaggttttgtgttgattatcggcggctgaattctttaactattaaaaataagtttcctctgccaatagttgatgagctattgaatgaattggctggcaccaagtttttctctaaactggaccttcgcagtggatatcatcaaataaggatgttagaaactgatgaatttaagactgcattcaaaactcatcatgcccattttcagtttcgggtgatgccatttgggctcactaatgctccagctacttttcagtgtttaatgaattctattttcgctccattccttcgtaaatttgtattggtattcatggatgacatcttgatctatagtaggagtttggaggataacattcaccatatagagttagtgttacaattgctgcagcaacatcaattgtgtgctaagctttctaaatgttcttttcctcaaaataagttggaatacttggggcatatcatttctgctgagggtgtggctactgatccagaaaaaactagggttatgcaggattggccacttcctagcaatgtcactgaattaaggggctttttggggttaactggttattataggaagtttgtcaaacattatggcatcctggcaaaacctttaaccatgttactccaaaagaatgctaagtttgtatggacacctcaagctcagtcagcatttgttgctcttaaagaagctatgtgttctacacctgttttagcccttcctgactttgctaagccttttgtgattgagactgatgcttgtgccacaggaattggtgttgtgttgtctcaagaaggacatcctgtggcattttatagcaaggcattgggaattgtgaatcagcggctgtctatatatgaaaaagaatttttggctataatgatggcagttgatcgttggagatcttatttacttcggggtccttttgttatcaagactgatcacaaggctctttgtcatttagatgatcagactttggacactgagttacagaaaaaggcgatgactaagcttattggattacagtacaagttccagtataaaaaaggagttgagaacaaatctgctgatgcactatccaaagagattctcaactcctatgctgtagattcatctgctcagcagttactttgtgagctagctgtctcttctccaaatgctaagggtttttctttgtctaatggtttaatcaggaaggctgcttggcaagatgtttctatggactttatagaaggattacctctgtcaaaaggtgctaatgtaatctttgtggtggtggatagatatacaaagtttgcacactttttgcctctcaggcatcccttttcagccttgcaagtggctaaggtctatctgaacaatgtggcatcattatatgggttgcctaaatctattgtctcagatcgtgataaagtctttactagcaacttttggcagactttgttcaagcgctttgagattcctttacatctgtccacaacctatcacccacaatccgatggacaaactgagcgagtgaatcaatgccttgaaatgtatctcagtccttctaattctcctaatgctgatcagttattccaggaacgtgctatgttctcttctttactgaaacatcatttgtctcgtgctcaaaatcgtatgaaacagacagctgatgctaagcgcacactgcgctcatttcagcctggtgatttggtcttactgaagttgcaaccttatgctcaaaagtctgttgtggctcgtccttttcccaaactggcgttcaagtattttggtccatttccagttgtggctaaagtgggttcagtcgcatataaactgcagctccctgatcatagtgagattcatcccgttttccatgtgtctcaattgaagcagtacattccagatgcttcaccggtgttttccactcttccttctactctgcagttggatgccactgagttgattccatctgagattttggatcgccgaatggttaagaaagacaatgctgcagtggttcaagtcctggtgcgctggggtactttgtcgccggaattggccacttgggaggattatgacgtgctgcgtgctcggtttcctttggcacttgtctggggccaagctggtgctcgtgggggggggggcaaatgtcacgtgtgccattaccggacatcacagtggcgacaaaggaaggagaacaggggaaagcgtaaagtgagaagacgtgtcttcgccaagaaagcgtattgtgtaaagagagtgaatcacacacagaaaagcaatggcatcagctcatgtgccaactactgtggcttctatttggaggtctatagactaccgattccccctaacctcgctttattaattgatgcctaa

SEQ ID NO: 11652 - DNA, 4044 bp, Oryza sativa
  Clone ID: TFbOSC401158j.C1.o5.fg
atgtcgattgctgaaggagaagttgtcaatctgaaccagaaggtggtggatctcagcacgaacctcgaccgcatcctgggatcgctaaagggtgtggaggcttggattccaagcgtcgacgctggaatgcaaggcctccggcggtcggtggaaggaatcaaggcgcgggtcatcaagctggaggcccagtcgtcgacggcgacgcctccgccaaatgggcaccgcgtggacaacaagtaccagggtgaagcgactgcggcagagtctgcccaggagcgaaccctggtcaagagtaagatccaaatccctcaatctgcagttaatttcgaagttggggagagttcagagtgggggattgggaattctcaatttggaacacaggggcctagattacctaaaactgaattccctaagtttgatggagataaccctaagttgtggaagaaaaaatctgaaaaatactttgacatgtatcaagttccttatgcaacttgggcctcctttgctacccttcacttcgtaggaaatgctgctctgtggttacaaacttatgaggaattacatgctgtagaaagttggtcggagttgtgtgtagcagttaatgggaagtttggtagggataggtatcaacaattcttagagaaacttgataacttgaaacaagagggaactatagaggagtattacagtaggttcgaggagttgatgcataaggtactggtgtataataggggttatgatgagaccttctttgtgactaagttccttgggggtttaaaaactgagattaaggcagcaattaagctgcacaggcctggtactgttgatgctgcgttgtctcttgctaaaacgcaggaagagctattgatggaggtgaatttgaaggcatatcacaagaccactataaaggagtcgttcaagaataatttcaaggtgccaagtctagctaagggcatccttggccctccacctgatgagatcaagaaaactgaagaaaggcctaaatgggaagaacaatatgactcattgaatgcagctagaagagctaggggagagtgctttaagtgtggagaaaaatttggtccaggccataagtgtccaaaggctgttcagctccatgtcttggatgaattgcttgaggtctttcagttttctgatgaacctgggcaggtggaggagagtagcagtgatgaagaactgcttttatctgaaaatgctttgtttggaactgagggcaagcgtactatatggttgcaaggactgattcagcaggtcctcattttgattgattcaggtagctcaagcagttttatggcttctcatttggtggacaggttgcatctggttcccaatagcatacctagtgctctggtgatgataatagatggtggaaaattgttttgtgatgagatggctgagcaagttgagtggtggtgccagggtaatacattctcttctaacttcaagattctcgggttgggtggctatgatttgattttgggaatggattggcttgaggctcatagtcccatgtggattcattgggggcgtaagactggtatgcataaaaagggggtgatttcacagttaatccagctatgttccattcaagaaatagctgcaaaccaggaggcaattccaagggaaattgaggcggttttgcagcactatcaaggactgtttcaagaaccaacagaactcccaccacacagaacctttgaccatgagattcctttgttagatggggccaagcctgtcaacattaagccctacaggtatgctcctaaacagaaggatgaaatagagaaacaggtcactcaaatgttgcagcatggtgttatacagcctagccatagtccttttgcttcccctgttctcttggttaaaaagaaggatggtacttggcggttctgtgtggactataggggtttgaatgacattactgtgaaaaacaagtacccaatgcctgtggttgatgaattgttggatgaattgtcaggtttaaaatggtttactaaactggatctaagatctggctatcatcagattcggttagtggaaaaagatgagtttaagactgccttcaagactcaccaaggacattataaatttcgtgtcatgccattcggattaaccaatgcaccagccacttttcaggggttgatgaacactatatttgcacatgccattcgcaagtttgtgctagtttttgtggacgacattttgatctatagcaagaccttggctgaacatgtctgccatctgaaatcagtactgacagtgcttcaacaacatcagctctacatcaaaagaagtaaatgctctttttcacaaccttctctggaatatttgggacatataattggtgctattggggttgccactgatcctcagaaggttcaagctataagggactggccagtacctaaaaatcttaagcaattgagagggtttttgggcctggcagggtattatagaaagttcatcagaaattatggggtcatcactaagcctttgatagagttacttaaaaagggtaccttctttttctggtctacactggaacatactgcctttcaagaagtgaagcagtgtcttcagcaagcaccagttttggccatgcctgacttcaaccaacaatttgttattgagactgatgctagtgacaagggtattggggcagttctcatgcaggctggccatcctattgcttttctgagtaaggctttgggacctaaagcacaagggttttctacatatgagaaggaatgtttggctattctcatggctgtggataaatggcatcaatatttgcaatatgctgagtttgctatcctaactgaccacagaagcttgactcatctgtgtgatcagaaattgtcaacacctatgcagcaaaaggccttcctgaaattgttagggttgcaatggatggaagttgtggtcgatggttatcaccatgatcctgctacaaaacagttattggttgaattaagtttacatcctgatggggtcaacaatttcacattggttaatggcattatcaaattcaagggtagaatctggctagggaaacacgtggaagcccagcaagctgtcttactctccctgcacaatagtggcgttggaggccactttggtatagctgccacttaccaacgaatcaagagcatgtttgcctggcctggactaaaaagggatgtcaaggcttatgttcagtcttgtgcaatctgtcaacaagcaaaagccatcatctctgacagggacaggatctttacaagtgctttatggcaggaactctttcgactctcggatgtcaagttgaatatgagctcgtcttaccaccctcagacggatggccaaacggagcgtttgaatcaatgtttggaagcttatttgcattgtgctgtttattcttcccccgctctgtttgcccgtaagccaactagcttcggtgtgattgatatgggtcaaagtactatcccggatgtgcaacagttgcttgtcaatcgggcgaaattgaacgagttgcttcaccatcatctggttcgagctcaacagcgcatgaaagcacaagctgacaagcatcgttcaaaacgccagtttgcccctggtgatatggtttacttgcgacttcaaccatatgttcagctaaccatggccaaacgttcttgtcacaaattgagtttcaggtactttggaccttataaagtcctggaacggattggagcagtggcttatcgattggcattgccggctgggagcttgattcacctagtggttcacatctctttacttaagaaggcagtgcaacctgatacaccagtcagttcagatctacccctgacttgttctactgatgaagttgaagtctatcctaaagccattctacgtcgtcagttgatcaagcgtggtggttcttccattccttctgttctggtacgatggtcagggcttcctgatactcttgccacctgggaaaatttggccgacttatggcgtcgttttccatctgcgctggcttgggggcaagccagtccttaa

SEQ ID NO: 11653 - DNA, 1084 bp, Oryza sativa
  Clone ID: TFbOSC414007j.C1.o20.np
gatcaaagtttacatggccagggtttaagaaggatgtttagaacaatgtgaagttttccaacaagcaaaagctgaacatggcatggctccagatttgttacgaccactccatgttcccctacaagtttgggaaatacctaagtcaggcagattttatattattctagtggtcattgataaattcacaaagtttgcctagttgattcccctatctcatcctttcacaacacttactgtagcccaagctttcatgtccaatatttatgagactttgacatgccaactatttaaattggcatatgtgaaattgaacatgagctcatcctatcatccctagacagatgggcaatcagaaatgctaaatcaatgcgttgaagcatttttgtggtgtgatgttcatgcttgcctgactaaatgatcacaatagctctctcaagctcaacattgatacaacactgatttccatagagcccttggaaaataaccatatgaaattttatttgccagaaagcacacttattttggtgaagtgaatctggggcagagcataatgcctgatgtgcaggtttggctacaggaatactcacagttgaatgtggttctacgtcatcaactgatcaaggcacaacaatggtggttcatcaagccaacaaacacagaactgagaggtggttagaattgggggatctagtatacctgaaacaccaactcttgatacaccaaccctatatgcagataactgtagcatgacgttcctatcataaactcagtttcaaatactatggcccctacagagtgttagattgggtgagagctgtggcatacaaattggagctcctagtgtgtagtcagatacatctggttgttcatttgtggttgctaaaaaaggcattgaaggttggaacgcaagtaattactgatctccctaaattatgttgatactacagctgaagtcgtgcctgaagaagtgcttcaacaccaactgatcaagagtggtagggcaatgattcctcatgtcttgatacaatggaccagactgccaatggagttggcaacctgggaaaacctgtgccagctatgacaa

SEQ ID NO: 11654 - DNA, 555 bp, Oryza sativa
  unsure (1)..(555): unsure at all n locations
  Clone ID: TFbOSC16508j.C1.o1.np
ngcgttccagttagcnatgnnatgaacaacccctgcttttggtctnnnnnnnnnnnnnnnnnnnnnnnnnnnnnnnnnnnnnnnnnnnnnntaaagctgcagccatacagacaaacagcttttggaattcgcggtgcacttaaattacgatccaagttctatggacctttcaagatcatggagaaagtaggaagagtggcatataaactgcaattaccagaagggagtaacattcatcctgtgtttcatgtaagccaattgaagaagcacattggttctagagctgtaccaatggcgaatttgccttcagttggtccggacggacagatcaaaactgaaccggtggctgtgttgaaaagaagaatgattcccaggggaggagttgcagtaacacagtggcttgttttgtggcacaatctaagtccatcagaggcaacatgggaagatgcttcgatgatacaaagtatgtttccgtcttttaatccttgaggacaaggatcagctcaaggggaaggtaatgtcaggaattggacaagctttcttcgtgagaacaat

SEQ ID NO: 11655 - DNA, 4245 bp, Oryza sativa
  Clone ID: TFbOSC30417j.C1.o2.fg
atggctcaagatgggaaactcgatctcttgttgaagatgatggaggaggccgagaaggagcgggaggagatggataggaagcgcgaggagtcggaggccctgaatcttgtggagttgcagctgttgaagcttgcgatggagtcccgcatacccttggtggagaaacaggtgagcgagttggggggttctgcgaatgatttggcgaagagggtgaattccttgcaggcaagtgtggagaaatgtcagcgggaagttcagcagaacgcgctatacaaaggggaatccagccaaggaccaactcaattcccaaatgatgatgacctcaatggaaactcaccgaatcctttcctgttcacaccccaacaaggatggcgaaatcctccgcagttcaattctgtaagcccatttactcctgagaactcgggttgtccaatctttgattctggaatggctagtattggtggcaatgtcccttctatgtcttgccctcagtttgatggagaaaatccccagatgtggagagataactgtgaaatttattttgaggtctatggggtacatcctgctaattgggttaaggttgctctgctgaatttcactggaagtgcttcgttctggttgcaatctgttaggaatgagttggtagggatttcctggttggagttatgtgatagagtgtgcccgcagacaggcagtgtgactgagtatgtggagagatttgatagtctcatgcatcagctgttggcgtatgacaatgcccttacaccaaggtacttcctaactaagtttgtggatggcttgaaggatgacattagaggggcagttatgcttcagagaccggaagaaatattggaaggaagcagaaaaccaagttacaggaaatctgatggaaccaatttcaacaaggtgttttcccgacctactcagccaactgtttggccaaaaagtcctgctcagactactggagatgacaggaagctgattgagtcagggaagataagagtcaaggggttgatacaggggactaaattactgatgcttattgactctggcagttctcattccttcttagatgagaatattgttcagacaatgcaaggagttacatcccttccacaacctgttaaggttaaggttgctagtggtgaagttctgatttgtgacaaacaattaccggattatgcttggtggcttcaggggagatgttatagaaccaactttaaattgctttccctgcctgggtatgatgccatcctggggatagactggttacaagggctgggagtcatgagaataatttgggttcaaaagtggttggaatatgagatcaatggaagtccagttaggattcaaggggtgatgcccaaggttgatgcctgtcctctaatatctggagataaactcatgggcttgtgcaaaatgggagctcttatgcatctgtttcagattaccagtgaaaccgacatacataaacctgagattcccattatgatacaagaagtgatgaatgaattcaattcagtttttgaagaaccacaaggactgccacctaggaggcgttgtgaccattccattccattaattcctgggtctaagccggtcaaccttcggccctatggatacaatccagcccagaaggatgaaattgaacagcaagtacgagatatgttaaagtctggagttattcatcctagtgttagtccgtattcatctctggcattgctagttaataagaaagatggcacctggaggctttgtgtggatcatagactgcttaatgctatcaccatcaagagcaaataccccctgcctgttattgatgaacttttagatgaattggccggcacaggttggttttctaagttggatttgagggcgggatatcatcaaatcaggttggttgctggagaggaacctaagaccgcctttcaaactcattttgggcactttgagtatcgggtgatgtcctttgggttgacaggggcacttgcaaccttccaaggagctatgaatgaaaccttggcttcggtcttaaggaagtgcgccttggtgttctttgatgacatactgatttacagtccaaccttggaagctcatgctcaagatcttagaactgtcttgcaactcttgcaggatcatcagtggaaggtgaaattgagcaagtgctcttttgctctgaaggaactcaattatttagggcatactattggagtggctggagtttccactgaccctagcaaggtacaagatattgtcaattgggctattcctactaccttaaagaagttgaggggattcttgggaatagctgggtattatcacaaattcgtgaagaattttggtgtgattagtaaaccactcacaaacctgttaagaaaaggggttgagtttgtgtggactccggaggtgcatgagtccttcgagcaatttaagaaagctttggcttcagctcctgttcttgctcttccggattttactaaaccttctgtcattgagactgatgctagtgagatcggaattggtgcagttttgtcccaggataaacaccccattgcttatatgagtaaggcattgggtcctcgtactagggggttatccacttatgaaaaagaatgcttggcaatcctattggcaattgagcattggcggtcctaccttcagtatgcagagttcactatactcactgaccacaagagcttgatgaatcttactgatcagcgcttgcatactccttggcaacaaaaggcctatacaaagttgctagggctgcagttcaaaatttgttacaagaaaggaatccacaatgaagcagctgatgcccggtccagatgtgaccataactcttctttggaggtggttgctatttcgcaacatttgaacagagcacaacagtttatgaagagccaagctgacaagaaaagaagttttagagcttttgcagtgggagattgggtctatttgaagttacagccatatgtccaaacttcagtagcagccagggctaatcacaagctgagtttcaagttctttggtccttatgaaattcaagagaagattggtgttgtagcataccgtttagtccttccggcgagcagctctattcaccctgtttttcatgtctcgcagctcaaagcagctcaaggttttaaaggggatgcttctgttcatcttcctgttcagtcttctactaaacaagttcctgtggctattctggatactagggtgcgcaagtcaggtatgtctgttattcctcaggtgcttatacattggtctgatgatgtgatcgccaatgcaacttgggaagacttggaagatcttcgtactcgtttcccaagagcactggcttgggggcaatccagttttcaaggggggaacattgtcaaggctgcgttgggtgctgatgctgacattgccaaggaggagaagatcgaagggagagggaggaagaacgtgaaagcggcgcaggtgcttaccacgatagagaggtggcagcaatgccgggtggttgacaacaagttgatggcgatggtggatggcttgatggaagacggcgcaggaagtggggaagacgacagaggtggatggcataacagtgctgcgccattcgctgagaattcgcgtgagagagagagtgaggattcacaatcttgggctttgctatcatttggtatcagagccatgtccgctcccgccagcggttcgtctcgcactcaccggcgaacaggccgccggctctcgccgtctccgccgcgcgtgagcgggcgacagctcgtcgtgcagcggattgttaaggaagatggctccgtctactatccaatactcagacgctcaaattactccgattgggcggtgttgatgcgagtcaatctccaggctcaaggtctgtgggatgctgtcgacaccggcgatgtcccgtatcaggaagattgccaggcgctttcagccatcttgcgagcggtgccggctgagatggtccggccgcttgccgagaaggacagcgccaaagacgcctgggatgcgctcaaatccatgcgagtaggcgcagatcgtgttaaggagtcccgagcacagaagctgcgccaaacttttgagtccatgcgattcaagaatggcgaacacctggaggatttcagccttcgtctccagtccttggagatgatctgtctgaagagaaggttgtttgaaaattgcttcgcgtcgttccccggaggtatcgccaaatggctctatcgattgaaaccttga

SEQ ID NO: 11656 - DNA, 4062 bp, Oryza sativa
  Clone ID: TFbOSC412872j.C1.o11.fg
atgtcttccaccgtcaccaacgtcgccgacgattggaagaagggtctcgctgaggtcctcgaccgcttggactccatccgcggcaagctctccgacctcgacaatgaacagcaggcgcaccacatcgccatccagcgtttggaacgcgctggccgcgatcgctcgccgcgccgtaacaatcgcgaccgtgacgacgaccacgacaatgacggccgccgcggtgatcgtccgccacgctaccacaagattgactttcccaaattcaacggccaaggtgacccactccatttcctcaatcgctgtgaacaattcttccagggccagcgcacgccggaggaggagaaagtttggctcgcatcctaccacctgctcgacggtgctcggcagtggtatatgcgcatcgaacgcgatttgggcacaccgacatggcgacgcttctccgacttgctcaatctccattttgggccgccgttacgccaggcgcctttgggcaaactcgccgcctgccgacgcaagactaaggtggccgcctacatcgaccgcttcctcgacttgctcgctcgcgctggccctctcacggaggagcagcaagtagacctcttcaccaccggactccaagaaccactcagcatcgacgcgtcctcttcagcggcgccgaccccgtcgcaaccggatgcagcttcctcggtgggacaagcgtccacacaggttgcaggccgcacggttcgccgcctgtcccagtccgagatggacgaacgccgacgcaaaggattgtgcttcaactgcgacgagctctacgcccgtggccacaaaaaggtttgcaaacgcctattccttcttgatttggcttatgatgatgatgatgacgaggtggaaggcgctgcaccggctgtcgaaccggagacgcttcgcatctctctgcatgcggtcaccggcgtccgtccgtccaacgccatgcatctccatgtccgcttgggcgacgccaccctccacgcgctcgtcgacacggggtcgacacacaacttcctgtcccaggaggccgcagcacgggtgcacttgccgctcgtccaacgcgctggcctgcgcgtgacagtcgccaacggcgacaaggtgccctcgccagggatgttccaggacgcgcgcatctccattgacaccgaggtgttcatcaccgacctctacgtccttccattgggcggctacgacctcgtcctcggcatgcaatggttgtcaacgctgggccagatactatgggactttggccaacttaccatgtctttttggcacaaagatcacatggttctgtggcgtggcctgcccacgggcgcttcaccggctgcgcacgtcgccaccacccgcgacctgctcgacgacctcctcaccgagttcgccgacgtcttcgccacgccatccggccttccgccaccacgccatcaagaccaccgcatcactttgctgcccgacaccgcgcccgtggcggtccgaccttaccgctactcggcgcgccacaaggacgaactggaacgccagtgccgcgacatggaggcccaaggcatcatccgccgcagctcgtctgccttctcctcgccggtcctcttggtcaagaaggccgacgggtcgtggcgcttctgcgtcgactacagggcgctcaacagccgcactgtcaaggacaaattccccataccggtggtcgacgagctcttggatgaactccacggcgcgcgattcttctccaagctggacctccgctctggttatcaccaggtacggatgcgcgacgccgacgttgagaagacggcattccgcacccacgacggcctctacgagttcttggtgatgccctttgggctgaccaacgcaccggcgacattccaatccctgatgaacgaggtacttgagcccttccttcgccggtttgtgctcgtgtttttcgacgatatattgatctacagcccgtcgtggtcatcgcacctacaacatctgcgcgccgtcttcaacacgctccgcgcccacaagctgttcgtcaagcggtcgaagtgctccttcggggacacctcggtcgcttatttgggccacgtcgtctccggccagggcgtcgccatggacgcctccaaggtgcaggcagtggtggactggcctcgcccctgctccgcgcgagctctccggggcttcctaggccttgcggggtactaccgcaagttcatcaacgatttcggcgccgtggcggctcccctgacacgcctgctcaagaaggacggcttcttgtggtcgccggaagccgaggtagcgtttggacgtctcaaaaaggcgctcaccacggcgcccgtcctcgccctgccggacttcgatcagccgttcatcgtggagtgcgacgcatcaggcacgggcttcggcgcagtgctgcatcaggatggaggacctattgcctatttcagccgcgcctttgcgccacgccaccacgccctggcggcctatgagcgggagctcatcgggttggttcaagcagtccgacactggcggccgtacctttggggtcgccggtttgtcgtcaagaccgatcacttcagcttgaagtacctgctggaccagcggctagccacgctcccgcaacaccactgggtcggcaagctattgggctttgatttcgaggtcgcctacaagccggggcggcagaacacggtggcggacgcgctgtcccgccgcgacgagccggctgcctcgctttgcgccatcaccacgccggtgtttgactggctacaggatctgcacaccgccaacgacacggaccccgcgctggtcgccctccgggaccagattctggccggcaacaggacagcaccatgggcactcaccgacggcatcgtcaccttcaagcagcggatgtacattcccccggcgtcagcccttctccagacggccctggcaatggtgcacgatgacaagcacgaaggcatccagaagaccttgcatcgtctccgccgcgagttccatacgccgggtgaccgccgtgtggtacaggaattcgtcaaggcttgcgccgtctgccagcggaacaagacggaacatctccaccccgccggcctgctcctgccactgccggtgccgtcggccgtctggtccgatgtgtccatggacttcgtggaaggatttcctcgcgtcgcaggcaagtccgtcatcctcaccgtcgtcgaccggttctccaagtacgcgcacttcatcacgctgtcgcacccatactccgccgagtctgtggcgcgcgccttctacaccgacatcgtacgtctgcacggcatcccaacatcgatcgtgtccgaccgggatccggtgttcacttcgacattctggaatgccctcttcgcggccacaggcaccaagctgcacatgtcatcggcgttcctcgacgacattcgctaccggctggagcaggcccagcagcatgcaaagaagttctacgaccgccaccatcgggagctgcaatttgtggtgggcgactgggtttggctccgtcttcgccatcgcgttccggcatcattagcaactccggtaaaaggcaagcttgggccgcgctattatggaccatacaaggtactggaaattatcaacaaggtggcttatcgcctcgctctgccggctggggcgcgcctgcatgatgtgttccatgtcggtcttctcaagccgttcgtcggcacgccgccgacgtctccaccggcgctgccctcgacactacacggagcggcgttgcctcagccagcacaagtactcaagtctcgtatggctcgtggggtgcatcagctgctcgttcgttgggacggtctgccggcatctgcaacgtcgtgggaagacttggacgatttccgtactcgctatcccgcattccagctcgcggacgagctatttgtcgaggaggggagagatgttatgtggggcattcagtatcagcgccggaaccgacgccaacagccagagcaggcgccgttggacaccaaggaagaacttggtgtcaatggttttaagaaaggagaggtcaatcctgtatgctcatttctgatatatggaaactag

SEQ ID NO: 11657 - DNA, 3357 bp, Oryza sativa
  Clone ID: TFbOSC414256j.C1.o13.fg
atggagaaggcgaccgcgacgaccaaagtggctggccggagacagaggggaatggatagctcaccggctcacgagggagatggggttccggtggggttccggcgacgcgaggcggtggccgagatggcccacacggcggcggagctagcggcggcggcggcttggcgcggcggcggccctagtggcaacggcacgcggccggagatgggcggcggcgacggagctcggcgagcgtggcgcgacggcggtagagggcgtgggagaggacgtccactagagctcatgaaacgtgtagaaattgggaggagtttgttagggcagtgtgtgcaaaatttggaggaggttttggaatctgttcgaagggaaaatcgtagagccgaggttgtgggaggagcacgcggcagtttcaaatctgggggtttctcttctgtgtcagctcgtgcaattcctggtgttggtggacgagcggatgatcggcgtagtcaggatgatcatcgcacacctgaggacaagattgcagccctacaagcctatcgtcgagcgaagggtttgtgtcacacatgtggggagaaatggagtaaggaatacaagtgtggaccaacagtgcaattgcatatagtggaagaattgttgggtatgttccctagtgaggctgctgatgggtgtgacagtgattgccgggaagatgaagttactgaatctgagggagttctctgtcaaatctccaaagaagctatactcgaatttgctgataagctttctacccagcaatatttctgtccagctattaaggtgaaagtggctgatggagggtctatttttgatgaaccacaagggttgccaccatctcgagtgtttgatcactctattccattgcttccgggtgcaaaacctgtcaatttgcatccttatcgctacaacccagcacaaaaagatgaaatcgaaaagcaagtacgtgagatgctgcaacaaggtgtaattcagcccagtgccaaccctttttcttctcttgtccttttggtactgaaaaaggatgggacatggcggttttgtatcgattaccatcatttgaatgctattattgtcaagaacagatatccccttccaattattgatgagttgttggacgaattgttgggtgcttgtgtgtttactagtttggatcttcgagcaggctttcataaaatccatatgaagctggaagatgaacacaagacagctttcaagactcacaatgggtattacgaattccgggttaagcgctcgaagtgtacctttgccagttcacaactcacatatttggggcatgtcattagtgatgcgggtgtgtccaccgaccctaagaatattgcagctgttgttcgttgggcagtacctcaaaatgtgaaggaagtgcgcggatttttgggcttagcaggatactaccgcaagtttgtgcgccattttggggtgatcagccgtccccttactgatctcctaaagaagcatgtcgtgtttgtttggactagcgagcatcaagctgcttttgatgcgttaaaggcagctttgacttcggcaccggtgcttgcacttcctgactttactcaaacttttgagattgaaactgatgcttcagaccggggagtgggagctgttttgatgcaagtggaccattggcgttcatatttacaatttggggagtttatcatccgtactgatcaaagaagccttattcatttgggggatcagcgtcttgctaccctttggcagcaaaaagcactcaccaaattgcttggactgcagtacaaactggtgtataggaaaggtgttgagaatcgggcagctgacgctctgtcgcgctgtgactctcctgagattcttcagttaagtgctttatctgtgtgtgttccctcctggttggatgaggttcgggacagttatgctagtcacccacatacatccagcttgctttctcaagtacttttgcaaccagaatcagctcctcattttagtgtaacagatggagtattacgttacaaggggcgcatttggttgggccataatgtgggactacagcagaaggttcttggagcattgcacaatgctgctgttggtgaccattctggagtgcaggtaacctatacccgattgcgcagactgtttgcttggcctggtctcaagaagtcggtgcagctctttgtggattcctgttctatgtgtaaacaagctaaggcagaacgggtgcgatacccgggacttcttcagccattacctgtcccagaacatgcctggcaagtggtgtctttggattttatcgaaggattacctctctcattgggattcaactgcattttggtggttgtggataagttttctcgctatgcacactttattgccttggctcatccgttcacagcttttgatgtggctttagcatatatgcaaaatgtgtacaagcttcatggtctgcctcaatctatgatttcagatcgtgactgtatcttcaccagtaatttatggtctgaattgttcaaattgactgatactcagttgcgcatgagttcggcatatcatcctcaaactgatggacaaacggagcgcgtgaatcagtgcttggaaacctttcttcggtgctttgtccatgcttgcccgcgtaaatggtttcggtggttggcgttggcagaattttggtacaatacaactcctcactctgctctcggtaccactccttttgaagctttatatggtcatcctcctcgccacttcggtgtacgttatattgctgaatgtgcggtacctgacttgactgaatggttgcaagagcgtcagatcatcactaatctcttgcgtcagcaccatcttcgtgcacaacaaaggactaaatctcaagcggacaagcatcgttctgatcgggtcttcgctgttggggattgggtttttctgaaggtgacggcgcgtgttggtccggtggcttaccgtttgcagccgccttacgactgtgctatccatcctgtcgttcacgtatctcagctccgcaaggcttcacctccacaatcagctgttgcagttcggcctcttcctcttgttgagtctgaagaattgattccagttcagatcatcgctcgtcgtctgtacaagcgtggcgcggctgctgtggagcaagttaaggtgcgttggatggggcaatcgtcttctgatgctacttgggaggatcttgctgtgctgaagcagaagtttccaactgtgccggcttggggacaagccggttgcccagaaggggggcatgttacagctgatgataaccctatcaagactatcagacgctcagctagagagagacggcccaacactcgtgtaactgggccggagtgggtctga

SEQ ID NO: 11658 - DNA, 6579 bp, Oryza sativa
  Clone ID: TFbOSC401612j.C1.o11.fg
atgaaacatttgaatgatgttagggttggaagtaaagtagcaaggatgtatctagtgcaggctaattgtgttggtggttacaaagggaggtacttctacgagtgtgtagaatgtgatctcggtggcaatttgctgtgctgtgatagctgtccacgaacataccacttggaatgtcttaatcctcctctcaagcgtgcaccacctggaaattggcaatgcccaagatgtcgtacaaaaaaagttagcttgaagctcttagacaatgctgatgctgacacctctaaacgtgaaagaacaaggagaatgcgcacaagcaccacatcagatagcccatccccatctccacaaaacaaagcctcttttaacacatcacgtggtgctgcatttagggatgatgaaccaggtgcaaaagacaatgaagttgagaaaaggaaaccattgatattacatttgaagaagcgttcaaccaaggaactatctacagataccacatcatcaaagtcagggttacttggaaagtcttcagaagagaaacaggagaaacacggaagtgctttgaaagtgaagaaacatctgcatcccatggaattatctccaaagaaatataagaacaagaagcaacacaatcacagagacagtaagagatccgaagcaaaaaaggtccaatatttggcatcagatgtggacagtgattcttcaatggaaccatctacttctcttgagcacagcgaatcgccgcccccaaaaagaaaatcgttggatggaagaacacctgcatcaagtaccaagaaaggaaaaaagaaagtgaaatttgttgataaaaagcaccctgagaatgctgttcatataactgaaaaggagcatggtggtgcaggagacaaaataacaactcagggggatctgcaggttgatcgcatcctaggctgtcgacttcagacaagccaaatcatttcacctgcccatgcttcatcagagcagattgatatggcccctcctagtgcatccggtgcaccagaacctagtcaagcccttttaaaaggacttcatgaagaaattcagtcttctaatagtgatactaatgtgacagaggatgcatgtgctgatgaattagcaaacgatggtggggaaaataatttggattgttctgatgctcaaaaggagagtaatgttagatcccatggacacaaggaatcacttaacgcaaaagaaatcatgaatacagcatcagcatgttccgctgatcaaatcgtcactgttaaggatgctggagcagtacagacatatgtaacagcttcagtaaatggtgaatatgagacagtaactgatattccagaagaaaagaatgacaccaaacatccagtttccaaagctgacacagaagtccacactaaacaagaacatacacctgatagtaaattgcatgggaaaatacaagaaactgaattgaaggagcacgacggaactacttatgagtttttagttaaatgggttggcaaatcgaatatccataacagctggatttctgaatctgagctgaaagcattagcaaaaaggaaactagaaaactacaaagcaaagtacggaacagatgaaatagaagaggctttgatcaaatggtgtgcccttccatatgacgaatgcacgtgggaaagattagatgaacctacaatggtgaagtatgcacatttggtcactcagttcaaaaaatttgaatcccaggctttggataaggataagggaggtagccatgcaaagccaagggaacaccaagagtttaatatgctggttgagcagccaaaagaactccagggaggcatgctcttccctcatcaactggaagcattgaactggctacgcaaatgctggtacaagtcaaaaaatgttatccttgctgatgagatgggtcttggaaagactgtgtctgcctgtgcttttctatcatccctatgttgtgaatataagattaacttgccatgtcttgtcttggttcctctttctactatgcccaactggatggctgaatttgcatcatgggcacctcatttaaatgttgtggagtatcatggttctgcacgggcaagatctattattcgtcaatatgagtggcatgagggtgatgcaagccagatgggtaaaatcaagaaatctcataagttcaatgtattgctcactacttatgaaatggtgcttgttgatgctgcatatcttcggtctgtgtcatgggaggttcttatagtcgatgagggtcatcgtctgaagaattctagcagcaaacttttcagtttactcaatacattatcatttcagcatagagttttgctgactggaactccgttacagaataacattggtgaaatgtataacttattgaacttcttacaacctgcttctttcccttctctagcttcatttgaggagaaattcaatgaccttacaacaacagagaaagtggaggagctgaagaaccttgtagctccacatatgcttcgaagactgaaaaaggatgcaatgcaaaatatccctccaaagactgaacgaatggtgcctgttgaattgacatcaatccaggctgaatactaccgtgctatgcttacaaagaactaccaagtattgcgcaatattgggaaaggtggtgctcaccagtcattgttgaacatagtaatgcaacttcggaaagtctgcaatcatccgtatcttattcctggaactgaacctgaatcaggatcaccagagttcttgcatgaaatgcgaataaaggcctcagcaaagttaactttgttgcactctatgcttaaaatcctacacaaggatggtcatcgagttcttattttttctcagatgacaaagcttcttgacatccttgaagattacctgacttgggagtttggtccgaaaacatttgaaagagtggatggttcagtatctgtggcagaacgccaggcagcaattgctcgttttaatcaggacaagagtcgttttgtattcctgctatctacgcggtcatgtgggcttggaattaatttggcaactgcagatactgttatcatatatgattctgatttcaatccacatgctgatatacaggcaatgaacagagcacacagaattggacagtcaaacagacttttagtttacaggcttgtcgtgcgtgctagtgttgaggagcgtatcttgcaccttgcgaagaaaaaattgatgcttgatcaactttttgttaacaaatcagaatcacagaaggaagtggaagatatcattcgctggggaacagaggaactcttcaggaatagcgatgttgcagttaaagataataatgaagcttctggtgctaaaaatgatgtagcagaggttgagtttaagcataaaagaaaaactggtggactaggcgatgtttatgaagacagatgtgctgatggttctgctaaatttatttgggatgaaaatgctatcacaaagcttcttgacagatccaacgttccatcaacagtagctgaaagcactgatggggacttggacaatgatatgcttggcactgtaaagtcaatagattggaacgatgagctgaatgatgaccctggtgccaccgaggacatcccaaatattgataatgatggttgcgagcaggcatctgaagcaaagcaggatgcagctaatcgtgttgaagaaaatgaatgggataaactcttacgtgtcagatgggagcagtatcaaactgaggaggaagcatctcttggtcgaggtaagcgtttaaggaaggctgtttcttacagggaaacatttgcaaccattcctaatgaagctttaagcgaggactctgatgaggaggatgaaccaaagcgagaatacactgcagctggactggctttgaaggaaaaatatgaaaaactccgagctagacaaaaggaaaggattgctcagcgccatgtgattaagaattatgctgatgacagacttgaagaattcatgaaactatatgattccagtgcaaatcccttgagaattgtagaagatcccaatcctgtgcagccatctggggctaaacgtctcggtgaatcaactgcagaaatgaagcaatcctcgaagaaaaccaagagatatcctgaaattcctcaagagctttatgccaagcttactggcaatgctgcttcatcaaaacatcacccaaaggcagcagatatctccaattcaggaactccacatcaccttttacctgttcttggcctttgtgctccaaatgctgatcagatgaactcatataaagggtcagtttgtgggccaagcacaaaggagcaaaaaagagctagtggtgaactagccaacaaaccgctgttgactcctgctgttgatcattctagcgaacaaaaacatgatggccaaccaactccttgtaagcctatgtttcctggttcctccgaggagactttgcgaaggctgaataatatcattccagacagttacttccccttccaacctattcctcctatatccgggaaggggattggtgatcatgtagaaaatcctgtatcgtccattccttcatttcaagggaaactgggtcttcctaattttagtctggaagacagtattccacttaagcatttgaagtcagtaccggatctatttcccaacttgtctttgggcactagcaatgaatatcttcgtaattgtgtcccagaattgccaaatagttcatttctaccaagctttatggcagatattgctggaacttcaaagcagaagaacaagttcatggcagatatgtctggccttcttccaggtttggcaatcaacccagttcaacaaatccattcgtccatgcctgaaaatcataagaaggtcttggacaaattaatgatgcgtgctcagtactcctcaagcaagttcttgaagaatgcctcaaataaattcctgaagaagagtttaaaaccagactattggtcagaagatgaactcgatgctttgtggattggggttcgcaggcatggaagaggaaattgggaggccatgcttagagatccaaagctgaagtttttgagccaccgatctcatgaagagctggcctcaagatggattttggaggagcagaaaattatagaggaaccaatgcctacagccaccagaagctccaactctacatcatttcctggcatatcggatgcaatgatgtctcgggcacttaatggaagtagcttttccaaactgaggatggagccgccaaagttgcagtcccacctaactgacattcagttaggttgcaatgatataccaaccagattttctcatgttgagcccactaattacatgaatttaagtgagggtggtccatcactgacaccgtggcaggatttcaaaaatagatcaggacacagtggagattttcctggcccacttgacaagtgggagaaacctgatatggggttgatcccaccatttatgccgaatccttttatgaaggaaagcattgggtcactgcccataaacagacacagcagtaattccattcagcagaatgaagttggatcaagttctcatgagagcatacttcatggtttttcggacggacaggccaaattattccatgagatgcaacggcgtgtgaagttagggaaattacccattgagatgaatctgaatcacacaaagctgtcagatcctctagctgagaactctggtgattttgaaagttcaaaaccgaacaagctaccgcactggcttcaggaggctgtgcgtgcacctccatccaagccacctgaatgtgagctaccagcaactgtttcagctattgctcagtctgtgtgcctactacttggagagcaaaaaccagcaatacctccattcccgattccaggacctcgtctctctctccccaaggacccaaggagtgctccaaagaagaggagagttcacaaagttcagcaagcttcctccctggtagatcattccaaaactacagttgggcaaggtgaccacaactctactccgtcagcaccactatccatggaagccgcacctgcctctcctgcagttattaaaagcagtgataccccctcgctcaacttgaactcaccatcttcatcatcagctggcagtcgggggcaggatgcgtcaaccccttccacttttgaagaaccagaaagaaccatggaagtttcagaacctgcttctgtcgctgctgccacttgcccgtccaggccagagcctcctgagactggtactcacagaatcgagttctccgcggtagatgacatggatactggatcttgtagatcacctgtgagggatactcctgaccctgacaatcagaagagcgaattgtctggatcaggtaatacacctactgaactttctgtattaccgttggttgatgcacctgggacgagcagcgaacctgctgtagtgcccgtatccagcgacgaggagtcaacccaagagggtgtaccaggcaaagccgtaagcaccggcgaccaggagaaacggacgccccctgatgagagcgaaaattcaggtgcggcaaatccagtttcggcagctcagacagctgacgaagataaggtggacgagatgatcacagatgagcattag

SEQ ID NO: 11659 - DNA, 4544 bp, Oryza sativa
  Clone ID: TFbOSC400800j.C1.o28.np
atgaaatccatggaggagcgcttgttggatgccatgaatgcaatggctgccaaggacgacatcgccacgcacttgatgtagattgacctcaaactcgagcagcagggcgagcggttgggtcgggtaaaaaccaaggtggatctctccttgacctcccttgaccaggtgcagcaagagcaaacttgggtctaacgggctctgaaggcggtcattgtggcaccatcaccaccgccaccgttgccgccggaaacaccacatcaagcgccaacctcgtctgaaccacaaccaccaccacctcctccattgggtaccttcacctcattactctccgggtgattgtgagcattgtgacatgggtcatcgtcagtggactcctaaaatggattttccgaagtttgatggaaatggggttaaggtgtggattgataattgtgagacttattttgctttctatcaaatcacggaagcatttctagtttcagcaacatctatgaatctcatgggtgatgccgcaaattggtatcagacatggaagttagaagtgggttggcatgattgggagatgttgaaaactgctatttctagggaatttgatgtgcacctttggtctgtgaaaatggatgagttactgttactcaaacaaactagcacagtgatagaatattgttcaaaattcagtgaacttgtttatcagattcgtctctatgacccgctcttgtgtggttctgttttggtttctcactttatgttgggactgaaggatgacttgaggtctttcgttcaggcagctcagcctactactgttacccaggattgtcttgttgctttggctcaggagggtgctcatattggacaaccaaggaagaggtttaatcaatgccgagataatgctgttggtagaggcaatgagaaacctaagttggctcgtggtgagttgtggaaagcacagcagctgaaggaatatagaagggctcagggtctgtgtttcaaatgtggtgataagtatgtttctggtcaagtctgtgtcaaacaagaggctgagttaaagttgctgtgcaggaagagccagtgatcttgtttgatgatattttggatgctgtcactgctcctgaattggtagaagaggattttaatctctccttgcatgctctagctggtacctgttcttcggctactgttcagctgagagcgctggtgggtaatcaggttattctgatttttgtggattctgggagttcccacagctttgtgaattctgatttgtgtgccaagttacagcttcctactactgcaactctacctatttcagttaaagtggccaatggagaggtactgtcttgtgatgccaagattccccaatttacttggtgggtgcagggatatcatttctcttttactatgcgtcttctacccatgggatgatatgatgtggtgctaggcatggattggttaacacaatatagtcctatgacctgtgactaggctgcaaagacaattcagttttcctatcagggggctgaaattattttgcaaggagttgcctctcctattgtaattgaagtaactgaagtctcagcaactcaggtggttaaatgggatcagggtaatgatatatgggctatggctatgcttgaacctgttgctgcactgtctagttcttcttctgaatatcctgctatacagcagctactgcagcagtatagtaccctgccccctgatagggtgctgaatcattcaattaccttgttacctaattctgtgccagttaattcatgaccttacagatattctcctgctcagaaaggtgagattgagaaacaagttttcgaaatgttgaccgctggactcattactcccagttgtagcccttttgcatctcctgtgtcgctggttaaaaagaaggacaacagctggagattttgtgtggaataccgcaggttgagttctttaacaattaagaacaaattcctttgcccatagcggaggaacttttggatgagctagctagtactaagtttttctccaaacttgatcttaaaagtggatatcaccagattagaaagttggaggctgatgagtataaaactgctttcaaaacccatcatggtcatgtccaattcagggtgatgccatttgggttaactaatgcccctgcaacctttcagtgtctcatgaattctatctttgctcccttcttgagaaaatttgttttagtgttcatggatgacatattgatatgcaacaaatctttggaggagcatggtcaccacttagagctggtgttgtagttgttacagcagcatcagttatgtgctaagttgtccacgtgttcatttgccacttctcaattggaatacatgggccacattatctttgctgaaggtgtagccacagatcctgagaaaactcaagctatggcttcttggcctattcctactaatgtcactcaactaagatggttttttgtctcactgggtattatagaaagtttgtgcaacactatggcattttggctaaacctctcaccatgttgcttcagaagaacactaagtttgtatggactcctcaagctcaggaagcttttgcagctctaaaaactgctatgtgtactacacctgtccttactctccctgacttttccaaaccttttgttctggaaatcgatgcttgtgctactggcattggagctgtgctatctcaagaagggcatcctgtggcttttacaggaaagcattgggcattgctaatcagaaattatcaatttatgagaaggaatttttggctattataatggttgtggataagtaaagatcttatttactcactagtccttttgttattaaaactgatcataaagccctttatcatttggatgatcagagtttaggtacagatttgcagaagaaggccatgactaaactgattggtctgcagtacaaatttcagtataagaagggggtggataataagtctgctgatgctttctctagagtggggcatctttttcctatttcagttgttcaacctgcttgggttcaggaggtccctaattcatatgtggtagatctttttgctaaataattattgcaataattggccattacctctcctaattctcaaggttttaccttgtcgcatgggttgataaggaaagctgataaaatctggattggagttaattctgctttgcagaccaaactaattgcagccttccactcttttgcaataggacgtcactgtgggattcaagctacataccagcgagtgaagaaattgtttgtgtggaagggtttaaagaaatccatggaagaatttgtctagcaatgtgcagtgtgtcagcaagctaaacatgagcactgttcttatcctgggttgctgcaaccattaacaattccatatggtgcatggctagatatctcaatggactttgtggagggtttgcccacttctaaggggagcagtgttatcttggtggtggttgacagatacactaaatttgctcattttctgcctcttaaacatcccttttcagctttgtaggtggctgagttatttctgaacaatatggcttctctctatggtatgcccaagtccattgtttcagatcgcgataaggtgtttacaagtaatttctgggcagactttgtttaagaggtttgaagtgccattacatctctctactgcataccatccatagtctgatggccataccgaacgtgttaaacaatgcctgtagatgtctttgaggtgtgcggtctcctcttccccacattagtggtgtgcttggctccctttagcacagttttggtataatacaaattaccactttgccttacaatgctctccttaaaaatcactgttggcactgatccttcgtatggtcttcttcctgccatgtcagttaatgcctttgcatctactgactctgattctcctgtagctgatgctttgctcagagaacgtgctatgttttcttctttgctgaagcatcatctcacctgtgctcaaaataggatgaaaaaaacagctgatctgaagcgtactcgtcgctcatttcagattggtgatctggttctcctgaaacttcaaccgtatgcccagaagtctgttgtttctcaaccttttcctaagctggtgtttaagtactttggtcctttcccaattgtggataagattggttctgtggcatatcgattgcaacttcctgatcacagtgggtttcatccagtgttccatgagtagcagctcaaacaatttgtccctgatgccaagcctgtcttttcttcgttgccctctccattgcagctggacattactgaattggttccctctgcaattttggatcaccgtatgttcaaaaaaaggtaatgccttggtggttcaagagcttgttcgttggggctctctggcaccagagtgggctacatgggaagattatgaagtggtccgtgccaggtttcctgagccaatcgcttggggacaagctcctgctcggagggggaagggggggggggggggcaaatgtcacgccagacactctgatg

SEQ ID NO: 11660 - DNA, 4868 bp, Oryza sativa
  Clone ID: TFbOSC411504j.C1.o5.np
tcaaaactcatcttcagatccaagtcgacgacatggcgaagcaaaacgagggattcgagaagactttgttggagattcaagcggcgatcggaaccatggtcgtcaagcaaggagagacacaagagatgctgctcaaactggacaaatctgtggctggatggcgacctcaagttgatgctgctatacaagggttgcacgaggagggcggcaattcgtcgaacacctcgcaggcgtcaaggatggcggaggaagggagtcaccaaactcctctgcttcctacgcccagcacgccgccgttgttttccggaacagcggcgagcgaactcggtccagatggccaccgcgtcgcaaattttcaccgggggaaggcatcgggggtagttcatactctcgggccacctccggtcaagggtacgtaccaaattcccactgaattttctgttcctcatgggattgagtttggcgcaaattcgagtcggggaaatcgggatttgcatggggagcaagggttcaatcatagactaccaaagttggattttcctcagtttgatggctcggatccacagggttggaggttgcgttgtgagcattattttggggtttatggaactcatccaaatttgtgggtttgggtagccaccatttacttcatggggagggcagcgtcttggctacgttcatctcgtgctcatgaagtttttgtcgattggggtcgattctgtgaagcggtgaaccgaaaattcgatagaaatcaacatcggcaactgattcgacagcttgatcagattaaacaaaccggttcagtgagcgagttttatgaatggtttgatgatctgatgaatcagttgttgacgtatgatcctatgtataacactttgaatttggttcaccagttcatagaagggttgcgttttgacattcgcaaagctgttttgttacattgccccaaggatttggagtctgctctggttttggctctattacaggaggagttgtctgagcggaatcaagagcaaaggaaatttggggatggatcgcagaagtttaaaaatgcatatccattaccattgccaccaaccaaggctctgaaatctgaggagaagaagggtggagagctcaatcggggtactaatctttctgacaaggttagtgcacttcgatcgtttcgtcgtgcacaaggtttgtgttacttatgtgccgaaaagtggtcgccgacacataaatgttcaggaacagttcagcttcacgctgttcaggagctctttgcactatttcctgacaacgtaaatgaggatcaggctggcatatcttctgaagatagtgattcttcattgttagctatgtcagttcatgctgttcagggtactgattctcagtctaccattcggttacaaggcaaaattcaggggttgaatatactgatgcttgtggattctggtagttcggctagctttgtcagtgatcaattggctgaccgtcttactggagttcagttcttagctcatcctctgtctgttaaggtggccaatggacaggtgttgcattgtcagaaagaaatgccttctgctgaatggtttgttagtggtcagaagttcttgaccacatttaaagtggtggctttgggaggttatgatgcaatattaggcatggattggttaactaagtatagtccaatgcacattgattggcagcttaagtctattcacttgatagttatgggtcatgaagttttgttgcgtggggtgcagtccaatacgtctgattgtgctttgatttctagtcagcatttacagcatctgcacagtatcgactcattatcctcaattccagatgctgtccagtctttggtacaggaattctctcatttatttgaggaaccaagtggattacctcctgctcgagattatgaccatacaattcctttgattcctggggctgtgccagttaatgtgagaccttaccgttatacacctgctcaaaaggatgagatcgaaaaacaagttaaggatatgttacaaaaaggaattattcagccaagtgctagtcctttttcttctcctgttttgttagtcaaaaagaaagatggcacgtggaggttttgtgtggattatcgccatcttaatgctatcactgtcaaaaacaagtatcctcttccaataattgatgagttaatggatgaattggcgggagcttgctggttttctaagcttgatttgcgtttagggtatcatcaaattcggatggcagttggtgaggaggctaagacagcttttaaaactcacaatggtcattttgaattcaaggtgcttcccttcggacttacgagtgctccagctaccttccagggggtgatgaatacagttttagctgatcaattgcgtcaaaatgtcttggtctttgttgatgacattttggtatacagtcgcactttggaggagcacaagaatcatctgcgtcaggtgtttgagactctgagtaagcatcagttacgagtcaaattatccaaatgttcttttgcacagactcaactgtcttatctagggcacattattagtgctgatggagtttcaacagatccagaaaagattcaggtggttcggcaatggccagttcctgtatctgttaaagatgtgtgcagcttcctaggttaggcagggtattatcgcaagtttgtccgacattttggcatcattagtaagccatttactgagctattgcgtaaagggcagccttttatctggactcaacaccatcaaaaagcttttgacactttgaaacagagtctgatatcagcaccggtgttggtcatgcccgatttccagaaaatgtttgtggtggagactgatgcttctgaccgaggaattggtgctgtgcttatgcaagatcagcatccggtggcatttttgagtaaggctttaggacctcggactcaagttctttccacttatgagaaggaaagtctggctattattcttgctgttgatcattggcgctcgtatttacaacacgaggaatttttaattcgcactgatcaccgcagtctggcctttcttgataaccaacgattaaccacctcttggcaacataaagcaatgactaagttgttgggtcttcgttatcgaattgtttacaagaaaggattagagaatggagctgcagatgctttatctcgtagatcttctgatggtcttccaattttgagtgcattatctgttggtctaccggattggttacaggatgttgtttcgggttataaatctgatcccgaagctcttcagcttttgcattcttttaaggaaggtacacctcattctgctcattttgagttgcaaaatggtattctttatttcaagaaacgtgtttgggtgggcaataatcggcagtttcagcagcaagttctagcaaatttgcacactgctgctctagggggccattctggaattcaagtaacttatcagcgcgttaagcagctgtttgcttggccaggtttaaggcaaactgtgcaggattttgtgcacagttgtgtagtctgtcaacaagctaaacctgaacatgtgccttatccagggttactacaaccagttcaaatacctgaacatgcttggcaagtcatatcaatggattttattgaaggattgccccgttcagcctcttataatagcattttggtgattgtggataagttcactaagtttgctcattttttgcctttatcccatccattcactgctgtgtctgtggcacaattattcatggacagaattcattcaatacatggactaccgctggccatcatttctgatcgtgatcgagtgttcaccagtatttttttggaaggaattgtttcggcgttctggcactcaattacgaatgagctcttcttatcatccacaaacggatgggcaaacggagcgcgtgaatcaatgtttggaaatgtttctgcgctgttttgttcatgcttgtccatctaggtggagtcagtggttatctcttgctcaattttggtacaacacttcatttcattctgccttgatgttgactccttttgaagcaatgtttggtcataaacctcgtcattttgggctctcagtggattcggttggggtgcctagtgcattggatagttggatgcaggatcgtcataacatgcaaagtttgattcatcatcatttggttcgagctcaacaaagaatgaagagtcaggctgattctaagcgtactgatcgtgtgtttgcggttgctgattgggtttttatgaagcttcagccttatgtgcagcaatttgtcatgactcgtgctaatcagaagctggctttcaagttctatgggccctttcagatccttcagcgtgtgggttctgttgcctataagttgcaattacctgctaccagtttgattcatccagtggtgcatgtgtctcaattgaagaaagcagtagctgcttctgaagttgttcaatcaacattaccacgattggatcctgattctgggcatctggctactccagtagaggttctgcaacagcggctacgtcgtcgtggtgataagatgattgttcaagctttagttcgttggtctggtacttcgtcttccaccacttcttgggaagatctggaggagttaaggcatcgctttccttctgccacagcttggagtcaagctgtgtttcaaggaagggggaatgttacatccggcaccggcacacctgatgatgaacaggaacaagtgtccaagatcgctggctctgttcagagtacggcccagcaacggcatgttcgtgtaactaggcccaacccgaactctcgggtcgctctcccctttcgccggccttgttgaccaacggcccgacgcagtagaacggcggcaac

SEQ ID NO: 11661 - DNA, 1630 bp, Oryza sativa
  Clone ID: TFbOSC411151j.C1.o1.fg
caaaaatcagtctgaacatctggagcatataaagttggtgatgcaagcattggcagcaaaccaactggtggtgaggctgaagaagtgtgattttgggctggacagggtgaactacctgggacacattatctcagaagatggagtgtccacagatcccaaaaagatctgtgcgatcaaaaataggaaagctcctagaaatgtgactgaagtacaagatattaagaggagttatgaagaggatgttttggcacacaagattttaagcctgattgatactgatggtgatccagaacgaaactataagtgtgaatctggattgttgaaattcaagggcaggatctatgttggggaaacaactgagattagacaactgctgctggaagtctaccacacctcatgttttggaggacattctaggatcagggcaacatatcatagaattaagcagctgttttattggcctagtctgaagaggcaagtagagcattatatcagggagtgccccacttgtcaggttactaaggcagaacatgttcacattccagggttacttaatcctctagaaatacctgatatggcatgggctcatatttccatggactttattgagggactaccaaaatctcaggggaaggatgttatcttggtggtggttgacaggttaacaaaatatacacatttcttagcattgtctcatccttatactgtggagcaggtggtacagatatttatggataacatacataaactgcatggaatgcctatcgccatagttactgatagagatcgggtatttaccagtacatttttccaggagatttttaaaatacataaggttaagctcagatttagcactgcacatcaccctcagacagatgggcaaacagagagggtaaatcaatgccttgaatcttatttgcgcagcatgacctttcaggaaccacagaaatggttttcttggcttgcattggcagaatggtggtataacactacatatcatacatccatccaaatgactccatttcaagctctgtatgggtatccccctccacaaattagtgagttttctattccctgcaatatttctgaagaagccagagtaactttagaagataaagcaatgatcctgcagaagttgaagggcagtatgggagaggcccagagaaggatgaagttttatgctgacaaggggagaactgaaagaaccttagaagtgggggatatggtgtatttgaaactacaaccatacagacaagtggctatgggaatcaggggctcattgaagctcaggtccaaattttatggaccattcaaggtcattgagaagatgggttcagtagcttacaagttgcagttgccggagggagctgggattcatcctgtttttcatgtaagccagctgaagaaacatttggggcctagagctataccaatgcccaatttacctgcagtaggacctgatggccaaatcaagactgaaccagctgctatcttacaaagaagaatggttcccaggcataatgaacctgtgatacagtggctgattctttgggagaatttaactcctgcagacgctacctgggaggacgcatcatacattcaagctgtgtttccaaattttcaaccttga

SEQ ID NO: 11662 - DNA, 3483 bp, Oryza sativa
  Clone ID: TFbOSC414256j.C1.o10.fg
atggcggatccgagagtgaagcggttggaaatgggtgaaattaaaggacttctgagcagtatctgtgcgagtatgtcgagtcaaggacctggatttgggggaacggctggagctagtactagtggcattgcaaggggggcagcagggttggcagcttcagcagcagcaacggtgagcaatactgcaacagtggctggaagttcttcagtaccaccgggtttcagtccccgacctaacaccactggacttcagaccggggctggtgcgacgccactgacttcgggagctcagggtgccatgacttctgtaggaaatgtgaacttccaaattgaaccaaacactgtgaacccatcttttggcccagttttcaccactgctactagaactcatgtgttaccagagagaagaaatttcaattttcctgagagagagtcacaagaggatgtggggatgaaccattatgggattgacactaatcagccttggagatatccaactaggcaaccagggggtactgctgtaggcacaagagcagggatgccaaacccgggaggaggtatgtactggcaggaaccacctagatatttgcatggtgtcataccaaacccttatactgaaatgtcattgaggagtcagaggttggaattgacattgttcaatggggaggatgctgtagggtggttgcaacaatgtgaaaagttttttgagatgactggcacccctgtggatcagtgggttaatttagcatctggacacttagtgggaagagcagggaaatggtttagaaatttggccataccctggtactgtctaaattggcagcaattttatctaatggttttagatcgttttactgaagctaatgcccatgaagctgtggaactactgcagaatgcaaaacagactggtagtgtaatgcagtacattgacaaattcgaagactgtgtttctttagtgaaaagggatcatccttacttgacggagtcttacattttgagttgttttattgggggattgagggctgacattaagcatgatgtatgtgggcaaaagccccagaacttgttggcaggatattggtatgctaaggtgtatgagaaggcaagtattgctaagagactaagctaccaatctgaatttaatagaaacaaacctcaattccagcctgcccagtctagtggtaccagatttgtcaaccagaaaaacacaactcaaggggtggagaaagaaaagaaaacttgctgctatcatggtgaggaagaaggatgggaattggaggatgtgtgtggattatcggcaattgaatgccaaaaccgtcaagaacaagttccctatgcctatcatagaagattgttagatgaattgaatggtgccaaggtgttcacaaagctggatctacggtcgggttaccatcaaatcagaatggtggaaggtgatatccctaagacagcattcaaaactcatatggggcattttgaatatttggtgatgccattcaggttgacaaacgcaccagctacatttcaagctctcatgaatcaaatttttggcaaacttttgaggaagtgtgttttggtcttctttgacgacatactaatttatagcagagatctgagggaacatgaacagcacttgcgcatagtgctaaacatactgaggtcacataaattgtttgccaagcgaagcaaatgcacttttgctgtaggaagtatagaatatctggggcatatagtgtccggagaaggtgttgcaactaagcctagtaaaattcaggatgtggtggattggccagtacccaaaaatgtctcaaaattaagaggattcttgggattaactggatactataggagatttgtgaaggggtatggaaccatatgcagaccacttcatgatctgttgaagaaaaacagctaccaatggggtgtagaacagcaaaaagcttttgacaatcttaaagaagttatgacttcctgtccagttttggctttacccaatttcaatcaaccttttgtcctagagacagatgcatgtggtattggaattggggctgtggtcatcagaactgatcagcaaagtttgaagttcatggcaacccagagattaacagaaggaattcagcacaaactattgctgaaattaatggagttcgattacagtattgagtacaagaagggaaaagaaaacaaggcagctgatgcattgtctaggagggatactgatggagacaagtgcttggcaatcactctggtatatccagcttgggtggaggatgtgaagaacaactacatgggcgatgagaaatatgcaaagttagtaactggagaggaactgaatgaaggagcagaggggttcactttacaatctgggttactgaggtataaaaacagaatttatgtgggacaatcaactgatatcagacaaaggctgcttcaatcctttcacaattccacctttggagggcattccggaatgaaggtgacataccataaacttaagaagattttttattggcctaaaatgaagaaggatgtggatagacaggtgactgaatgcccaacctgtcaaatagctaaacctgaacatattcatgtacctggattgttggaccctttacaaattcctgagatggcatggacacacatttcaatggattttatagaagggttgccaaaatctcatggaaaagatgttattctagtagtagtggacaggttaacaaagtatgctcattttgttgccatgtctcatccttttgacactcaagatgtgatacaagttttcatggaaaatgagcctaaagaatggtacaaatggttgcctactgcagaatggtggtataatacttcttatcacacatcattgcaagtcacttcatatgaggccatgtatggagtaactccaccacatattggggaaagggcgatacctggaaatgtttcagaagaggcaagagcaactgtacagcagagggaggatatgttggcaagattaaaagaaaacttggccaaagctcaaaccagaatcaaaaagcttgttgacagactcaggagtgaaagacaattcgagttaggggatatggtctacctaaagatgcaaccatatcgacagaatgcttttgggctgagaggatcattgaaactcagagcaaagttttatggtcccttcagagtgttggaaaagattgggaaggttgcttataagttgcagttgccagaagaagctaacatacaccctgtgtttcacgttagtcagctgaagaaacatgtgggaaggcaggcaatcccgctaccaaatcttccactggtgggtgctgatggtactgtcaagactgaaccacttgcagtattagcaaggagagtaattccaagacaaaatgaaccagtggttcaatggttaattcactgggagaatttaacacctgaagatgcaacttgggaaaatgcaacattcatccaggccacttttccacactttagaccttga

SEQ ID NO: 11663 - DNA, 4440 bp, Oryza sativa
  Clone ID: TFbOSC900307j.C1.o21.fg
atggtgaccaagacccgatcccaagaatccatggatggtgtggaggagttgactgagatgagagtggagatagccacaatcaagaaggatcttggggcgttgaaggggctgaagaacgaaatggctgaagtcaagaagctgcttaaggtgatgtgtgctagcttgggtgaaggagatcctgaaaagaggccagaaacgggagaagcttcagaaagggtaagtggagctcctcatgatgtgaatgccactactgctttggctgatataattgatggttctggtccaatgcttactggtactgctcctatcatgagtcaagggggaggatttttcattgagccaaatgttactcagcctagaatgtccaactgcatggcctcgatgccttttgtagctggaagtaatgcggtgtatgctgaagcaatcatcaaaggccctaggctagaaatttcattgtttgaaggagatgatgtgattggctggctgaagcaatgcgaaaagttctatgaattaaccggaacacctcatgaacaatgggtaaatttggctttggctcatttgagtggaagagctgcttggtggttcagaggtgtgggaattccgtggcaactaatctcatggccccaacttgcagccatgatgtgtgaccgattttgtgaagctagtgaccatgaggcagtggagcaattacagaatgtaaagcaggctaacttatcagtaacacaatatattgataagttcgaggaatgtgttgatttggtccggagggaacacccatacttgcaagaacaatacctcaacagttgtttcattgggggattaagaggggatatcaaacatgatgtaagtggccaaaaacctcagggattattgcaatcttactggtatgctaagaattatgagagagcagcaaatgctaagagagcaatttacaatttcaacagaaatagaaaccaacagcagtttgctggtaatcaggggagaccaatggggccaagaaaccagctgagaggagaggtggataagaaggaagaaaagaagtgttggttctgtaaagaaccatggtttcctcgacatcagtgcaaagttaaacaagcattacatgctttgttggtggaggatgaggaacaaggggaagacagtgagggcaatgcagaggaggttattcaggaggaagaaccacctgttgagcaagagaaacctgtccaagagggagccaaagtggagctaatgtgcatatctcagaatgctttgcaagggacaactagaccagacacttttttagtgatgatcttgataaatggaaggagagcagtgggtctagtggacagtggaagtacaggaacctttatggaccaagagtttgctctcaagagtaagtgccctatacatcagactctggccaagaagatagttgttgctggaagaggagagttactgtcagaagaccaagtgcctgaaatcaaataccaaatacaaggagaagactttagcaatggttttaatttaattccactaaaggggtatgagataattctgggggctgactggatatttactcacagtccaatcactttggacctgaaacagcgggagttggtaatcacaaaggagaaacagaagattatactgcaagacttcactaaacctggcaaaagagccagggtaggagaaaagaagatgggtaagttgatcagaaaaggggctgtgggatgtgtaatccagatccatactatttctgtagaaaaggaaaatgagaagcatgttatccctcctgaaatccaagaaattttactgaaatttccacaggttctgaaagaacctcagggcctacctccaaggaggaagtgtgatcacaccattaacttgaagactgggtcagatccacccaacctcagaccttacagggttccccactaccagaaggaatccatggaaaatatcatagcagagttaatacaatcccaagagatccagatcagtgatagcccctattcttcaccagctgtcatggtcaggaagaaggatgggtcgtggagactttgtgttgattatagacagctgaatgggcaaactatcaagaacaaattcccaatgccgatcatagaagatttactggatgaactacatgggtccagggtgttctccaaattggatctgcgttcggggtatcatcaaatccgaatgcatccagatgatgtgcataaaacagccttcaggactcacttgggccactatgagtataatgtgatgccgtttggattgaccaatgcaccagccaccttccaagctttgatgaatcaggtgttagccccttatctcagaaaattcgtgcttgtgttttttgatgatattctcatatatagcaaaaacaaggaggagcacctagaacatattaaactagtaatgcaggctctgttagataaccacttggtgatcaaactgaagaagtgtgaattcggtttggatagaattgcatacttggggcacattatttccagtgaaggggtagctacagaccccgagaaggtagaagggattcggaggaggaaaatacctaacaacattactgaattgagagagttcttggggatggctggttattacaggagattcatcaagggatatggtgtgatatgcaggcccttacatgatatgttaaggaaagatgcattccaatggggcccagaacaaacaacagcatttgaagaactgaagctgagattgagtaccagcccagtgctgacaatgccagatttctcacaaccatttgtgatcgaggcagatgcctgcaacacaggaataggggctgtgctaatgcagacagggaaacccattgcataccttagtaaagcattagggcccaaggcagcagcacagtcaatttatgaaaaggaggctatggctattttagaagcacttaagaaatggagacactacattctggggaacaaactagtaatcaagacagaccagcagagtctaaagtatatgatgaaccaaagattggtagagggcattcaacacaaattattattgaagatgatggagtatgattactcaattgaatataaggctgggaaggagaatttagtggctgatgccctgtccagggggaaaatttcagaagcagtccctgctgaatcatgtcaagctataacagtggtgattcctgagtgggtgacagacatcaaaaggagctatgaaggggatgtattggcacataaaatcattagcttaattgggactgatatggatccggagcaattgtataaagaagaatctgggttgctcaaatacaagggaagaatatatgtgggaagtgtgacaaaaattgaacatgtgcacatccctgggctactcagtccacttgaagtaccggatatggcttggtctcacatcactatggacttcattgaggggctgcctaaatcaaagggaaaggatgtcatattggttgtagttgacagactcacaaagtatgctcatttcattgctctgtctcacccctatactgtagaacaagtagtggaggcatttatggataacatacacaaattacatgggatgccactggtcatagtcactgatagagataggatatttactagtaacctgtttcaggagctgttcaaagccagaagggtcaacctgaggttcagcacggcctatcacccacaaacagatgggcaaagtgagagggtgaatcagtgcttggaatcctatctcaggaacatgactttcaaggaacctcagaactggtactcttggctagcactggctgaatggtggtacaataccacatatcacacagcaattcagatgaccccattcaaggcactttatgggtacactcccccacagatcaatgaattctccgttccctgcaatgtttctgctgaggcaagagtttctttggaagagaaggaggctataattcaaaacctcaagagtagtatggatgctgctcagaagagaatgaagcactatgcggacaggaacaggactgagagggaattgcaggtgggagatatggtatatctcaaattgcaaccatacaggcagaatgccttgggtgtgagaggatccttgaagctaaggtccaagttctatggaccatttcgggtggaacaaaagattggtcaagtggcatacaaacttcagctacctgaaggagctaatatccaccctgtgttccatgtgagccaattgaagaagcatctggggcgccatgctgttccaatgcctaatttaccactggtaggacccgacgggcagataaaggcagaacctgtagcaattctgcaacgtcgaatgattccaaggagaggagaaccagtggtacaatggctggtgttgtggcgcaatctatcgccagctgatgctacatgggaggatgctacattcatcagggctacattcccaaattttgaaccttga

SEQ ID NO: 11664 - DNA, 4044 bp, Oryza sativa
  Clone ID: TFbOSC401048j.C1.o10.fg
atggccggcgctaacgacgacgtttggcgccaacgcttcgacgacatgatgcgccggctggaggagctcagcggcctgatcaccgacatcgaccagcagcaacgtacccagaccttggccatcaaccgcttggagaatggcgcccgcgctccctcttctcgcttcgacgacctgagcgacgtcggcgatcgcaatgggggccgctttgcccatcacaacgtcggccgcggcgaccgctacggtcgcggcggcgatggctttcatgggcatggacgtccgggcggccaccgcttcgacggcgatggcgatcgtcctccacgctaccacaagttggactttcccaagttcgacggccgcggcgatccgctccccttcctcaaccgctgtgaacaattcttccggggccaacgcacgccggaggacaacaaagtctggctcgcctcctaccatctgctcgacggcgcgcaacagtggtacactcgccttgaacgtgaccatgaaccgccttcgtggcatcgcttctcggagttgctcaacatgcgctacggtccacctctgcactcgacgcctctgggcgagctggcagcctgccggcgaacgaccacggtggatgactacgccgagcgtttccttgacctgctcacgcgcaccggctacctctccgaggatcaacagttgggggaggacgacaccgacaacgactccgccaccgaccaagcagacgcggccgccacactccggatttctctgcatgcggccaccggagttcgcgcgtccgacgccatgcacatcacggcccacctcggcgacaccgacctctacaccctcatcgactccggcttgatgcacacgttcctgtctcaggatacagcggcacgtgtcggtcgggctcctcagccccgcatgggcctcaacgtcacggtggcgaacggcgacaaggtggcgtgccccggcgtcttccccgacatgcctttacagatcgccggcgaggaattcgccacggacgtttacgtcctgactctgggtggctatgacctcgatttcacggtgctgacaatgtccttctggcaccgcgtcacgctccacgggttgccgggacaccagcgaccccgtgctctggcgtgcgctccagcggcactactggactccctcctggaggaattcgcggacgtcttcaccgagcctacaggattgccgccggcccgagaccgctcacatcgcatccagttgctgcccgggacagccccggtggcggtacgcccgtaccgctaccccgtccgccacaaagacgaactggaacgccagtgcagggtgatggaggaaaatggattgattcaccggagcacgtcggcgttctcatcgccggtgctgctggtgaagaaggcagatgggtcatggcgcttttgcgtcaattaccgggctctcaacgagcgcacagtcaaagacaaataccccatccccgtcgtcgacgagctcctcgatgaactgcacggcgccgccatcttctccaagctcgatctgcggtccggctaccatcaagtccggatgcaccctgacgacatcgacaagacggcgttccgtacacacgatgggctctacgagtttctcgtcataccgttcggcctcacaaacgcactggccacgttccaatcactcatgaacgacgtgctccggccgtttctccgccgcttcgtcttggtcttcttcgacgacatcctcgtctacagcccaacgtggacgtcgcacctgcagcacctgcgcaccgtcttcaccgcgctctgggcagcccagctcttcgtcaagcacaccaagtgttcgttcggcgacccaagcgtagcgtacctcggccacatcatttcgcagcacggcttcgccatggacgccgccaagattcaagcggtagctgagtggccgcgcccccgttcgcccaaggaactccgtggcttcctcggtctggccagctactaccgcaagttcattcaagacttcggttccgtggcggctccactcacgcagctcctccgcaaggacagtttcgcatgggcgccggcgaccgatgatgcgttccagcgcctcaagctcgccctcacaaccacgccggtcctcagccttcccgacttcaaccgcccattcgtggtcgaatgcgacgcatccggtaccggcttcggagcagttcttcaccaaggcgaagaccccatcgcctacttcagtcggcccatcgccacacgccatcacgcgctcgccgcgtacgagcgtgagctcatcagcttggtgcaagcagtgcgacactggcggccgtacctgtgggggcggcaattcatcgtcaagacggatcactacagcctcaaattccttcttgaccaacgcttatccacgatcccgcaacatcattgggtaagcaaattgttggggtttgattttgtggttgaatataagccaggcaaacagaacgcggcggcggatgctctgtcttgccgcgccgcaccagacagccaggccttcgtactctccacgccgacgttcgatctcctcaaagacatccgcacggcgggggacaccgatccggcactacaagccctccgcgacgagatcaactccggcacgcgcacaacaccatgggcggtgatcgacggcctcgtcacctacaagcgccgcatctacattccgccgggctcaccatgggtgtcagtcgtcgtcgccgcggcgcatgatgacggacacgagggcatccaaaaaacacttcatcgactccgccgcgacttccacacgcccgacgaccggcgtgtcgtccacgatcacatccaaggctgcctcacctgccagcgcaacaagacggaccacctccatcccgcgggcctcctgcttccactcccggtaccatctgccatttggtccgatgtcgcgatggacttcgtcgagggccttccacgcgttggcggcaagtcggtcatcctcaccgtcgtcgatcgattctccaagtacgcccacctcatcgccctcgcacattcgtacacggcggagacggtggcgcgtgcgttcttcgtcgacatcgtgcgcttacacggggtgccggagtccatcgtttcagaccgggaccccgtcttcacgtcggcgttctggacagccctcttcaccgccacctgcaccaagctccaccgcagtacggcgttccatccacagtcggacggccagtcgaaggccgtgaacaaggccattgccatgtgtctccgctgcatgaccggagatcgctcccgccagtggctgcgctggctgccgtgggcagagtacatctacaacacctccttccacgccgcccttcgtgacacgccgttcaagttggtctatggccgcgatcctccctcaatccgggcatacgacgcaagcgagctacgggtggcagcggtggcacagtccattgaggagcgcgacgcattcctcgctgatgttcgtctccgcctggaacaagcacaacagtatgccaagcgctactatgatcagaagcaccgggaggtgtcgttcgaggtgggggcgtgggtgtggctccgcgttcgccaccgcgttcctgcgtccctcccggaggctgtcaagggcaagcttcgtcctcgcttctacgggccataccgcgtcgtcgccgtcatcaacgaggtggcgtatcgcctcgcattgccgccggggacacggcttcatgatgtgttccatgtcggactgctcaagccgttcgtgggtgtgtcgccatcggcaccactggctttgccacccattcagcatggagcggcccaacctgttcctcgccaagtgttgcgcgcccgtttggctcgaggggtgcgccagcttctggttcaatgggaaggactgccggcatcggccacatcttgggaggacttggacgactttcgcaaccgatatccctcgttccagctcgcggacgagctactgatcgagggggggagagatgttatgtggggaattcccttccgccggcgcaagcagcaagctgggcttggtgccggacgagctatagggccgggcggcacggctgtttag

SEQ ID NO: 11665 - DNA, 3960 bp, Oryza sativa
  Clone ID: TFbOSC401057j.C1.o37.fg
atggccggcgctaacgacgacgtttggcgccaacgcttcgacgacatgatgcgccggctggaggagctcagcggcctgatcaccgacatcgaccagcagcaacgtacccagaccttggccatcaaccgcttggagaatggcgcccgcgctccctcttctcgcttcgacgacctgagcgacgtcggcgatcgcaatgggggccgctttgcccatcacaacgtcggccgcggcgaccgctacggaaccgatgagtttagatgtgcagatgcagcatccgacgacgctagaagaggccatgagtcttgctcgttcgttcgaacgccgcgaactcgcagcccggccaccccgcccgccacgacacgccggccgcggcatactaccacttcctccggcggccaacccccaggcgccggctccagagccggccaccgccgcctaaccggcaggcacgccaccgcgatcaaccgcaccgtccgccgcctgtcaccggaggagatggatgagcgccgacgacaaggtctctgcttcaactgtgacgagccctattcgcgcggccacaaccgattgtgccgccgattgttcttcctggagttgggggaggacgacaccgacaacgactccgccaccgaccaagcagacgcggccgccacactccggatttctctgcatgcggccaccggagttcgcgcgtccgacgccatgcacatcacggcccacctcggcgacaccgacctctacaccctcatcgactccggcttgatgcacacgttcctgtctcaggatacagcggcacgtgtcggtcgggctcctcagccccgcatgggcctcaacgtcacggtggcgaacggcgacaaggtggcgtgccccggcgtcttccccgacatgcctttacagatcgccggcgaggaattcgccacggacgtttacgtcctgactctgggtggctatgacctcgatttcacggtgctgacaatgtccttctggcaccgcgtcacgctccacgggttgccgggacaccagcgaccccgtgctctggcgtgcgctccagcggcactactggactccctcctggaggaattcgcggacgtcttcaccgagcctacaggattgccgccggcccgagaccgctcacatcgcatccagttgctgcccgggacagccccggtggcggtacgcccgtaccgctaccccgtccgccacaaagacgaactggaacgccagtgcagggtgatggaggaaaatggattgattcaccggagcacgtcggcgttctcatcgccggtgctgctggtgaagaaggcagatgggtcatggcgcttttgcgtcaattaccgggctctcaacgagcgcacagtcaaagacaaataccccatccccgtcgtcgacgagctcctcgatgaactgcacggcgccgccatcttctccaagctcgatctgcggtccggctaccatcaagtccggatgcaccctgacgacatcgacaagacggcgttccgtacacacgatgggctctacgagtttctcgtcataccgttcggcctcacaaacgcactggccacgttccaatcactcatgaacgacgtgctccggccgtttctccgccgcttcgtcttggtcttcttcgacgacatcctcgtctacagcccaacgtggacgtcgcacctgcagcacctgcgcaccgtcttcaccgcgctctgggcagcccagctcttcgtcaagcacaccaagtgttcgttcggcgacccaagcgtagcgtacctcggccacatcatttcgcagcacggcttcgccatggacgccgccaagattcaagcggtagctgagtggccgcgcccccgttcgcccaaggaactccgtggcttcctcggtctggccagctactaccgcaagttcattcaagacttcggttccgtggcggctccactcacgcagctcctccgcaaggacagtttcgcatgggcgccggcgaccgatgatgcgttccagcgcctcaagctcgccctcacaaccacgccggtcctcagccttcccgacttcaaccgcccattcgtggtcgaatgcgacgcatccggtaccggcttcggagcagttcttcaccaaggcgaagaccccatcgcctacttcagtcggcccatcgccacacgccatcacgcgctcgccgcgtacgagcgtgagctcatcagcttggtgcaagcagtgcgacactggcggccgtacctgtgggggcggcaattcatcgtcaagacggatcactacagcctcaaattccttcttgaccaacgcttatccacgatcccgcaacatcattgggtaagcaaattgttggggtttgattttgtggttgaatataagccaggcaaacagaacgcggcggcggatgctctgtcttgccgcgccgcaccagacagccaggccttcgtactctccacgccgacgttcgatctcctcaaagacatccgcacggcgggggacaccgatccggcactacaagccctccgcgacgagatcaactccggcacgcgcacaacaccatgggcggtgatcgacggcctcgtcacctacaagcgccgcatctacattccgccgggctcaccatgggtgtcagtcgtcgtcgccgcggcgcatgatgacggacacgagggcatccaaaaaacacttcatcgactccgccgcgacttccacacgcccgacgaccggcgtgtcgtccacgatcacatccaaggctgcctcacctgccagcgcaacaagacggaccacctccatcccgcgggcctcctgcttccactcccggtaccatctgccatttggtccgatgtcgcgatggacttcgtcgagggccttccacgcgttggcggcaagtcggtcatcctcaccgtcgtcgatcgattctccaagtacgcccacctcatcgccctcgcacattcgtacacggcggagacggtggcgcgtgcgttcttcgtcgacatcgtgcgcttacacggggtgccggagtccatcgtttcagaccgggaccccgtcttcacgtcggcgttctggacagccctcttcaccgccacctgcaccaagctccaccgcagtacggcgttccatccacagtcggacggccagtcgaaggccgtgaacaaggccattgccatgtgtctccgctgcatgaccggagatcgctcccgccagtggctgcgctggctgccgtgggcagagtacatctacaacacctccttccacgccgcccttcgtgacacgccgttcaagttggtctatggccgcgatcctccctcaatccgggcatacgacgcaagcgagctacgggtggcagcggtggcacagtccattgaggagcgcgacgcattcctcgctgatgttcgtctccgcctggaacaagcacaacagtatgccaagcgctactatgatcagaagcaccgggaggtgtcgttcgaggtgggggcgtgggtgtggctccgcgttcgccaccgcgttcctgcgtccctcccggaggctgtcaagggcaagcttcgtcctcgcttctacgggccataccgcgtcgtcgccgtcatcaacgaggtggcgtatcgcctcgcattgccgccggggacacggcttcatgatgtgttccatgtcggactgctcaagccgttcgtgggtgtgtcgccatcggcaccactggctttgccacccattcagcatggagcggcccaacctgttcctcgccaagtgttgcgcgcccgtttggctcgaggggtgcgccagcttctggttcaatgggaaggactgccggcatcggccacatcttgggaggacttggacgactttcgcaaccgatatccctcgttccagctcgcggacgagctactgatcgagggggggagagatgttatgtggggaattcccttccgccggcgcaagcagcaagctgggcttggtgccggacgagctatagggccgggcggcacggctgtttag

SEQ ID NO: 11666 - DNA, 7893 bp, Oryza sativa
  Clone ID: TFbOSC400891j.C1.o34.fg
atgtggaagactcagcccggaggaacatccagagatggaaggggtggaggcagtacggccagggcaaacgcaggcaccgggtacccaacccgttcgcgtacttctggaaatccacaattctctgcacccacaaacggcgcgaaccagagggctatggcctctctccgctctcctctgcgtggagggccagacatgccgacctccaggagatgttccccaaggctttccggcacacaacaagacgaagtagccgaggtagcacgcgtcggaatgttaaaaagggctagtaacaatgcttcaaattcttcaacatcaagagctcccaccagatcttctagcaccaccaccgctagttctaaggatgttgcagaagagcatagcagcggggttggaagcactagcagtttatcaaagaagcggaaaagaatgaccgcaaaatcctacagatcacttttcaagcgatccaaaaaagcaagctccacagagcgggcaaggaaaatacttccaatgggaatgtggcagagagcaacactggtacatcaacatatatctatcgaaacatgcccacaaaacaaagttgctgagagtagacttgaagttgaaggtagagatcggcctactgggcattcaaggcaaaattctatatcgtcattgcaaagtgccccaatccctcctattcattacgaggagcccgagagtggacatggagatggtgaaccccttagcattcaaaaagaagtagcttcaagtcagttcaaggtgaccgcatctgatgaaatggagggcaattccaacatatgcgttgcttgtggtaccccaggagatcttaatcgggtttgtgattcaggtcctgtgatggagaaggctgcaaaagaagctaccatgtttcttgtctggatcattggctggaatatttgtctcctgaggttgctgtttggaatacactctgttgctgatggaattgagtctctgtggaatgtcaaggagggaatgcagaatggcaagcagtaccttgtgaagtataagaatctggcacatgtccataatcgctgggttccggaaggtgttatcaatgacacccctggaggttgtgatcttctgtccttgtttaataagagggatcataaagaaaagacaaattggaagaaggaatggactgagccacaccacctgttgaggaaaaggccacttatgcccccaaaagaagctgatgattttttttgttcaagtcgtgctaacattgagcattgtaatgttgaatggttagtgaaatggagggatcttggctatgaacatgcaacatgggaactggaaactgcatgctttttgcgtactcctcaggctgatgaacttaaaaggaagtatgagaaccgccgtaaagctgctaagcaatcatctattcccgtagaaacaaaggttaagcataagacatttcagaaactccagagattaccagacgagtggcctcctggttttgacaacgatcatttgttttctatcaatcaacttcttgagttctggtgcaaatctcatggtgctgtccttgttgatgataaggaatacgtaacaaaaaccatcttgttcacgttgactgtattacctgatgtctgccaacctttactgatcgtcacgactcctgcttctctttctgcatgggagattcagttcaatcacttggcaccatttatcaatgttgttgtgtatgatgggcagaaagatactctcaaattaattcaagacctggagttctatgacaacagacgctgcatgatgttacaagttctcttatcccatcctgatgctatcctagaggatattgaaactatagagcgcattcgctgggaagctgttatagttgattattatgaaaactctgcattcaaatattttgaacaactcaagaaaatttctactgattttagaatggtgcttttgggctccccaatcaaggataatgttcctgagtacatgaacctgctagcttttcttaattcagaagataaaggttatagtgactatgtcaatgctgatgatgcgcttgtgatgtcaaaagcaagattcacacatcatattgcatatgagcgtaaaacagattcttcaaaatttttggagtactgggttccatcttgcatttcacaaccgcagttagagatgtactgttccatattgctttcaaagtcatccgtcctccggtcagagatggaaactgatagcgttggagctcttcatgatatttatctgtctctcaaaaagtgctgcgatcacccttacatcgttaatgaatttctgcgaagctcacttagcaacaatagcaatgtaactgaaaatatagatacggtggtgcatgcaagtggcaagctactggttctcgacaaaatgcttaacgagatcaagaagaagagtttaagggtcattcttcttttccagtctgatagagcaggtggaaacaaaatgggaaatattttggaagatcttatgcatcacagatttggcccagaatcatatgaacgtgttgaatatcgtgcagtattgtcaaggaaacaggcagcaattgataagttcaacaacaagactaatggtagatttgtctttctgattgaaaatcgtgcgtgcctcccaagcattaagctttcatctattgatgccatcatcatatatggttctgacaacaacccactaaacgacttgaaggctcttcaaaagatcaagatagagtcacaatttgagcgtgtgagcatttttcgcttgtacactccttttacagttgaggagaagagtcttgttcttgcgaggcagggcattgttattgataacaacatacaagatctaaggactagtttaaaacattccttactcagatggggtgctgcatttctcttcagtagacttgatgaggtccagcaagatgaccatgcaagtaaaagttctgaaatggagagacactttattgatgaagtaatcgttgagttcttaacaaagttatccacaactgttgaagacagcactgaagtacacaggaagtccataagcaaagctaatatgagtggggaactatattcaagaaatattactctgatgggtgaaaaggagggaatctctgtgcttgaggataatccagctgagttctggttaaatttattggatggaagatcccctcatgtgagctgtatatctgagccactgcaatcaagagttacaaagtcccagaccatggatgaggtcaatgctccggctgaagaaatcaatgaagccagaaagaagcatagaaaggttggtgagattatgggttcatcttcaaaagttgtatctgacaaaagtaacgatgatgcattgcctgatatttgtactacatctggccctgctcttcaaccagttgatgtcacgcagcaaaaatcagttcaatctgaagggtcggaaagcctgatgagtacacccaagaatcttcatgcccaaatgaagcaagagttgtcgaaattaattaaggtgttacaactaccgaatacaatacagtttaatggagcgaaaatagcaggacaagttctcattgaagtagacaatgttacgttgctggttgagcagttctttgaatatcttttgaataatcatgtagttgttcaggagccaaagtacatatttcatgcgttgaacatagctttgtgttggcgagttgcctctattcataactttaaggtggatcataaagagtcacttgcccttgctgaaaaaaggttaaaatacgagtgcaatgaggagctggcaaggttggtctatgacagcctaaagagaaaatttccaaagaaagcaggtgcaactggcagcaattgtcaatcaacatcagtagaaaagaccaaaccttcacagcaggagacctctaatatcttgagaaatgaccacattttccctaagcagagaatggatcttcatgataatttcatgaatggtgcacttcaagaaggctcatttgttgctgcacaaatggtttcagaagagcaggaactgatagctgttccaggaactcacatggaatgccatttttcaactgatgaacttcctgacattgtggagaaaagaatcaacttaattgacaatgttttctctgtaagagaataccgtatctttgataaacaacagtctcagatttcagagttagagaaatacacacaaaataaaactgccagactgaaaacagtgtgcaatttagttctggaacatatttgtagaagtcatgctgatgtagagacccgaaatgacacaataaaacaaactgttcagtggttcactatgctgatgtatgcatttctggagcacatgagactccagcacagcaaacttgagtcactgcaatctaatacatgggctgaagagcgacagctgaaggaaaaactttgtttggaagcaaaatcaggccaattagatcacacctttgatcagcagattgctctaccagattcaaactttgttatgcaagaattcatccatttgaaggaacaaagtagcaattcccatgtcagtggaagcgctgtttcagattgtcagcagctttgtcatgatagattgaaaatggtaaatacactggtaaggaatgtagttccatcagaacccatttctgcacagacagtgagaaatggttctgttgaagtggtcatggtcgctggccaaccagcaccagaagtagttgattttccagaaaacaacacctgctatagtcctgatggcattggcttacaaaaagctaaatcaccgagtattaggccttcaaatgatgattcaattaatcaggaatcttcggccagtgaatatacaagtactgagaatgttgagagggacaatgccaatcctagtacattgccgggagttgcaacttctcctgccattggaatttatgccaacttggagtcaacaatggttgcttctacacaaaacctcacgattttcccagcttctaaggaagtggctactcaatctaatttatcaaccttgcctggctcacagactgttgagacttcacagcagccacctgcagaagcaaaactgactgaaaatttgggagtaacagcttgggatgtgcaacctgaaatgcaaacaacgacctcaacattggattctccatctgcaaggatgtgcccagataataataatcaaacagttcatcaaccagatacatcaactagcccattgcaggaaggttctacttcctgtcatttaacctcagttgatgctactgctggagttacagcaaaagttgatgacactgctgctgcagatccacttgactcagagacacaatcttatactgctgcacacaaaccagctgccttgctggtgtctacggaagttgaaacccagactgatcaatcaagtatgcttgaacggcagagtataagtgtaccactcgtacaaagttcactatcttcacaaaatccacctgcagaagcagaaccagcaagtaccctgagcagggagacagcccgagatgtgcagcctgaaaggcaacaatcagcctcagtgctggagacttcactccaaaggatgcaccctgatgacgacagtcaaacaaaacatcagctggaaacagttctgtcacagagaggtgaaacctgtggccatttaggagatgctcgagagatagttgatgctaatgatagtaacactgtttgtgatgttcgagcccatttggaatctccaatctttgctactccacaaagcctggttatatgtcaaggtttgagtgaggttggaagtcagggaaatatatcaaatatgtcttcccaacagagcacagatctgtctgcccaacaaaatctagcaccttcaccacttccacctgcagaagcagaacgaacaggtttgcttaccacacagccagctcagaatttccaacctgaattgcaaccatcaacctcattgtttgatgcttcacttgaaagtaacaacataagtcaaacagattgtcaatcagatcgagcagttgttttcttgcaggaaggtgcaacaactcaacaacatttacttgataccggagttgtagttgatgacattgttgccgaagagccttcacactcagaatctccaacttacatcattcacgaaacagctgccttggtagtttcgacagaagttgaaactcagacttgtcaatcaaatatacctatacaacaaaatacaagccaccctgcccaacaaagtccagaaacttcacgacattcaattgcaagtcctgtaggtttagaggcaactcaggaatttcagcctgaaatgcagccatcaacctcaggtcaggatcaatctgaagagctggaacaagaaggtatgtcgagctcagcaattcaggatttacagccagaaatgcaacctccaaactcagtgcagggtcagtatccaggagcagtattgtgcattgctgcagctgaagatttgcagcctttaatgcaatcatcaaccccagtgccaaatcaacttgcagaggcaaatcaagaaggtatgttgagtgctgcagcagctcagaatttgcaatgtgagacacagagattaacctcaacacaggatgctccatttgaaaggactgatctgtctggtattcctgtgccacgaagtattactactgcccatcaaagtgtagtgccttcatgggatctgcagacaggagtagaaccaacgggtgctttgtgcatggaaacaacacatgaaaggcagtctgaactaccatcaggttcaatgcaagagcgatctgcagaaacaagagcaaacttagtgcagcgatcttgcacgacagaaacttgtgatttgcagccccaactggatctatcatccacaatacagactgtccaacttgaaggaatacgctctgaagacatgaatcagataggtgttcagtccaactctgcactaagttctgaacagcccacccagcctcttccagtggcaccattagtgtttaattatcaaagatttagtgacgaacctctcaaaaatgagctggaaagattaaaacataccagcaatgttcttagtaaagttcatgaacaaaagagaaaacaactcctagtggagtataaccaagaaatggagaagctaaaacagaaatatgactcattacttcaaaaggaagattctttttacgctcagaaggaggcagaacttgatactatctacaggaaagtctttataaaccaatcactggctgagaattttcgaaggaaattcctaccattatctgcagctcaagggggatccacgagacccacaattgggcagctggttcagtcttctcaggaaccatctgcaaggattgtagcagagcaagtcacagcatcaccagttaccttgtcatcagcagttcgaccacaggtgcttcattcatcaggaccatatgtgcaaccttcactggtggttcaaccatcatcacaggctacccaaccgcagtcaatcttacctggcaatatgtatagagcaatgtcatcatcaccttttagtagtacaccaatgcctatgccacatggcacctacagagctgctggggcacaaccgcatgctccctctcctcatctccagcagcttaggatgccgtcaccttatgccacgagtcatggaaatcagcaccaacgaccatctatcctagcatccctactgccatttgtgctcccatctagttcaaatcctagcctcacggcacccctgtcattgaacacggttgttcacaggacctcaggtccactgaatgcaggtgctggaagccagcacgctggatctcaaatttcaggtgtcaatccctcaggttcttctgcatcagcatcactgaatacatggctaacagctaggcttgcgctgactagtgaggccagagggacggtctccagcacagaggttgtgtgcctttctgacgatgaatcgtag

SEQ ID NO: 11667 - DNA, 6216 bp, Oryza sativa
  Clone ID: TFbOSC900030j.C1.o7.fg
atgtccgacgctcggtctcggcgttcggtcgcctcaagcactcggcgtcagcaggacgccgagctcgccacaacagaagagcgcaggcgagcaacggctcagaccactgcagcagcagcgagggcggccagactggcggcagcggagttggcagcaaccagggtggaggcggagacggaggcggcggaagatgtggcacgtgcggcgaaggtagaggttgagactttgcgcagcagcatcaacggctccatcgccggtgacatcaccgccgacagggagcttgaggagctggcaagaggaagggcacgggaacgggcagagcggtgggcagcagcccacctccacggcggcggcccaagggaccgcgcgcccgccgacgggaacccagacgggcgcgggcgtgccggcggcagcgcggctctctctcccctgaccggcgccatggtcaccacggcgtccagacggtggtcagggactttggtcccggcgaagcggactgccaaggaggcctgggacgccatcgctgcggcacgcatcggcagcgaccgcgcccgcaagtccacactgcaggcactccgcaaggagtgggagaacctggccttcaagccaggtgaggatgttgatgactttgctctccgtctcaacactctcttgcagaaaatggtgcagtacggcgacgacacctacgacgaggagagagctgtcgagaagctctttcgctgcgtcccagagaagtacaggcagatcgctcgctcgatcgaatctctgctggacctctccacgatgtcgatcgaggaggcgttaggtcgcctcaaggtcgtcgatggtgatgagccacagcctctctcggggcccatcaccattggcgggaagctccatctcactcgggagcagtgggaggcctctcagggtgacgggaggaagggggagtcatcttccccgacaggcggctgtaagccgcgcaaggcgtggggaggtgtccaactacggctgctcaccggagtctactacatccccgcgctgaggaattctatcatcagcgtgggacagctggatgagaatggctcacgcgtgttggtcgaggacggactcatgaggatttgggatcgccgtcgtcgccttcttgccaagataaccagaggcactaatcgactctacatcctcagcgcgcaggtcgcacaaccagtttgcctcgccgctcgtcgggacgacgaggcgtggcagtggcacgagcgcttcgggcacctccactttgaggccctgaagcggctcagtgccaaggagatggtgcgaggcatgccgtgccttgaccacgtggagcagctctgcgacgtctgcgtggtaacgaagcagcgacagctcccctttccccagcaaacgagcttccgagccaaggagcagctcgagctcgtgcacggggacttgtgtggcccagtgacaccggccacaccaggaggacgacgttacttcctgctgctcgtcgacgacctctcccgctacatgtgggtgatggtcctcggcagcaagggagaggctgcggatgccatcaggcgcacgcaggccgctgcagaggcggagtgcggccccaagctgcgcgtgctgcgcaccgacaacggcggcgaattcacggcggctgaattcgcgtcgcactgcgctgatgagggcattcagcgccactacaccgcaccgtacagcccgcagcagaacggcgtcgtcgagcggtgcaaccagacggttgtggggatggctcgggctctcctcaagcagagggggatgccggccatcttctggggggaggcggtggtgacagccgtctacatcctcaaccgctcgcctatcaaggccctcgatggcaggacaccgtacgaggcttggcatgggcgcaagccggcggtctcccacctacgggtcttcggctgcctcgcgttcgccaaggagcttggccacattggcaagctcgacgacaggagcaccccaggggtattcatcggctacgcggagggctcgaaggcctaccgcatcctcgacccggagacacagcgtgtgcgcacagcgcgcgacgtggtgttcgacgaagggcgagggtgggtatgggacaaggcggtggatgatggttcgactccgacatacgacgacttcaccatcgagtacgtccacttcgagagagctgggggagtaggcagctcttcttcaccgagcgtgtctaccccagtccccgagcctccaccgactccaacaccaacacaccctcgggccacgacttcaactacgacgagctcttcgtcgacaccaccccagccggtgtccccacgcgctccagcaccaacagccactcctccgggcacgtctactccgacgccagctcgtgttgagcgcagcccggtggagttcgctactccgttctcccacgacgaggagcgcatcgacgcgtaccacgacggcgagcagctacggtaccgtacgatgcaggatcttctcggcgaccagccggtgccgggactggtgcctcgcgacctggaggcgcagttgcaccttgcgtgcgacgacggtgagcctcggtcttttgcagaggccgagaaacatgcggcatggcgtgccgcgatgcggtcggagatggacgcggttcaggagaaccgcacctgggagcttgctgacctccctcgtggtcaccgcgcgatcacccttaagtgggtgttcaagctgaagagggatgaagccggagccatcgtcaagcacaaggctcgcttggtggcacgtggcttcgtgcagcaggaggggatcgactacgacgatgccttcgctcccgttgcacggatggagtccgtgcgactcctccttgcgctagctgctcaggaaggctggggtgtccatcacatggacgtcaagtcggcatttctgaacggcgacttgaaggaggaggtctacgtgcaccagccgccgggattcgtgctccccggcaaggagggcaaggtgctacgcctgcacaaggccctctacggcttgcggcaggcaccgagggcgtggaatgccaagttggattccacgctcaaggggatgggcttcgagcaaagcccgcacgaggcggccatctaccggcggggcaatggaggaaatgccttgctggtgggtgtctacgtcaacgacttggtgatcactagcaccaaggatgcggaggtggcggcgttcaaggaggagatgaaggccaccttacagatgagtgatctggggcctctctcctacctggggatcgaagtgcaccaggacgactccgggatcacgcttcgacagaccgcctacgccaagcgcgtcgttgagctggctgggctcaccgattgcaacccagctctcactccgatggaggagagactgaagctgagccgcgacagcacggcggaggaggtggatgctacacagtaccggcgccttgtggggagccttcgctacctcacccacacacggccggacttggccttctccgtcggctacgtcagtcggttcatgcagcgaccgacgacggagcaccagcaggctgtgaagaggatcatccgctacgttgcggggactctcgaccacggtctctactacccgaggtgtcctggcaaggcacacttcgtcgggtacagcgacagcgaccacgccggcgacatcgacactagcaagagcacgagcgggattctcttcttccttgacgagtgcctcgttagctggcagtcggtcaagcagcaggtggtggccctgtccagctgcgaggccgagttcatggcggcatccgccgcttcgacccaggcgctctggcttgctcgactgcttggtgatctcctcagcagagacactggagcggtagagctcagggtggatagcaagtccgctctggccctggcaaagaaccccgttttccacgaacggagcaagcacatccgggtgaggctcagcaacatgcaaagaggttctacgaccaccaccatcgggagctgcaatttgcggtgggcaactgggtttggctccgtctcattagcaactccggtgaagggcaagctcgggccacgctactatggactggagatcatcaacaaggtggcatatcacctcgctctgccagccggggcgcgtttgcatgatgtgttccacgtcggccttctcaagccgttcgtgggctcgccgccgactacgccgccagcgctaccttcgacccagcacggtgcagtgttgcctgcgctagcccaagtgctcaagtctcgtgtttctcatggtgtgcgtcagctgctcgtccgttgggatggtttgtcggcgtctgcaacgtcttgggaggatttggatgatttccgcactcagtatactgtgttccagctcgaggacgagctgtttgtcgaggaggggagagatgttatgtggggcattccataccgacgtcgaaaccggcagggcactcttttatcaaactctttttctgttcctgatgtttcttgtgtgcctgatctgaccatgcagcatatgtccgctggtcaacttgctgatcgtaactatcgtgtgattcttgaccctaatttttgttatattcaggatcgttgcacaggtcagttggttggtactggccctcggcgccgtgattcacagcgtctctgggagcttgactggattcatcttccttccactgcgtccgccagtcttgttggctctgtttttgctgcatcgtccacctcgtccttcgctcagtggcatcatcgtctgggtcatatttgtggctctcgcttgcccactatgattcgccgtggtctttcagggcatgtttcaggtcatgagtctttacatcagtgccagggatgtcggttaggcaagcagatacaacttccctatcattctagagaatatctttcgggagctctacggcatgttctctatgagtatggcactcttgctcagttttcttgtcctggtgctcatgctcagaatggcgttgttgagcgcaagcatcgtcatcttcttgagactgctcgtgctcttttgctcggttcttgtgttcctcctcatttttgggctgaggctgtctttactgccaactatttggttaatattcagccttcatcagctcttcatggagggattccttatgagcatctatgtagcaaattgcctgattatttcggccttcgtctttttggctatgtgtgctatgtgcttcttgcacctcacaccacttctgcatctttagttgacccactctccttcttgtttttacctgatgcctctattgccagtacacgcccggagtcgcagcttgctatggctgaggagattgctgctcttgagcgcactggcatgtgggatcttgttcctcttcctgcgcatgtttgtcctattacttgtaaatgggtctataagcaagagcatggtcgtgactatgacgagacctttgcgcatgttgctcatatgactactgttcgcactctctttgctgtggcctctatccgtgagtggtccatctctcatcttgatgtcaagaatgcctttcttaatggtgagttgcatgaggaggtgtatatgcgtcctccacctggttattctattcctgaggttgagactcccatggagcttaatgttcacctttgtgccacctatggtgagcctctctctgatcctactcactatcatcatattcttcactatactcgcgtgcttcgtgttctgcgttatcttcgtgggactatagttcatcgtttgttctttccacgctctagctctttgcaactccaggcatattgtgatgctacctgggccagtgattcctctgatcgtcgatctctttccgccttttgtgtttttcttggtggttctcttatttcttggaaaactaagaagcaaacagcagtttctcattcgagtgcagaggctgagttgcatgctatggctcttgtgatagcggaggttacttggttacggtggttgcttgaggattttggtgtttctgtttctatgccgactcctcttttgtctgatagtaccgatgctatcagcatggctcgtgatccggtgaagcatgaacttagtaaacatgttggtgttgatgccttttatacacgagcgcaggtacaggatggtgttgttgctcctcgttatgtgccctcagagattcagttggctgatttatttacaaaggcacagactggagcccagcataggttttatctctccaaactcagtgttcttgatccaccctga

SEQ ID NO: 11668 - DNA, 4722 bp, Oryza sativa
  Clone ID: TFbOSC401439j.C1.o13.fg
atgcctagagggccccgagtggaggatccagtactggaggaggtacagccatgggagacagcggtggatgagcttaggctaagcatgatggatttgcaaaggaaggtggaagaagaccacaagctggtccaggagcagcttcagaaccaggcggttcaggctcaggtatacaaggatgaggttatgcaaaacttgttgtcaattcaacagatgttaggtgggacaactagttgcatggggcaggaaatcaagggcacaccgaaaacacctggctttgcacaatctgtcgtaggagggggaaaagcagtggacactaatgcagcaagtaccagcagacatcctcttttcgattatagaaaccttagttgcccaatgaccacccaagccatagaaaccacagacctaccaccaactgtttttactcccaaacctgtctccacccctccatctgaatggaatacctcggtttacttcactacaccaacagttccaccaccaattccaccagtaccaccacctccacctaaccaaaacaatttacctcaaaaccaaaattacaatccttacaatatgaactaccagtatacaccattctattaccctccctaccctccctataacacaccttggaaccttccacagtacaactacccaccaccatcccatacaccacctaaccaaccgtttcttccccaaaattgggatcgtcgatttgggccctaccacgatcctaatggccgagaaagaacccagtatgctgagaatgctcatagacgatcaaagcatgttgatttccccattttcgatggtgaatgccctgaatcttggataaggaaggctgaaaagtattttgctttgaatcaaactcctgaagaagaaaaagtcctagtggctgaaatctatatcacaggtcgtgctgatcagtggatctcgagttctgatgttctcactgaacaactaacttggcctgaatttaagtccatgatttgccaacgctttgctgctaagtccaacattgaagtcattgatacttttcgaaatctgaaacagtatggttctgttgatgtttatatcgacaaatttgaagaagttatggctctagtgaaacgaaataggcccaacctaactgagcagtactttttggattactttatctctggccttaaggatcatatcaaaagaccactgaaatctttacacattcagtccttggttgatgcttatgaacatgcaagaaattatgatgtgcctcctcgaagcagtcccactgtggcagtatctcagagtaaggagatgcctaaattaccggttaaaccggcattgaaggatgacaagccatcaccttttacagcaccaaagtcgtttggcagatgcttcaagtgccaagagccttgggtacctggacatggtcgagtttgtaaggccactaaacaaatttatttggtaaccttagatgatgatggagaagaaatgcctgataatgctgcggcccagtttactacaccaccaggtagtcctgctcatgaggctactacccatacagacttgtctttgcatgctctcgagggaaccaattctgttgctacaacttttactatccatgtgtgcattgggaagatgtctgctactgctttgattgatagtggcagcacctcaactttcatttctcccaaatttgtcagtaaggctggcttggagattgttaacaatgaccctattcctgttaaggtagcaaatggaggcactttatatactggtgctaggtgtgttgatgtaccttatatgattcagcagcaccaattcatatctacattcagacttcttaatctgaaaggctatgatatcgtccttgggtgcgattggatttatcaccatagtccattgacactcaacctgaagaccagggaattaaccattcataaagatggactgctggaattgacattacctgacatcaaaccagtggcactccctcctcaacgtgactgtgatcacacaattcccttgataccaggagctaaaccagtaaatgtccgaccttatagactgccatatcagaagaaaaatgctcttgaggagttggttcagcagttgcttacctcccaaaccattcagcccagcatgagtccatattcttctccagctatattggttaaaaagaaagatggcacatggcgtttgtgtgttgactatagacaacttaatgcttccacaattaagaacaaataccccattcctgtcattgaggatctcttggatgagttgcagggagctcaaattttttccaaaatcgatctcaggtctgggtaccaccaaattcgcatgcatgcagctgatgttcataaaacagcttttagcactcatttgggccattttgaatacttggtgatgccttttggattaactaatgcgccagccacatttcaagcactcatgaacaagatattagcaccctatctccgcaaattcgtgttagttttctttgatgatattctcatatatagcaagtcagccaccgaacatgcgcagcatttgagcctagtactacagttactgagacatcaccagttattcgccaaaccaagtaaatgtgtctttgggcaagatcaagtggaatatttggggtatattattagctcctcaggagttgctactgaccctgttaaggtgcaagcagttcaaaactggcctactcctacttctatcactgaactaaggggttttctaggtttagctggctactaccgaagattcattaaaaactttggtatcatctgccggcctatgtttgatgctctgaaaaagaacaacttccattggcaagaagttcagcaacaagccttcgatgccattaagcttcagttagctcaagcacctgttttggccatgccagatttctcccttccatttattttggaagccgatgctagtggacatgggatcggagcagttttaatgcaaaatggtcgaccacttgcttatctcagcaaagcaataggacccaaagctgctgccctctccacctatgataaggaagccctagctatcttggaagctctaaagaaatggaaacattactttttaggcacttctctcattatcagaacagatcaagctagcttgaaatacattaatgagcagcgaatcactgaaggtgtccagcacaaattacttatcaagttgttaagctatgactataaaattgaatacaaaaagggccaagagaacaaagctgcagatgcgctgtccagaatgcagcagcttaatgctttaactactactgtcattgttccccagtggataactgaagtggctgctagttacagtactgacccaaaatgccacgaattggaatctcacctgcacattgcaccgcaatctcaccctccttatactttgaaaggaggcattctcagatacaaagatcatattgtagttggggccggcaacacactacgagagcaattattagtttcttttcatgactcagctctaggaggtcattctggtgaaagagcaacttatcagaggatgaaacaactgttctattggcctggtatgaaacttgctgtcactcaatttgtcaaagcttgccctgtctgccaaaagaacaagactgaacataacatgccagctgggttacttcaacctctccctcttcctgaaatggcttggtctcacattacaatggattttgtcgaaggcttacccaagtctgaaggcaaggatgtgatctgggttattgttgataggttcaccaaatatgcacacttcattcctcttagccatcctttcactgccgaccaaattcttactcaattcttggagcacttttacaaattacatggcttgccgacagtgattgtgagtgacagagatcgcatcttcactagttccacctggaaagaagtttttgaaaaggctggcgtcaaactccacttcagcagcgcttatcacccgcaaactgatggtcaatcggagcgagttaatcaatgcttggaaaattatcttcgctgcatgacatcgtccaaacccaggaaatggaaagctcttctacctcatgctgaatggtggtacaatacaaccttccatacatctctgggcatgtcaccatatcaggccctacatggcattaaaccacccctgttggctgaattactcctacctggttccttattggaaggtgaacgtaacaaacaggaagccaaagctgctctgttggagacaataaaatctcatcttgtcaaggctcaagcccgtatgaaatactttgccgatcaacatcgccaagaacgcacacttgaagttggcgatatggtctaccttaaaatgcaaccatatcgacataattcactgggtcttcattcttccttgaaacttcactccaggtactatgggccattcagagttctggagcgcattggttcagttgcttacaagcttttgctacctgttactagccaaatacatcatgtcttccatgtcagccagttaaagaaacatctgggctctcgtgctgtccctgaacaaggtcttcctttgattgatgctgagggcaggattctctctaccccattggcagtgctcgatcgtcgccttatacctagaaacaatgaaccagtggtgcagtggaaaattcattgggctaacctaccagaatcagctgcaacctgggaggatgctgcgtttattaccaaagtatttccttctttcactccatga

SEQ ID NO: 11669 - DNA, 4530 bp, Oryza sativa
  Clone ID: TFbOSC900392j.C1.o8.fg
atggcgctgttgccgccgctggcacctccaactgagacggcgcagtttccggaaggagcaggaatggcggcgtggttttcggaagcggcagggacggtttggagttgtggtctagagatggcgccttttccggcagcagcgagagcggtggcgctgtctcggtcgctaccctcgagagagatggacgagaaagtggagatttttgttgtggatctgacagaggtatcagagcagtacgaattcttggctcttgatttcatcagatctgaaccaggcggtggtagacacttctgcaagaggaaacaagggagggaactagttcctgaacttttcttgcagaaaaattggatggttactaagacccgatccaacgagacgattctggatatggaggagctaaatgagttcagggtggatatggcgaatctcaagaaggaggggttgctgttggaactctgcaagcagaagaatgtggaggaggttgacggtgacacagatgcagcagttgctgctgttgcggctgaaaaggctaacaaaactgttagttcagatactgggggtgcaggaccaagcaatcccactgctgggaatcctcctgaggtacgttttgccattgaacacaacaccatttctgttgagggagttggtagttcaagggggcctcaggatgcagcggctgtaatgaatggttgggtgtttgacactagtatgggcactcatcggcctaatgtgtttggaaatgggagtcagcaggggtttgaccgtgtgggaggaatacctagaaggtttcaggggaattctgggggcagagcactcaagtggtataggggaattggtcttccttggcaggtgatcacttggccacaatggtgtgctatggtttgcaccagtttttctgcagcagatgtgcatgaggcaatggaactttttcaaaatgtgaaacaacatggacaaattgtggaacattatattgacaaatttgaagaatacatggatttggtgagaagggaccatccatacttgcaggagcaatacctcaacagctgttttattggggggttgagaagtgacatcaagcatgatgaagcatggtttcctggacatcaatgcaaggtgaagaaggcactaaatgcactacttttggaggaggaggaatatgaaggaactgaggaagtaggcagggaaaagaaggcacaggagaaagtcttggaagaaactgaacatgcacctgaagaaattgatcaggaggaactgatgtatgtgtcacagaatgctatgcaaggggctaccagaccggacacgttctcggtgattatacaaatcaatggaagaagggcagtagggctggtagacagtggaagtccaagcactttcatggatcaggagtatgctatacgtaatgattgtcctctggtatctactgattctaagaaagttgttgtggcagggggtggagagctcaaatcagaagtacaagtccctgacattctgtaccaaattcagggtgaaactttctccaacaaatttaacttgatacctttgaaggggtatgacattatattgggagctgattggatttacaaatatagcccaatcactcttgatttgaagaaaagggaattgggtataactaagggagaaaaggtgatcaccttacaagatttcactaatactgggaaacatctgttagttgatagcagtaaggtggacaaaattatcaggaaaggtggtctgggatatttgtttcaaatcacccaagtggcagaagagagtgatgtggaagaaagcatcagcattcctgatgatattcaagatatattgcaaagatttcctactgttttggaaaaaccaaaaggccttccacctcagagagggtgtgatcatgttattactttgaaggatggagctataccccctaacctcaggccctatcgtgtacctcatcatcaaaaggaagccatggagaaaattattgctgaactgattgaatccaaggagattcaggttagcaatagtccctactcatcaccagctgtaatggtgagaaagaaagacggttcctggagattgtgtgttgactatagacagttaaatgcacaaacagtgaagaacaaatttccaatgcctataattgaagacttgttggacgaattgaatggagctaaaattttcactaagttggacctcatgtcagggtatcatcagattaggatgtcgagacctgacattcccaagactgcatttagaacccatttgggacactatgagtatcaagtcatgccctttggtctcactaatgcccctgccacatttcaatcacttatgaaccaagtgttagcaccattctttaggaaattcgtattggttttctttgatgatatacttatctatagcaaagacagggaagagcataaagaacatatcaggctggtactgcaagtgctgaaggcaaacaatctggtgatcaaacccaagaagtgtgcttttggtctgtccagtgtgtcttatttgggacatattatatcacaaaatggtgtagccactgatccaggcaaagttgagaagattgtcagctggcccattcctaagaatgtgacagatctcaggaaattcctgggtatgactggatattatagaaggtttatacaagggtatgtgttaatttgcagaccattacatgacatgctgaaaaaagaaggctttcaatggggagagaaacaaactgaggctttcaagtttcttaaacagaaaatgtgtagcagtcctgtcctgaccttgcctgacttttccaaagaatttacaattgaggctgatgcatgtggtactggaataggagctgtacttatgcagggtgacagacccatagctttttacagcaaatctcttggtcctaaagctgcagctcaatcaatttatgaaaaagaagccatggcaatattggaggctttgaagaagtggaggcattacttcctgggcagtaagctggttatcaaaactgaccaacaaagcttgaagcacatgatgaaccaaaggctggttgagggaattcagcacaagctgctgttaaaactgatggaatatgactatataattgagtataaggctggcaaagacaatgtggtggcagatgctctgtcaagacttccccaagatcagcttcaaactgaaatatgtaatgcaattacagtggttatacctaaatggatcattgatgttcaaaatagctatgaaggtgatgtgcaggctcacaaaattttgagtatgattggaaccaatagtgatcctgatcaacactacagttttgaaaatggaattttaagattcaagggaagaatatatgtcggtgaagagacctctatcagaactaacttaattagagattaccattgttctgcttttgggggtcattcagggatgagggcaacacatcatagaatcaaagctttgttttattggccaggtctcaagaagacagtggagatgttcatcagggagtgccctgtctgtcagatcactaaggtcgaacatatacatatacctggtctattaaatcctctagaggttctagacatggcatggacacatatcactatggattttatagaagggctgcctaagtcgaaatggaaagatgccatactagtggtggtggatcggttgacaaaatatgctcattttctggctttgtcacacccatacagtgtggaacaggtggtggagatatttatgaacaatatacaccgactgcatgggatgcctatggcaattatcatagatagagacaggatttttaccagccaactatttcaagaaatatttaaaagcatgaaggttcagctaagattcagtacttcataccacccacaaacagatgggcaaactgaaagagtcaatcagtgccttgaatcctatttgaggaacatgacatttcaggagccacatcaatggtattcttggctatccttggcaggatggtggtacaacaccacctatcatacatcccttcagatgacaccattccaagctctttatgggtatccacctccacaaatcaatgaattttcaatttcttgcaatgtgtctgctgaggcaaggacagaaaggagtctgaatgttggggacatggtgtacattaaactgcagccctacagacaaactgcatttggtatcaggggatcactgaagctgagatctaagttttatggaccatttaaggtactggagaagataggtcaagtggcctataaattacagctaccagaggatgccagtatacaccctgtgtttcatgtaagtcagttgaagaagcacttgggtcaaagagcagtgcctatgtctaatctgccttctatgggtcctgatggacagatcaaaacacaacctgtagctgtattgcagaggaggatgattcccagaaatggagtagcagtaactcaatggttgatactgtgggaaaatttgggaccagcagatgccacatgggaggatgctgctgtgattcaaagcatgtatccaacatttcatccttga

SEQ ID NO: 11670 - DNA, 1263 bp, Oryza sativa
  Clone ID: TFbOSC405185j.C1.o13.gm
atggaggaggatgaggaagaggatgacgagctcctcatggagatgaccagcgatgatgagctcctcttcctcaacggcatccacgttcggttggatttggagcgaacgctcaccacggcgcccatcaagctcagcgctccgttatgccaatcgctcgagtcgatggaggggaaattgttggagaagttggagttactcactcagaagatggaggctatggacgacaagatgacgaaacacggagggcggctcgatcaggccgtcgtcaaggtggatctcgctctggaggcggttgggaagctgcagcaagatcagcttcaggcggcgcggctgcaaaagagtttggcgtcttccgatcaaggtgttcaagagtctgattcccagactgaattatgtgctatttcttaccctcaaatattgaaatggcagaagggttgtgatatttgggctgctgttttgcttgaacctactgacaatgcagattctcagtccatttcagaagtagtagctccattactgtctgagtttgctgatgtttttcaagagcccaagtgtttacctcctcatcgcacttttgatcatgctatcttcttgtaccctgatgatgctcctgtcaacagtaaaccttacaggtattctcctttacaaaaggatgagattgaatgccaagtcaaggacatgattgattctggtctgaaatcagatgtggctaactttgttaagcagtgtcagatttgtcagcaggccaagtctgaacactgcaagctccctggcttgttaacaccattaccaattcctaaggaagcctgggtggacatatcaatggattttatcgaaggtcttcccaagtctgatggattcactgtcattcttgtggtgttgattaagtggtcttctttaccggcgcatcaggctacctgggaggattatgaagtgctcaagacccgctttccatcagcaccagcttggggacaagctgtttctccggcgggcggcaggctcgagaccatatcatgtcaaccaagattggttgatgtcccactcccaaacaatgcattgtctgctgttcaagctacaacatccgaagtgtcaaaactgatcatcccaaccaaccaatccttgcagctccatgatccaccctctccaaacgaaaggaccaagaagacgctgctggacagtcaaaaaagctgtcgcatgcggcacatcccttgtgtaatgaggatggccaagttagcgcaccaggacttcaggggcagcacctag

SEQ ID NO: 11671 - DNA, 5103 bp, Oryza sativa
  Clone ID: TFbOSC401078j.C1.o4.fg
atggcattcttcagcaactctggaagcagggctgattcaggagggtacaacctgaatgagaaggctgaggatgaagctgcctatgagtcagttggggacagggatgtcgacttgaactctaggcaatggaacttaaatgagaaggctgaggatgcctatcatagtgatgaggagcaatatgatggtggccggtcaggtccgaactcctcggagaataaatctgtgcagaatgcccggaaaataaatgggccttctggcccatggggtacaaactttttgaaggattgtggacccacacagacggctaaggaagagcaattgaccagtaacaggggaatggaatatgggtcggcggctagttcacatgacgacatggatgctagtggagaggatgatgagctgaaccgagggcatggggaggtgcctgctgaggaaatgctctctgatgactactatgagcaggatggagaggagcagagtgattcattgcttcgtggtgggatgcgccgcccaagctgttctacttctggggctgcagcagaatctgtctcctctagacaaaagaagaagccgacaaaatacaatgcttatgaggatgaagatgatgacgagtacaatgatgagaatgatgatgaagacgatgatgacgcagacgaagatgatccagacgatgtggattttgagccagaaagtgatactgaaaaggctgccgataaggataagtttgtggatagtgagaactccgacgaagaagaagatgatgagcttgagctctcagatgatgatgaagatgattttgttgagaataagaggcaatgtaagcgacttaaggttggtggaactaaaacctccaagggaagaaagcttcctgtacaggttcaacgcaaacgaggggtgtcttttacagatgaagattcttcaggaaaagactctgatgctcccagtgatactgatatcagtcaccgagcaaaaaaacccgacaagttgcatcagaaaactgtaggccgcaaggatgttttctcaaatgttgattctcatgaggttcgaacttctggaaggaggaggacagctagaaatatttcatatgctgaaagtgaagaaagtgatgatagtgaggaaaagttagctaagcaacaaaaggtcttgaaggaggacccagaagaggaagaaggggaaacaattgaaagaatcctttggcatcaacctaagggtgttgctgaagaggcactgaggaatggccaatcaactcaacctactgtgattagcttcacatcagatgtggatcaatcatgggatgatgtagaattctatataaaatggaagggccaatcattcttacattgccagtggaagacattatctgagctccaaaacgttagtggatttaaaaaggttctaaattacatgaaaagagttactgacgagctgaggtacaagcgatcgttatcacgtgaggaggttgaggtgcatgatgtgggcaaggaaatggagctggatcttattaaacagtacagccaggttgaacgcatatttgctgatagggttagcaaagttgatggcgatgacctggtgccagaatatttagtcaaatggcaaggacttccttatgcagaatcaacctgggaaaaagatacagatattgaatttgctcaggatgctattgatgagtacaaggcccgtgaagctgcaacatctatactcgggaaaacagttgatttccaaaggaaaaaaagcaaagctagtttgcggaggcttgacgaccaaccagaatggctaaaaggaggcaaactacgtgattaccagcttgaaggcctaaacttccttgttaatgggtggagaaatgacactaatgttattcttgctgatgagatgggtctgggaaaaactattcaatctgtctccatgctgggtttccttcataatgctcaagaaattaatggtccgtttcttgtggttgttccactgtcaacattgtcaaactgggcgaaagaatttcggaaatggctacctgacatgaatgttgtggtttatgtgggaaatcgtgctagcagagagatctgccagcagcatgaattttttacaaataagaagggtggtcgacatgtaaaattccatacattgataactacttatgaggtcatacttaaggacaaagctgccctttccaagatcaaatggaactatcttatggtcgatgaagctcatcgattaaagaattgtgaagcatcgctgtatacgactcttttggaattcagcactaagaataagcttctcatcaccgggaccccattgcaaaacagcgttgaagagctctgggcgttacttcatttccttgatccatctaaattcaacagcaaggatatatttgttgagagatacaaaaatttgagttccttcaatgaaactgagcttgcaaatcttcacaaggaattgaggcctcatattctaagacgagttataaaagatgtggagaaatctttacctccgaaaattgagcggattcttcgtgttgatatgtctcctctacagaagcagtattacaaatggattttggagcggaatttccagaatctcaacaaaggagttcgtgggaatcaggtctcgcttttaaatatcgttgttgagttgaaaaagtgctgcaaccacccatttttatttgaaagtgctgatcatggttatggtggagatagcattggtgatcgcaataaagttgaacgcattgttatgagtagtgggaaattagtgttattggacaagctgttgatggttaggatgttggacatccttgctgagtatctatccctccgaggattccagtttcagaggcttgatggcagtacgagagcagatcttcgtcaccaggccatggagcattttaatgctcctggaagtgatgacttctgttttcttctgtctacacgtgctggtgggcttggtattaatcttgcaacagcagataccgtgatcatttttgattcagactggaatccgcaaaatgatttacaggttcttgatcacctagtgattcagaagctaaatgctgagggcaggctcgagaagaaagaatcaaaaaaaggtggttccatgtttgacaagaatgaactttcagcgatattgagatttggagcagaagagttattcaaagaagataagactgatgaagagaccaagaagaagcttgaaagcatggacattgatgaaattctcgagagagctgagaaagttgaaacaaagggtggtgaaggggaggaaggaaatgaacttcttagtgcattcaaggcatgttctgtgcactaccatatgacctgtgattcagacatcatgcttaaattctatacttctgttgccaacttttctagtggtgaggatgatgccacattctggagcagattaattcaaccagatgcttcagatatggttgaggagactttagcacctcgtgctgcaagaaataagaagagctatgttgaagatcaccaacttgataagaatagcaacaggaaaaggcgaggaatcgatgcacaagaaaagccaaggaggcgttctagcagaacaatggacacagctgtgtcattaccactcatagatggttcagcacatcaagtacgagaatggtcatttggaaatttgtcaaagaaagatgctacccgatttgttcgagcggttaaaaaatttggaaacccaagccaaattgggttaatcgtggatgatgttggtggtgcaatagcaaagtcttcggttgatcaacagcttgagctgtttactctactcattgagggttgtcaagatgctgttaaaaataatatggatgccaagggcacagtgttggatttttttggtgtagcagttaaggcgcatgagttgatagcccgtgtggaagagctacagttcctggcaaggcgcattgcacgttacaaagatccagttagacaataccggatccaggcaccttacaaaaagccacagtggtcagcaagctgtggttggactgaaactgatgatgcaagattgatggttggaattcattggtatggctatggaaattgggagaagatacgattagatccaaaacttagcttgacagcgaaaattgcaccagcaacccttggtgaacgagagacgtttttaccgcgtgcaccgaacttggataatcgtgctagtgctcttctacaaaaggaatttgccaatcttcgtggtaagagctcgaaagccaagggaggtcctcgtcaagcaattgataatgaaagcaatggtggagctcgttcattaagaggccggcaaaaagacacaaaaataaaagaagataataattcaattaaagatgactttaagaaacgcaaggtggtggaacctgaagcaagggaagaaggtgaaatttcagaatctgaagcagagactaaatatcgtcaggacaaggaagaaaagtggctggaatggtgttctgaagttttggatgacgagcaggagatattaaagcggctggataggcttcagaatactagtgtaaatctgccaaaggaaaaggttctttcaagaattcggaaatacctccagataattggtaataaaattggagagatcgttgatcaacatagtgaatcatataagcaatcacgtatggcaatgaggttgtggaactatgtggcaaacttttcaagtatgtccggggagcaattgcacgacctctatttaaaacttagtcaggaccaaatggaagctggagtaggtccgtcacatggtgggaattttgcatcagtccctcccaacagggggcctaaatcaaatcagctccatccttccagaaaccaaaggtcaacaaggtctgtccagtacgtctctgagtctttcaacaatggtgaaaacactgggaattctgaagcctggaagcgacggagaagatctgagcctgataatcaatttgataaccaacctttgtatcaggctcctccaatcatgacaaatggaaacaggttacaggaatctagcagttctgctggtattcttggttgggctccggttgaaatgagacgatacggcaatgaaagaccaaaaagaggtgttcatcccagtcgttttccacccgggcatgggcctttgctgtag

SEQ ID NO: 11672 - DNA, 3303 bp, Oryza sativa
  Clone ID: TFbOSC400825j.C1.o42.fg
atgagcagcctggtggagcggctgcgggtgcggtcggagaagcggccgctgtacacgctcgatgagtccgacgatgacctcccgccgcgcggcgggggcgggaaggggagggatcggcacagcgacggccccaccgagcggatcgagcgggaggacgcggttagccctcttacggaaatggaaaagatattagactgtgaagaaacaaaacctgatgcttctgaagagactagttcttctgagtccggatcaaagaagaaacctgtcaaacgatatcttataaaatggaaaggaatatcacaccttcactgcacttgggtttcagaaagtgaatatttggaaactgccaagatatacccccggctgaaaactagactcaataacttccataagcaaatggattcaacggataagtctgatgatgactattctgcaattagacctgagtggactactgttgacaggatccttgctaccagaaaaagctctactggtgaaagggagtactatgtgaaatggaaggaactaacatacgacgaatgtacttgggaaaatgactccgacattgcagtctttcagcctcagattgaacgcttcaatgagattcagtccaggaggaagaagtctactgacaagtgcaagagtgtcactcgtgagatacgtcaatataaggagagcccgaagtttctctctggtgggacactacatccctaccagcttgaagggttaaacttcttacgctattcttggtaccataataaacgtgtaatacttggggacgagatgggtcttggtaaaacgatacagagtattgcctttttgggctctctatttgtggacaagcttggtcctcatctggtcgttgcacccctttcaaccttgcgaaattgggagcgtgaatttgcaacttgggcacctcaaatgaatgttgtaatgtattttggatctgcagcttctcgtgaaattattaggaagtatgaattttactaccccaaagagaaacctaagaagcttaagaaaaagaaatcatctccatctaatgaagacaagaaacaatcaagaataaaatttgatgtccttttgacatcttatgagatgatcaatatggattctactgttctaaaaaccatagaatgggaatgcatgattgtggatgaggggcatcgtttgaagaacaaagattccaagttgttcggtcaacttaaagagtatcatactaagcatcgtgttctcttaacgggaaccccagttcagaacaacctggatgaacttttcatgcttatgcacttccttgagggtgacagttttggtagtatagctgatctccaagaggaattcaaggacataaaccaggacaaacaagttgagaagctccatggaatgctgaagccgcatcttcttcggcgattcaagaaagatgttatgaaagaacttcctccgaaaaaggagctgattttacgtgttgagcttacaagcaaacaaaaagagtactataaagcaattctcaccaagaattatgaagtgttaactcgtcgtagtggtggacatgtttcacttattaatgttgtaatggaactacgcaaactttgttgccatgcattcatgacagatgaacccgaagagcctgccaattcagaagaagctttaagattttctgatgtcattaacattttaattccactaccagctttttattactttcaaacacatattgatgcagaggtactggagttctctgatatctcttgctgttatcttttcatttcacgtcttaacaaacacaatgccatatttgaagttgttgacatctggaggcttttagaatcttctggaaaaatggagctgcttgacaagatgatggtgaaactgaaagagcagggtcacagggttcttatttattcacagttccagcacatgttggacttacttgaggattatttaagctaccggaaatggagttatgagcgtattgatggaaaaataggtggtgctgagaggcagatacgaattgatcgcttcaatgctaaaaattctactaggttttgctttcttctttcaaccagagctggtggtcttggtataaatctggcaactgccgatactgtaattatttatgacagtgattggaatcctcatgctgatttacaagctatggcgagagcccatcgcttagggcagacaagcaaggttatgatatataggcttgttagtcgtggtacaattgaggagcggatgatgcaacttacaaagaaaaaaatggtattggagcacttagttgttgggcgtctcacgaaaggcactaatattgtccaggaggagttggatgatattattcggcatggctcaaaggaactttttgacgatgaaaatgatgaagccggaaaatcttgccaaatccattatgatgatgctgcgattgatagattattggaccgtgaccaagctgacggggaagagcctgtggaagatgaagaagaagacgaatttctaaaaggattcaaggttgctaactttgagtacatagatgaagctaaggctttagctgcaaaagaggaggaggcacgcaaaaaggccgaagctgaagctgcaaactctgacagagcaaatttttgggataaattattgaaggacagatacgatgtacaaaaagttgaagagcatactactatgggaaaaggaaaaaggagccgcaaacagatggctgctgctgatgaggacgacattaccggcctgcatgacatgagttctgaagatgatgattactcttatgatgatgatgtgtcagataacgacacaagtttacaatcaggccttgctgggaggaggggcccatattccaagaaaaaacaacgtagtaatgttgattcacttccattcatggagggcgaaggacgggctttgagagtttatgggttcaaccaaattcagcgaacacaattccttcaaacgcttatgagatatggttttcagaactacgattggaaggaatttactcctcgattgaaggggaaaagtgttgaggaaatccagagatatgctgaacttgtcatgatccatcttcttgaggacatcaatgactcaggatattatgcagatggcgtgccaaaggaaatgcgcacagatgagacattggtcaggctagccaacatatcacttgtggaagagaaggtggctgccatggaacaaggaaaaataacaaaactctttcccagctatttgttatatgaatttcctagcttagttggtggaagagtatggaaagcggaacaggatctactgttgctgaaagcattaataaattga

SEQ ID NO: 11673 - DNA, 4095 bp, Oryza sativa
  Clone ID: TFbOSC412868j.C1.o3.fg
atgagcagcctggtggagcggctgcgggtgcggtcggagaagcggccgctgtacacgctcgatgagtccgacgatgacctcccgccgcgcggcgggggcgggaaggggagggatcggcacagcgacggccccaccgagcggatcgagcgggaggacgcggttagccctcttacggaaatggaaaagatattagactgtgaagaaacaaaacctgatgcttctgaagagactagttcttctgagtccggatcaaagaagaaacctgtcaaacgatatcttataaaatggaaaggaatatcacaccttcactgcacttgggtttcagaaagtgaatatttggaaactgccaagatatacccccggctgaaaactagactcaataacttccataagcaaatggattcaacggataagtctgatgatgactattctgcaattagacctgagtggactactgttgacaggatccttgctaccagaaaaagctctactggtgaaagggagtactatgtgaaatggaaggaactaacatacgacgaatgtacttgggaaaatgactccgacattgcagtctttcagcctcagattgaacgcttcaatgagattcagtccaggaggaagaagtctactgacaagtgcaagagtgtcactcgtgagatacgtcaatataaggagagcccgaagtttctctctggtgggacactacatccctaccagcttgaagggttaaacttcttacgctattcttggtaccataataaacgtgtaatacttggggacgagatgggtcttggtaaaacgatacagagtattgcctttttgggctctctatttgtggacaagcttggtcctcatctggtcgttgcacccctttcaaccttgcgaaattgggagcgtgaatttgcaacttgggcacctcaaatgaatgttgtaatgtattttggatctgcagcttctcgtgaaattattaggaagtatgaattttactaccccaaagagaaacctaagaagcttaagaaaaagaaatcatctccatctaatgaagacaagaaacaatcaagaataaaatttgatgtccttttgacatcttatgagatgatcaatatggattctactgttctaaaaaccatagaatgggaatgcatgattgtggatgaggggcatcgtttgaagaacaaagattccaagttgttcggtcaacttaaagagtatcatactaagcatcgtgttctcttaacgggaaccccagttcagaacaacctggatgaacttttcatgcttatgcacttccttgagggtgacagttttggtagtatagctgatctccaagaggaattcaaggacataaaccaggacaaacaagttgagaagctccatggaatgctgaagccgcatcttcttcggcgattcaagaaagatgttatgaaagaacttcctccgaaaaaggagctgattttacgtgttgagcttacaagcaaacaaaaagagtactataaagcaattctcaccaagaattatgaagtgttaactcgtcgtagtggtggacatgtttcacttattaatgttgtaatggaactacgcaaactttgttgccatgcattcatgacagatgaacccgaagagcctgccaattcagaagaagctttaagattttctgatgtcattaacattttaattccactaccagctttttattactttcaaacacatattgatgcagaggtactggagttctctgatatctcttgctgttatcttttcatttcacgtcttaacaaacacaatgccatatttgaagttgttgacatctggaggcttttagaatcttctggaaaaatggagctgcttgacaagatgatggtgaaactgaaagagcagggtcacagggttcttatttattcacagttccagcacatgttggacttacttgaggattatttaagctaccggaaatggagttatgagcgtattgatggaaaaataggtggtgctgagaggcagatacgaattgatcgcttcaatgctaaaaattctactaggttttgctttcttctttcaaccagagctggtggtcttggtataaatctggcaactgccgatactgtaattatttatgacagtgattggaatcctcatgctgatttacaagctatggcgagagcccatcgcttagggcagacaagcaaggttatgatatataggcttgttagtcgtggtacaattgaggagcggatgatgcaacttacaaagaaaaaaatggtattggagcacttagttgttgggcgtctcacgaaaggcactaatattgtccaggaggagttggatgatattattcggcatggctcaaaggaactttttgacgatgaaaatgatgaagccggaaaatcttgccaaatccattatgatgatgctgcgattgatagattattggaccgtgaccaagctgacggggaagagcctgtggaagatgaagaagaagacgaatttctaaaaggattcaaggttgctaactttgagtacatagatgaagctaaggctttagctgcaaaagaggaggaggcacgcaaaaaggccgaagctgaagctgcaaactctgacagagcaaatttttgggataaattattgaaggacagatacgatgtacaaaaagttgaagagcatactactatgggaaaaggaaaaaggagccgcaaacagatggctgctgctgatgaggacgacattaccggcctgcatgacatgagttctgaagatgatgattactcttatgatgatgatgtgtcagataacgacacaagtttacaatcaggccttgctgggaggaggggcccatattccaagaaaaaacaacgtagtaatgttgattcacttccattcatggagggcgaaggacgggctttgagagtttatgggttcaaccaaattcagcgaacacaattccttcaaacgcttatgagatatggttttcagaactacgattggaaggaatttactcctcgattgaaggggaaaagtgttgaggaaatccagagatatgctgaacttgtcatgatccatcttcttgaggacatcaatgactcaggatattatgcagatggcgtgccaaaggaaatgcgcacagatgagacattggtcaggctagccaacatatcacttgtggaagagaaggtggctgccatggaacaaggaaaaataacaaaactctttcccagctatttgttatatgaatttcctagcttagttggtggaagagtatggaaagcggaacaggatctactgttgctgaaagcattaataaagcatgggtatgcaaggtggcaatatatatcagatgacagagataatgggatttttgaggctgcacgacaagagctgaggcttcctactgctaatgaactgattagttctcactcaaacaatgagacaaacggaaatctggaaagcacacaagaaggccagtcgaacccaacgagcatgatccattacagggatacacagagaaagatagttgagtttattagaaagagataccatcttttggagagatgtttgaatcttgaatacgctgtgattaaaacaaaaacccctgttcctgatgatctcgctgaacaagattttcctggtggtcatagaccggccgttccagactacagtgaaatgctgagagaattgcctgtccttgaacctatttccaaagaagtggcgcctgaaggcacaactgatcagtcacaagtttcccatctttacaacaagatgtgctttgtccttgaagacagtgctgttcctgcactcaactcgcatttcggtgacaaggcagcttcctccggtttagccaatagcctccataagtttgaagctgtatgcgaagacgttagtcgcatcttgagatcccatgaaaatggtaccactcccaaagaggaagttatgctagatgcaagctccaaagagaccacgtctccaaaagatccagcaaccgaggtgccttcgtcagcttccaaagaagctacgcctccagtacaagatccagtcatagaggcagtgaaggaggagccacccactgttaaggcggaggacaaaatggaaatcgatagttaa

SEQ ID NO: 11674 - DNA, 480 bp, Oryza sativa
  Clone ID: TFbOSC423269j.C1.o6.gm
atgccgcggggaatatctcgcctcaacgacggcgacgtcgtcgagttctccgtcggatccggcaacgacggccgcaccaaggccgtggacgtcaccgcgccggggggcggggcgctcaccggcggatcccgtcccagcggcggcggggaccgcggctacggcgggggcggaggcggcggccgctacggcggtgaccgcggctacggcggcggtggcggcggctacggcgggggcgaccgcggctacggaggcggcggcgggtacggcggcggcggcggcggaggcagccgcgcgtgctacaagtgcggcgaggagggccacatggccagggactgctcccagggaggaggcggcggtggtggctacggtggtggtggcggcggctaccgcggcggtggtggtggcggcggcggcggcgggtgctacaactgcggcgagaccggccacatcgctcgcgagtgccccagcaagacctactag

SEQ ID NO: 11675 - DNA, 726 bp, Oryza sativa
  Clone ID: TFbOSC102138j.C1.o12.fg
atggcggcggcggcgaggcatcgggggacggtgaagtggttcaacgacaccaaggggttcggcttcatctcccccgacgacggcagcgaggatctcttcgtccaccagtcctccatcaaggccgacggcttccgctccctcgccgagggcgagcaggtcgagttcgccatctccgagagcgaggacggccgcaccaaggccgtcgacgtcaccggccccgacggatccttcgtcaagggcggcgccggcggcggcggcggtggcgggggaggcttcggatcgcgcggtgggggcggatctggcggtggcggccgcagctatggcggtagctggggcggggggaggagatccggcggtggtggacccggtgggggctgcttcaagtgtggggagtctggccacatggccagggactgcttcaacggcggcggtgtcggcgttggtggaggcggtggcggcggcggcggcgctggtggtggctgcttcaagtgcggcgagatgggccacatggctagggactgcttcaacagcggtggtggtggaggtggtggtggtggcggcggcggcggcggcgcctgctacaactgcggcgagaccggccacctcgcgagggactgctacaacggcggcggtggaggcggaggcgggcgattcggcggtggaggcgaccgctcctgctacaactgcggcgaggctggacacatcgcccgcgactgccacaagtga

SEQ ID NO: 11676 - DNA, 633 bp, Oryza sativa
  Clone ID: TFbOSC401232j.C1.o22.gm
atgcgcggcgcagcgctgaatgctgggtgtactgcctgtctgctgccgtcggtggatggagcaggtcgctcgtcgctgctgttgctgcagggcggtggcagcggctggccagcgaagcggggcggcgagcggcttctagggctcggcggtgagggcaagatggtgtcggagagggtgaaggggacggtgaagggttttgacgccaccaatgggttcggcttcatcactcccgacgacgacggcgaggacctcttcatccaccagtcctccctcaagttcgacgactatcggagcctcaatgacagcgatgtcatcgagttatccgtcggatccggcaacgacggccgcaataaggccgtggacgtcaccgcgctaggcggcgacacgcacaccggcggattccgtcccagctgcgccgttggagctcgacgccctctgccctccaccgctgctcccctctcctcggccctcaacagcgtgcgctgtgccgtcatccgttcgccaccaccgtcgttgtataccattggccgtgccgttgttgttgtccaccatcagccgctcgttgtcgtcctcaccactagtgctgaaagaagatttggggaagaagtgttggatcggatgcgagggggctaa

SEQ ID NO: 11677 - DNA, 360 bp, Oryza sativa
  Clone ID: TFbOSC411506j.C1.o5.hg
atgaaggggttcgacgccaccaatgggttcggcttcatcactcccgacaacggcggtgaggacctcttcgtccaccggtcctccctcaagttcgacagctatcggagcctcaatgacggtgatgtcatcgagttatccatcggatccggcgacgacggccgcactaaggccgtggacatcaccgcgctaggcggcggcgcgcacaccggtggatcccgtcccagctgcggccagatccctacggctgcaagccgccgtctctcgacgtcccctcgttgtctcctggcccttgatgtgttgctgcttcctgctccgcgtcgatcgccaccactcgtcatcccctcgtcgtctcccggctag

SEQ ID NO: 11678 - DNA, 594 bp, Oryza sativa
  Clone ID: TFbOSC401879j.C1.o14.fg
atggcgtcggagagggtgaaggggacggtgaagtggttcgacgccaccaaggggttcggcttcatcacccccgacgacggcggcgaggatctcttcgtccaccaatcctcgctcaagtccgacggctaccgcagcctcaacgacggcgacgtcgtcgagttctccgtcggatccggcaacgacggccgcaccaaggccgtggacgtcaccgcgccggggggcggggcgctcaccggcggatcccgtcccagcggcggcggggaccgcggctacggcgggggcggaggcggcggccgctacggcggtgaccgcggctacggcggcggtggcggcggctacggcgggggcgaccgcggctacggaggcggcggcgggtacggcggcggcggcggcggaggcagccgcgcgtgctacaagtgcggcgaggagggccacatggccagggactgctcccagggaggaggcggcggtggtggctacggtggtggtggcggcggctaccgcggcggtggtggtggcggcggcggcggcgggtgctacaactgcggcgagaccggccacatcgctcgcgagtgccccagcaagacctactag

SEQ ID NO: 11679 - DNA, 822 bp, Oryza sativa
  Clone ID: TFbOSC401093j.C1.o13.fg
atgtcgtcgccgttcctgggctcttcttcctcttccgcttcgtcgcccctctcttacctgaccccgcctaggcctcctcctcctcctcctccccttctcatggtacgtcacggattagctcgatggttgactgatcttgacgatgagctgatggtgttcgacgacgatcttggcgtgcaggggcagggatacgccgctgctgccaatggcggaattggcggcggcggcgtcgaggcggtgaacgcggcggcggcgccgaggcagggtggcaggcacgccgggcacccgccgctgccgaggccgccgccgaggcagtgcccgcggtgcggctcggcgaacaccaagttctgctactacaacaactacagccgcacgcagccgcggtacctctgcaaggcgtgccgccgccactggacggagggcggcacgctccgcgacgtccccgtcggcggcggccgcaagaacagcaagcgcgccgccggcggaggcaaggccggcgccacagcctcgacggcggcttctgcccatgtcgtcgcgccggcggcggcgccgccgacgtcgtcgtcgttccccgatctcctgaggcagatgctgatggcgccggctaccgccggtggcggaggcggctacagcatcgacctgaccgcgtggcagcaaatggcggcgttcgcggctccacctcaggccgccaccggcgatgtcggcggcgcggtcggagcggcgtcgacggcggcgccggacgcgaactgcggcggcggcggcgtgcagtactggaacgggtggctgcaagatgacatgcccggtctagatggttcatgttaa

SEQ ID NO: 11680 - DNA, 1542 bp, Oryza sativa
  Clone ID: TFbOSC400138j.C1.o15.fg
atgacaacgaggaggacaagaaaggagagaaaacaaatgggagggggtggtaagtgcaaaagagggaaaagaggaaagattgcagccaagcgaagaaggggccaggtgcggtgttgcagcagcagcagcagcagcggaggcgcaagaagacgagctagagagagagaatcagaggagagcttgggtgagatgggtgagtgcagaggaggaggaggaggaggagatgggctgatcaagctgttcgggaagacgatcccggtgcagccggatgccaagtttttgattcttggctctgcgtctcttggggaattttcggatgttcagcagcatagtggcagtagcagcagctcaaccgaatccgacgtccaagaaaccgccgctgtcgccgtcgccgacccctccccgcggtcggaggtcgtcgacggcgagagcccgccgcagccgggcggcgaggcggcgagccatcagcagcagcagaaggagatgaagctgaagaagccggacaagatcctgccatgcccgcggtgcagcagcatggacaccaagttctgctacttcaacaactacaacgtcaaccagcctcgccacttctgcaagcactgccagcgctactggaccgccggcggcgccatgcgcaacgtccccgtcggcgccggccgccgcaagaacaagaacgccaccgccgccgcccacttcctccaccgcgtccgcgcctgcgccgccgccgccgccatgcccgcggcgccccacgacgccaccaacgccaccgtgctcagcttcggcggcggcggaggcggacacgacgcgccgccggtcaccctggacctcgccgacaagatgacgcgcctcggcaaggaggggctcgtcgcccatgcccggaacgccgacgccgccgccgcgtgcagcgaggtgtcgagcaacagggacgacgagcagatcggcaacactgtagcaaaacctgcaaacgggttgcagcagcatcctcctcctcctcatcatcatcatcattcagccatgaacggtggcggcatctggccctactacacctcggggatcgcgatcccgatatacccggcggcgccggcgtactggggctgcatgattccacctcctggagcttggagcctcccatggccggccacagtccagtctcaggccatctcatcatcatcaccacctacaagtgctacaccttcagtctcctccttcacactaggcaagcatcccagagagggtggtgatcatgaggcaagagatcaccatggcaatggtaaagtgtgggtgccgaagacgatccggatcgacaacgccgacgaggttgcccggagctcaatccggtcactcttcgccttcagaggcggcgacaaggcggatgataacaacgacgacgatggcaccggcgtgcacaagctcgccaccacggtgttcgagccaaagagggacagcaagacggcgaaacatccggcgatcacgagcttgccgctcttgcacaccaaccccgtcgcgcttacccgatccgcgaccttccaggagggatcttga

SEQ ID NO: 11681 - DNA, 957 bp, Oryza sativa
  Clone ID: TFbOSC401827j.C1.o1.fg
atggccgccgccgggatccttccggtgagtggtggcggcggcgcctcctcggcgcggccggtgtcgatggcggagcgcgccaggatggcgaagatcccgcagccggagccggggctcaagtgtccgcgctgcgactccaccaacaccaagttctgctacttcaacaactactccctcacccagccccgccacttctgcaaggcttgccgccgctactggacccgcggcggcgccctccgcaacgtccccgtcggcggcggcttccgccgcaacaagcgcggaaccaagccctctaactccaagaagcccgccgccgccgtcgccggcggcgtcatggcgccgccgcatgcgcagctgcagctccctttcgggtttgatggcggcggcggcggtggccatggtagtatcatcggtggtggtggtggtggtggcgcgtcaaggttagggtttccggagctcagctcgctgcacgcggctgccgccgtcgactaccagctcggcggcggcggcggcggcgacggcctcgggctcgaacggcagcgcctcccgcacttcccgttcttagcccgatccaacgccgcagtccatccaccgccgctgatgtccaccgccgccggggtatcgtatccatttggcgacgtcgcggcgggcggccttggcggcgacatgccggccaacgccgccagcgtcgccggctccgccgggctcatcacgcagatggcctcggtgaagatggacgacatcgacaaccacccaccaccgtctgcggcaacgacgacggcgagctcgccgattgagttcctcggtctccgtggaagcttgcagttctggggaggcggcggcggccaccgtggcggtggtgatggtgccggcggcagtgctgctcccggcggcggcggcggcgggtggtccgacctgccggcgtttgacttgtcaacgtctggaaatatactgtga

SEQ ID NO: 11682 - DNA, 1317 bp, Oryza sativa
  Clone ID: TFbOSC401231j.C1.o3.fg
atgaggatcagtgaagaaaagccatgcacagatcaggagttagatgctgatcagatgaatagttctagctttaatagttccagcgagtgtgagaatcaaacacctagcaatgatgaaatgactggatcagagtccaaatctgaggcagctcaaacagagggtggtggatcgagtgaagagaaggtcctgaagaagccagacaagatcctgccttgtcctcgttgcaacagcatggatacaaagttctgctactacaacaactacaacattaaccagccaagacatttttgcaagagttgtcagagatattggacggcaggtggaagcatgaggaacctccctgttggtgctggtaggcgcaagagtaagagctccactgcaaattaccgcagtatattaatcacgggcagcaatctagctgctcctgctggagatgctcccctctatcaactctctataaaaggagatcaaacagcaacggcagttaaatttgcacctgattccccactctgtaattccatggcctctgtgctgaaaattggagagcagagtaagaatgccaagcctacctcaacagcacaacccagaaatggagaaacccagacctgcccggcttcaggaacaacttcagatagtccccggaatgaaccagttaatggagcagttagtgggcatcaaaatggaattgttgggcatagtggagtccctcccatgcatcccataccatgcttccctggtcctccttttgtgtacccatggagtccagcatggaatggcattcctgccatggcaccaccggtatgcacagcaccagctgaaccagcaaattcttcagacaatggaagcacagctagtgttcagtggagcatgccaccagtgatgccggtaccaggatactttccggtaattccatcttcagtttggcccttcatttctccctggccaaatggtgcatggagctcgccatggattcaacctaattgcagcgtgtcagcttcatctcctacaagcactagtacatgttcagacaacggctctcctgtcctaggaaagcactccagggactccaaaccgcaaggagatgacaaggcagagaaaaacttgtggattccgaaaacgcttcggatcgatgatcctgacgaagctgcaaagagctcaatctggacaacccttggcattgaacctggtgaccgtagcatgttcagatcattccagtcgaaacctgaaagcagggagcagatatccggtgctgcacgagtcctgcaggcgaatccagcagctctatctcgatctcaatctttccaggagacaacgtga

SEQ ID NO: 11683 - DNA, 1167 bp, Oryza sativa
  Clone ID: TFbOSC401894j.C1.o43.fg
atggaggagatgctgatggcagcgaacgcggccgccggcgcgaatccgaatccggcggcgacggcgccgtcgtcggtgactgggggcgcactgaggggcggcggcggcggcggcgcgccgccggtggcaggtggcgcgggggcgggtagcacggagcggcgggcgcggccgcagaaggagaaggcgctcaactgcccgcggtgcaactcgacgaacaccaagttctgctactacaacaactacagcctccagcagccgcgctacttctgcaagacgtgccggcgctactggacggagggcggctcgctccgcaacgtccccgtcggcggcggctcgcgcaagaacaagcgctcgtcgtcgtcggcggcatcggcgtcgcccgcgtccgcctccacggcgaattccgtcgtcacgagcgcgtccatgtccatgtccatggccagcacgggcggcggggcgtccaagaacccgaagctggtccacgagggcgcgcaggacttgaacctggcgttcccgcaccacggcgggctgcaggcgccgggggagttcccggcgttcccgagcctggagagcagcagcgtgtgcaaccccggtggcccaatggggaccaacggccggggcggcggcgcgctctccgcgatggagctgctccgaagcaccggctgctacatgccgctgcaggtgccgatgcagatgccagcggagtacgccacgccggggttcgcgctcggtgagttccgcgcgccgccgccgccgccacagtcgtcccagagcttgctcgggttctcgttggacgcgcacggctcggtgggcgggccatccgccgcggggttcggctccagcgcggggttgcaaggcgtgccggagagcacgggcaggttgctgttcccgttcgaggacttgaagccgacggtcagctctggcactggcggtggaggcgcaagcggcggcggcgccggcgtagacggcggccatcagtttgatcacggcaaggagcagcaggccggtggcggaggcggcggcccaggcgggcacgacacgccggggttctggaacggcatgatcggcggcggcagtggcacttcttggggcattgtgaagcgaaggatgaagggaaggactcggttggggaggaagaaagaaaaatggacccccatcaccatgcat

SEQ ID NO: 11684 - DNA, 387 bp, Oryza sativa
  Clone ID: TFbOSC414619j.C1.o1.fg
atgcaggagttccaccccgtccccgggctggccggccggctgttcggcggcgcggcggcggcggcggctgtggcggcggtggaggaggtgcggtgcccgcggtgcgactcgtcgaacaccaagttctgctactacaacaactacaacctctcccagccccgccacttctgcaaggcgtgccgccgctactggaccaagggcggcctcctccgcaacgtccccgtcggcggcggctgcctcaagcccaaacgcccggcgccgccagagtttttctttcttcaccgggggggggggattagtctcttacttgccactcagactgattgcgtactttctgcttgtttgactgtatctggggacagttcacgattcgcattcgtgatgttg

SEQ ID NO: 11685 - DNA, 648 bp, Oryza sativa
  Clone ID: TFbOSC400431j.C1.o37.fg
atggaggtggcggaggggaggacggtggcggcggcggcggcaggtggtggaggattgggaggaggggcgaggacggaggcggaggggttggcgtgcccgaggtgcgagtccaccaacaccaagttctgctactacaacaactacaacctggcgcagccgcgccacttctgcaaggcgtgccgccgctactggacgcgcggcggcgcgctccgcaacgtccccgtcggcggcggcacccgcaacaaggtcgccccggcgccgtgcaccggccgccgcaagcgcgccgcccacgccgcgcacgccgcggcgccgccgccgacgacgacggcgtcgtccgcgccgctgccgctcatgccgccggcggtggcgtacgagctgccgttcctgccgccgccgccgccgctgccgctggcggccgtggaccccgaccgccgcctgctcgacctcggcggcagcttcacctcgctgctcgcgccggcccagctgcacaacggccacttcaccaccggcttcctgctgggcaccatgtcgtcggcgccgccgccgccgccgccgccggccacttctacaccgtctcccgcgccggccgcacacccgccggtgtcggacagcatctgggccatggggtggccgcacctctccatctag

SEQ ID NO: 11686 - DNA, 831 bp, Oryza sativa
  Clone ID: TFbOSC413680j.C1.o1.fg
atgcaggagcagcagccggagaccggccgccggccggcgcagcagttcgccaccgtcgacctgcgccgtcccaagggctacgcggcggctcccgcgacgccacagcctggttcggctgcgactgctgctgccgccgctggcccggctgcgacggcggcagcggcggcggcgggggagggtgacccgtgcccgcggtgcgagtcgcgggacaccaaattttgctactacaacaactacaacacctcccagccccggcacttctgcaagtgttgccgccgctactggaccaagggtggcacgctccgcaacgtccccgtcggcggcggcacgcgcaagaagtcctcgtcttcgtcgtcgtcgtcttcctcgtcatccgccgccgccgcagcacccgccgccaagcgccagaagacgtcgaagaagcgccgcgtcacgactcccgagcccctcgccgccaccacccccgtcctcaccgaagccgccgctgactccgccgccaagacgacgaccgaagctacgtcggagaagaagacgacgacttccacaacgacgacgacaccgccggcgcctgacaccacgagcgagatcaccacggagctcgtcgtcccggccgtggaggaggactcgttcacggacctcctgcagccggactccgccgccgtcaccctcggcctcgacttctccgactacccgtccatcaccaagagtctggccgacccggacctgcacttcgagtggccgccgccggcgttcgacatggcgtcctactggccggccggcgccgggttcgccgacccggacccgaccgccgtgttcctcaacctcccatga

SEQ ID NO: 11687 - DNA, 1296 bp, Oryza sativa
  Clone ID: TFbOSC415629j.C1.o30.gm
atgatcttcccccctgccttcctggattcctcgagctggaatgataacaacaacaacaaccacaaccagcagcagcagcagcaacatgctcacggccaccaccagcatcatcaggtcgccgccggttgtggaggcggcggcggcggcggcgacggcaatagccatgagcttctgcagcagcagtcaatgattccgggcacgcttgccgatggcggcggcggaggcggcgcggtggggccggcgaagccgatgtcgatgtcggagagggcgcggctggcgaggatcccgctgccggagccggggctcaagtgcccgcgctgcgactccaccaacaccaagttctgctacttcaacaactactccctctcccagccccgccacttctgccgcgcctgccgccgctactggacccgcggcggcgcgctccgcaacgtccccgtcggcggcggctaccgccgccacgccaagcgcgccaagcccaagccggcgtccgcggcgggctccgcctcagccgccaccaccaccgccggctcgacgccagcggggtcgacgacgacgacgacgacgtcctccacctgcgccacgcccaacgcgcccgccctcccggcgatgctgggcggcaacctctccatcctgccgccgctgctccgcctcgccgacttcgacgccatgagcctcggctccaccttctctggcatggcggcggccgccggcaagccaccgcccgtcgacgcggccggctgctactccgtcggcgccgccaccggcctcgagcaatggagactacagcagatgcagagcttcccgttcttccacgccatggatcaccaggcggcgatggcggcgccaccgccggcaatggcaatgccggggatgttccagctaggcctagacggcgacggccatggcagcggcggcggcgaagacggtggagagctccaccatgcgatgccatcatcgaagagagaaggctacccaaggggcatgtatggcgatcatcacctcgctggaggatacacctcctactccagtgcaaccacagtcttcgtcgttgtgttggtgatggtgtgtgcatggaagtttgagaagtgcactgagaaagaggaagaagatgagctgaagaaggaagtgcatgctctggttcagtggtggaaccggctgggccaaaaggaggaggagtcgcagacaggccgcagcgtcgcgtcgacggaggtgctgggtgtcggcgacccgcctccgcaggtcggcagcggcgcggcggcggacctgcgaggcagcgcgagcgcgagggagtga

SEQ ID NO: 11688 - DNA, 528 bp, Oryza sativa
  Clone ID: TFbOSC401137j.C1.o11.fg
atggcgaacctcccctccaccgccgccgccgccgccgcagacgcctccgggttcaagctcttcgggaaggtgatccagcccgacggacagcggggcgtggaagagagcgcggcggcgcaggcgccacctcatccgcatccgcctgcgccgccggtgatggaggcggcggcggcggcggcggggacgtcgcagactctgcaggcggcgggcggtggcggtggcggaggagggggaggagggggagagccgctgccgtgcccgcggtgcgggagcagggagaccaagttctgctacttcaacaactacaacgtgcggcagccgcgccacctctgccgctcctgccgccgctactggacggccggcggcgcgctccgccgcgtcgcctcggcgtccccgggaaggcgcaggccccgccccagcgccgcccgatcggccgccgccgccgccgcctccgcctccgcggcgtctccccccgccgccgtccccgccgcctccgagggggcggagagcgttgactcgcggtcgtag

SEQ ID NO: 11689 - DNA, 1044 bp, Oryza sativa
  Clone ID: TFbOSC17105j.C1.o4.fg
atggcgccggcggccggggacgacgcggtggtgccgcgaaagggagctggaggtggggggacgacgacgccgccgccgccgccaccggcgcagcagcagcagcagcagccgctcccgccgccgccgccgcaggagcaggggttgcggtgcccgcggtgcgactcgccgaacaccaagttctgctactacaacaactacagcctcagccagccgcgccacttctgcaagacgtgccggaggtactggaccaagggcggcgcgctccgcaacgtcccagtcggcggcggctgccgcaagaacaagcgatcccgctccgcggcggcggcatcgcgcctctcgctcaacctgccgacggtggagggtatcggcggtgcagcggccgaccccgctgcggcggctgctgccaggctggggtttcttggcggtggaacaacgatgatgatgtcgtcgtcgacgtcgccgctcggtggcgccgccgccgcggtggccgacttccagcagggcggcgccgtcgggatgctgccgctgccgcggctccaatcccccgccggcggcggcgtcgggcatcatcagtacgtgccgttcggggagtggccctcgggggacattgccggcggcaacgcggtgaacggcgccgccggccacggcgcgcagcagaggctcgccaccatgttcctcggcccgccgggctccgcctccgccgccgccgccgccgcccaggccaacgacggtggcggcaacggcgcccaagccacagcgtcagggcatgctgccggaggaggcggtggcgccttcatgcacatggctggtagtgttcccagcatggaggcggccatgccgtcggcgacgtcgtggttcatggacagctgctcctacgggctcccttccccaccgccgcctgccactgccgccgtggccgccaccaccagcagtaacctcaacagcggcggccggagtagcggcggcgatgataacgccacctccaactgcggcagcgcgatcccggcgtggggcgacatctcgacgttcgcgatgctgccctag

SEQ ID NO: 11690 - DNA, 1116 bp, Oryza sativa
  Clone ID: TFbOSC900120j.C1.o17.fg
atggcgccggcggccggggacgacgcggtggtgccgcgaaagggagctggaggtggggggacgacgacgccgccgccgccgccaccggcgcagcagcagcagcagcagccgctcccgccgccgccgccgcaggagcaggggttgcggtgcccgcggtgcgactcgccgaacaccaagttctgctactacaacaactacagcctcagccagccgcgccacttctgcaagacgtgccggaggtactggaccaagggcggcgcgctccgcaacgtcccagtcggcggcggctgccgcaagaacaagcgatcccgctccgcggcggcggcatcgcgcctctcgctcaacctgccgacggtggagggtatcggcggtgcagcggccgaccccgctgcggcggctgctgccaggctggggtttcttggcggtggaacaacgatgatgatgtcgtcgtcgacgtcgccgctcggtggcgccgccgccgcggtggccgacttccagcagggcggcgccgtcgggatgctgccgctgccgcggctccaatcccccgccggcggcggcgtcgggcatcatcagtacgtgccgttcggggagtggccctcgggggacattgccggcggcaacgcggtgaacggcggcggcggccacggcgcggtgagcagcaccatcgcgtcgtccatcgagtcgctcagcttcatcaaccaggacctgcactggaagctgcagcagcagaggctcgccaccatgttcctcggcccgccgggctccgcctccgccgccgccgccgccgcccaggccaacgacggtggcggcaacggcgcccaagccacagcgtcagggcatgctgccggaggaggcggtggcgccttcatgcacatggctggtagtgttcccagcatggaggcggccatgccgtcggcgacgtcgtggttcatggacagctgctcctacgggctcccttccccaccgccgcctgccactgccgccgtggccgccaccaccagcagtaacctcaacagcggcggccggagtagcggcggcgatgataacgccacctccaactgcggcagcgcgatcccggcgtggggcgacatctcgacgttcgcgatgctgccctag

SEQ ID NO: 11691 - DNA, 621 bp, Oryza sativa
  Clone ID: TFbOSC900263j.C1.o6.fg
atggctcctgcggttgcctcctccccgtcactcgtgctctccgccgccgccgccaccgcctccaacaagcgcccggccgattccgatgcctcgccgccgcaccagggagatcgcacggggcagcaggagaagaagcagcagcagctggagtgcccgcgctgccgatccaccaacaccaagttctgctactacaacaactacagcacgtcgcagccgcgccacttctgccgcgcctgccgccgctactggacgcacgggggcacgctccgcgacgtgccggtgggcggcgcctctcgccgcggcggcggcggcaagcgccgcagggtctccgccgacgccgacccttcctcggcgtcgccgccgccacccacgacttccaccacggacgcgtacgccgacctcccagccggcttcccgttcctcagtgacggcgccttcctgccgcagttcggcctcgccggcgttgcgccggccgcgttctcttgggcatcggctgtccctgacttgtacaactgcgggatcgcgccgtgggacgatggaacggcggtcaccggcgcggcgtgggacaacttcgccgacatcgccggccttgatctcagctggccgccgccgggtaactga

SEQ ID NO: 11692 - DNA, 1080 bp, Oryza sativa
  Clone ID: TFbOSC400755j.C1.o13.fg
atggctggagcggggggtgcggctacggctgcagcgggaggaggaggtgggggaggggtggcggcggggaggagtggaggtggtggtggtggtggcgcggcggcggcggcgggggcgggggcgccggacccgagggcggaggcgctgcggtgcccgcggtgcgactcggcgaacaccaagttctgctactacaacaactactcgctgtcgcagccgcggcacttctgcaaggcgtgcaagcgctactggacgcgcggcggcacgctgcggaacgtccccgtcggcggcgggtgccggaagaacaagcggtcgaggagcggcggcgcggcgcctggtggcggcgtggggaggggcgggcctggaggcggggcggcggcggccgtctcgtcggctggcggcggtgcagctgggacttcgcccgcgtcgtcgctggcgctgccgcagccagggtcgctgccgtcgctgtcgtcggcgctggggctcaccgggggaacctcgctggcgtcgctgctgctcgggagcggcggctccgggggtgaccacctcgggctcttccaggccatgcagtcggtggtgtccgacgcggccgcgttcgagatgcaccagcagcatcagtcgcaggtggatcacctgctcggcctcggctacggcgccgcgggggcgcagatccaggcggccaagccgtggctgcatgacggcggcgccaccggtggcctcctcgacggcttctacgcgccgctcctgtccggctccatcgtgccggggctcgaggagctccaagtcaaggcggaggccaccaccggcgaccaccagcagaagtcatcggcggcggcggccggtgagcagagctgggacctgccgacgccgtcgtcgtccaacgtcgaggcgagcatcatcgcgtcggacgcgctcatggccgccgcggccgcgtcgatgaacccggcggtcagcgccgccgccgcctccacggcgccgtccgcgcagtcgctcctctactggggcaacggcggcattggcgccgccgccgcggcatggccggacctcgccaactgcggatcctccatagcgacgctcttctag

SEQ ID NO: 11693 - DNA, 1068 bp, Oryza sativa
  Clone ID: TFbOSC408710j.C1.o17.fg
atgccgccgcatcacggcggcctcatggcgcctcggcctgacatggtagcagcggccgtcgcggcgagcggcggcggcggtggcggcggcggcccgaccggcggcacggcggtgcggccgggctcgatgacggaacgggctcggctggcgaagatcccgcagccggagccggggctcaagtgcccgcgctgcgagtccaccaacaccaagttctgctacttcaacaactactcgctctcgcagccgcgccacttctgcaagacgtgccgccgctactggacgcgcggcggagcgctccgcaacgtccccgtcggcggcgggtgccgccgcaacaagcgcaccaagtcgtccaagtcgtcctcgtcgacgtcggccgccggctcggcctccgccaccggcggcacgtcgtcgtccacatcgtcgaccgccacgggtggcagcagcagcgccgcggcggccgcggcgatgatgccgccgcaggcgcagctgccgttcctggcctcgttgcaccacccgctcggcggcggcgatcactacagctccggtgcgtccaggctagggtttcccggattgagctcgctggatcccgtcgactaccagctcggcggcggcgccgccgccgccgccgccatcgggctagagcagtggcgcctcccgcagatacagcaattccccttcttgagccgcaacgacgccatgccgccgccaatgtccggcatttacccgttcgacgcggaggccgccgccgacgccgccggcttcgccggccagttgctggccggcaccaaggtgcccggctcgtcgggcctgatcacgcagctcgcatccgtcaagatggaggacagcaacgctcagtccgcggcgatgaacagctcgccgagggagttcttgggcctccccggcaacctccaattctggggcggtggcaacggcgcgggacccggcggcaatggagacggcgccaccggcggcagcggcgccggtgtcgctccgggaggcggcggcagcggcggcggatgggctgatctctccggattcaactcgtcgtcgtcggggaacatactgtga

SEQ ID NO: 11694 - DNA, 1212 bp, Oryza sativa
  Clone ID: TFbOSC401232j.C1.o3.fg
atggtgttcccttcagtgcctgcctacctagatccacctaattggaataaccagcaagggcagccgcccaggccggcgaacgtaggcggcggcgatgcacagcacctgccggtcgggccgaccgcagctgcggcggcgccgggcgagatcggggggctgccaacaagcagctcgtcggccagcgcggcggcggccgcggcgcagcaggcgcggccgaactcaatggcggagcgcgcgcggctggcgcgggcgccgcagccggagccggcgctcaagtgcccgcgctgcgactccaccaacaccaagttctgctactacaacaactactccctctcccagccccgccacttctgcaagacctgccgccgctactggacgcgcggcggctcgctccgcaacgtccccgtcggcggcgggtgccgccggaacaagcgctcgggcaagtcctcctccgccgccgccgccggcgcgtcgtcctcctcctccaagccgtcctcgtcggcggccaggcagctgcccggcggtggcgcgtccccgatgccgtccgccgcggcgtccacgcagccaggaggcgccgccgccggcgcgatcatcccgccgtcgggcctcagctccatgtctcaccacctcccgttcttgggggcgatgcacccgccggggcccaacctagggctaaccttctccgccggattccagcctctcggcggcatgcaccaccacgtggacacggcggaccagttcccggtggcaagcggcggcggcgccaccattggcgcgtcactcgagcagtggagagtgcagcagcagcagcagcagcagccacaacagcatcagttcccgttcctcggaggagcactcgagcttccgccgccgccgccgatgtaccaactgggactggaagctactcgagcagcaggcaccggagcaacggcggcggcggcgttcacgttagggcagaccagtgctacagccaccacgtcaaggcaggaaggttcaatgaaactggaagatagcaaagggctggagatgagcctgcagaggcagtacatggcggctctacgccaaggagatggtgtctggggtaacaacaacggcggcaatggcggcagcgacggtggcggcaatggcggcggtggcagctggacaatgaacttccctggattccattcgtcatcaggcggcggcggcgatgatggcggcggagtgttgtag

SEQ ID NO: 11695 - DNA, 1482 bp, Oryza sativa
  Clone ID: TFbOSC400397j.C1.o44.fg
atggccgcgcttaggcagggcgacgaccccgccatcaagctcttcggccgcaccatccccctcctcctcgacccccccgccgccgccgccgccgccgccgacgaggaaaattctgttctagaaaattctgttctatcctttcttgatttcttggcaacatttggggtcatgcctaatttaggaaatggtgtaaaaaccaataatgacttacctttagtctcagacaagcttttgattgtcaaaggtattcctttttgtcccaacaatagtaagaaaaatgatttacaaggcatcagcagaccggatggaagaatagaaatcgattccatgactgaggatgttaagactgagcctgatggatctgtccctgagaagatactcaagaagccagataagattctgccatgtccacgctgcaatagcatggaaacaaagttctgctacttcaacaactacaatgttcaccagcccaggcacttctgcaggaactgccaaagatattggaccgctggtggagctatgaggaatgtcccagttggtgctggaagacgcagaaataagcatgtgtcaaaatactgtcaggcgatgatgacgtgcaataatactgtagctcctggagatgtttctgatgtggttcaccatcaggttattacacatggatcttctctccttccagcaacactgaaggaaaatgaaacacctacagaattcatatcagaagtaccaccatgtaagtcttcagcttcaatccttgatattggagagccgaatgatactgaccttgttcccttggcctctggtgataacaaggaagaaaaatcatgtgcatcttctgtggtagtatccagctgttcagagaatctgatgccagataatgcaattatgaaagagccaaacaacaggtcaggatgttgtaatggtgtggcattgcctttccctactggacctgctttggtgctcccctggagtcttggatggaacagtgttgctctcatgccagctacccagtgctcgatgcagcccgttcttgggttaaaagatgggataccctgcccgccttcatggccaccgcaactgatggtgccggccccaggaatctgtactcctgttgttccaatccctcttgtgccacctctgtggagctgcttccctggctggcctaatggaatgtggaatgcacaatgccctggaggaagcagttctctggtgttgggaaagcattcaagagaagaaagcttgcaggaagaagagaagacgagaaattacttatgggtacctaaaactcttaggattgatgatccagctgaggctgcaaagagttcaatctgggcgacccttggcatcaagcctgacgataaaggcatattcaagtctttccagccaaatgttgcgaaaaatggcacggcaccagaatcgcctcaggctctgcaggccaatccagcagcattttcgcgttctcaatcgtttcaagagacgacttga

SEQ ID NO: 11696 - DNA, 1323 bp, Oryza sativa
  Clone ID: TFbOSC401896j.C1.o16.fg
atgggggagtgcaaggtgggaggaggaggcggaggcggagactgcttgatcaagctgttcgggaagaccatccccgtgccagagcccggcgcctgcgccgccggcgatgttgataaggaccttcaacacagtggcagcagcacgactgaaccgaaaactcaagagaacaccgttcaagactccacaagtccacctccgcagccagaggtcgtcgacaccgaggactcttcagctgataagaactcatcagagaatcagcagcagcagggcgatacggccaaccagaaggagaagctgaagaagcctgacaagatcctgccgtgcccccggtgtagcagcatggacaccaagttctgctactacaacaactacaacatcaaccagccgcgccacttctgcaagaactgccagaggtactggacagcgggtggtgccatgcgcaacgtgcctgtgggtgcaggccgacgcaagagcaagagcgtatcggccgcttcccatttcctccagagggtcagggctgctctgcccggtgatcctcctctctatgccccagtgaagactaatggcaccgttctcagcttcggctccgacctgtccaccttagacctcacagaacaaatgaagcatctaaaagataagtttatcccaacaaccggtatcaagaacaccgacgagatgccagtcggtttgtgtgctgaaggattgtcgaaaacagaagaatcgaaccaaacgaacctaaaggagaaagtttcagcagatagatctccaaatgttgcacaacacccatgcatgaacggaggagccatgtggccatttggcgtggcaccaccacctgcttattacacttcaagcattgcaattccattctatccagctgcagcagctgctgttgctgcatactggggctgcatggttccaggagcttggaacgctccatggccaccgcagtcccaatcccaatcggtttcatcatcaagtgctgcttctccagtatccacaatgaccaactgcttcagattaggaaagcaccctagagatggtgatgaggaactggatagcaagggtaatggcaaggtgtgggtgccgaagacggttcggatcgacgatgtcgacgaggtggccaggagctctatctggtcgcttattgggatcaagggtgacaaggtgggagcagatcatggcagaggatgcaagcttgcaaaggtttttgagtcaaaggatgaggcaaaggcatcaactcacacagcgatcagcagcttgccattcatgcaggggaacccggctgccctaacacgctcggtgaccttccaagagggatcttga

SEQ ID NO: 11697 - DNA, 618 bp, Oryza sativa
  Clone ID: TFbOSC401539j.C1.o71.fg
atggccccggcggccggcgggttcaagctgttcggcaaggtcatcatgcagtgcggcgtttccgaggggacacaggacaaggcgcagggcttcgtcgtggcccgggagaaggttgaaccggaggaggaggaggaggaggagcagcgtgtcccggctgctgctacgtcggggcagcgcgcgtcgatcaagcgggaggccgcggaccgcgacgaggagcaacggcaagggggcggggacgcggcggggcagccgacgcagcggcggttgcaggactcggccgaggcgcgtgcggccgccgcggcgccgctgccgtgcccgcggtgccggagccgtgacaccaagttctgctacttcaacaactacaacgtcaaccagccgcgccacttctgcaaggcctgccaccgctactggacggccggcggcgcgctccgcaacgtccccgtcggcgccggccgccgcaagaaccgtcccctgggccccctcgcggtcgcccaccataaccaccaccaccgcgcggccgccggcttcgtcctcggcttccccaacccgtcctccccaacctccccgtcgccggtctacaccgaccggtggccggtcaccccggaccgcccgttttga

SEQ ID NO: 11698 - DNA, 963 bp, Oryza sativa
  Clone ID: TFbOSC409189j.C1.o1.fg
atggctaagctagcttcatgcatgactgcatcgatctattcaacagctataaatccgaggaacaaactaaacagaaataataagggcatcgtccccgaggagcacgggatggggtcgtcgtcgccgtcggcggagctgatcgcgtgcccgcgggcgccgatgcaggcggcggcggcggcggccgaccgccggcttcgcccccagcacgaccagccgctcaagtgcccgcggtgcgagtcgacgcacaccaagttctgctactacaataactacagcctctcgcagccgcgctacttctgcaagacgtgccgccgctactggaccaagggcggctcgctccggaacgtccccgtcggcggcggctgccgcaagaacaagcgcgcgccgcccaagaaggccgccgcccacgcccagcccgcggtggcggtggcggcggcgctgcaaggccgccacatggagaccggactccacctgtccttctccgggatgcagcatcatcttgcgccgccgccgccggcggcggccaccgcggccgacccgctctgcagccttggactatttgactggaagcagtacgaccccgtcttcgccggctccggtggcggcggctcccccgtggcggcgctggagagcgctggtggctcggaggcgcagttcatgggtgctggcatgatgggcattggcggcggcggcgtcgcggagtaccatgcgctgagcgcgctccggttcgcggcagggctcggcgatcacctggcgctgccgttcggcgcggtgcgggcggagcacgacgccgtcgaggtgaagccggtggcggcggagaggctgctgtcgctcgagtggtgcggcgaggcgagccgcacggcggcgccggagagctccattagctcgctgggcgggctgggactgtggagcggcatgatcggcggcgggcaccatcaccatggctcctccgctgccatctga

SEQ ID NO: 11699 - DNA, 1098 bp, Oryza sativa
  Clone ID: TFbOSC400070j.C1.o16.fg
atggcgaacaaacagtgggccgcaggcagcgtcgtggctcgcgcacgtccgtgcgtgcgtgtgcgcacgctgcgcggcaggcgcgccggggacggccgtgcgcctgacgcatgcagatcagatacgttagttaagaatgtttgccacgatagcgtgacaggcagcgagcattccaaaatggaaaaccaaagtggttggttctacgtgaccatctcgaaagaaagccaaaagcgtcgacggaaacgagaggcgcaggagttccagtccatcccggggctcgccgggcggctgttcggcggcgcggcggcggctgacatccggcgcgcgcaggcgcagcagggcccggcgtcgcggtgcggcgggataccgtcgccggaggcggtgaagtgcccgcggtgcgagtcgaccaacaccaagttctgctactacaacaactacaacctctcgcagccgcgccacttctgcaagagctgccgccggtactggaccaagggcggcgtcctccgcaacgtccccgtcggcggcggctgccgcaagaccaagcgtagcggcagctcgtccgctgcgtcctcggccccgtcgacgccgacggcggcaactgacaacgccaagaaccagcggcgcgcctcggcgtcgtccccacgatccagtagcggcggtagcggcaacacgagccccacggccgccgcggcgacgaccccgacgacaccggccacgccgtcgtcgaacaccatcgccgtcataaaccacgcgacgacgacgacgacgacgacgaaccccttcccgacagacgtgccacctccggcgccgattttcgccgaccaagcggcagcgctcgcgtcactgttcgcccctcctccgccgccgcctctcccggtgttcagcttcgcagcgcaggcgaagaccgaggacgggattgcctccgttctactcgccggacagacgacggcgcccactgccgccaccgttgccgacatgacgccgttcacgtcgctggacgcggggatcttcgagctcggcgacgtgccgccggcggcgtactggaacgccgggagctgctggacggacgtcccggacccgaatgtctacctaccctag

SEQ ID NO: 11700 - DNA, 1320 bp, Oryza sativa
  Clone ID: TFbOSC423196j.C1.o8.fg
atggcgtcgggatcgctcctgctgcctcccgcctgcctccagcatccgcttccggcggcggcggcggcgtcaggcggcgtgggagggagtagcagggagcagtgcccgcggtgcgcgtcgcacgacaccaagttctgctactacaacaactacaacacgtcgcagccgcgccacttctgccgcgcctgccgccgctactggacgctcggcggctccctccgcaacgtccccatcggcggctccacccgcaagcgcccccgcccccccgtgcgccgcccgcccgtccacttcaccgccgccgccgccgccgccgccgccgctgcaccgcctcatcaccatcatcatcatcacggsgggccgctcacgccgccgccggcgacctcttcttcctcgcagcaggcgggcctgctcggctcgctgttcgcgctcggcgcggcgccgctgctggagggccgcgtcggcgtcggcttcgacctcggcctcggcctgcccggcccgggccaccaccatgccgtcgccggcggcggcggacctgctgcagcggtggcgacgtcgtcgtcgtcgtcggcggcggcgcctctgctctggcccaccgggctgttggacagcagcagcaataatgccgagacatggaggatggcgsccggcggcatgtggccggagttcactgcggcggcggcgcagaacatcaggctggtgattgacatcggcgacacaacgatccaggtccctctcaatggccccaccgtcgtgcagaacatcggccgtcaggctgccgccgccgtcgccggagattcgtcagccggtggtgttagtgagaaaaccggtggtgctggtggcggcggcggcgaggagtggatgcaagaacaggatggcttgttgtgcatgcgcgggcggcgctgcggccgccggggtggatgcctgccgaggccgcgtgactggttcgcggcgctgctcgccgccgacccggcggcggccgccgtcacgagggaccaggccgggaaggcgatgctgtacctgatcgtcaacacctgcaccttcgccacgtcgctcgccgtgctccctgatgctgttcgccgtcggcggcggctgcgcgtcgaggagggtcaccgcgtggctgatcaccaacatgatgacggccgtcgcgctgttcgccgcggcgacgttcgcgctctgcgccgccgacgactaccggctcatggaccgttcgtcggcaccgtcgtggccgcagtcaccgtcgtggtcgtcaggtgcaatcttgctctgccgtttcggggaggcgacgccggccatggttgtagctgggtttcaagattgtaa

SEQ ID NO: 11701 - DNA, 404 bp, Oryza sativa
  Clone ID: TFbOSC400755j.C1.o28.gp
gtcggacaccaccgactgcatggcctggaagagcccgaggtggtcacccccggagccgccgctcccgagcagcagcgacgccagcgaggttcccccggtgagccccagcgccgacgacagcgacggcagcgaccctggctgcggcagcgccagcgacgacgcgggcgaagtcccagctgcaccgccgccagccgacgagacggccgccgccgccccgcctccaggcccgcccctccccacgccgccaccaggcgccgcgccgccgctcctcgaccgcttgttcttccggcacccgccgccgacggggacgttccgcagcgtgccgccgcgcgtccagtagcgcttgcacgccttgcagaagtgccgcggctgcgacagcgagtagttgttgtagtagcagaact

SEQ ID NO: 11702 - DNA, 963 bp, Oryza sativa
  Clone ID: TFbOSC400259j.C1.o105.fg
atgctgccgtacgcgccgcggccgccgtcgctgctggtggatcgccggtacaagcagggcgccgaggcggcgcccaactgcccgcgctgcgactcgcccaacaccaagttctgctactacaacaactacagcctcagccagccgcgctacttctgcaagggatgccgccggtactggaccaagggcggctcgctccgcaacgtccccgtcggcggcggctgccgcaagaaccgccgcgggaagtcctcgtcgtcggcgcggtcggcggccgacgccgtctcgagcggccgcgacgcggcgttcggccaccggttccccggcccggtccggcctgacatggtcctggaaggcatggtcgggaacccggcgaaccccggccaggcgatgcccgacgtcgccgccgcggcggacggctcgaccatcgacctcgcaatgctgtacgccaagtttctgaaccacccgccgaccgacgccgggctcggcgccgtcacgccggagtcgggagggcacgtcgacgaggcgttcgacacgttcagcgcgtccagcgatctgagccccggcatcctggcggcggcgtcggcgcagttcgacccgaaccaggacgggttcggcgagtggtccagtccagcgagcggcaacgacccgacgagtactgcaaccaccgcaaccacctccatgctgtgcacggacgcgagcgtgcaagccgcgctcggcgagctcaacttcgccatggatcagagctgcttcgactcgctaggtttgcccacggacgtcgccggcgccggcagcctgtcgtcgtggtgctcgatcgtgccgagcttgtcgacatgggaggagcccaagtacgactcgttggattcgtttcccgacgacgccatgagcctccatgagtgcatgatcggcgctcctgatcatgattggagcgtggattgccaaggattggaggctctttacatgccataa

SEQ ID NO: 11703 - DNA, 1050 bp, Oryza sativa
  Clone ID: TFbOSC405553j.C1.o2.fg
atggaccagctcaagggcgccagcgctctgaaccacgcctccctgccggtggtgctgcagcctatcgtgtccaacccgtcgcccacgtcgtcgtcgtcgacgtcgtcgcgctcgtcggcgcaggcgacgcagcagaggtcgtcgtcggcgacctcgtcgccgcacgggcaggggcagggtggcggcgcggcggagcaggcgccgctgcggtgcccgcggtgcaactcgtcgaacaccaagttctgctactacaacaactacaacctcacccagccgcgccacttctgcaagacgtgccgccggtactggaccaagggcggcgcgctccgcaacgtccccatcggcggcgggtgccgcaagccgcgccccatgccggcgccggtcgccaagccgcccatgtcttgcaaggccgcgccgccgctcggcctcggcggcgggccagtgtcctgggcctccgggcagcaggccgccaccgcgcacctcatggcgctgctcaacagcgccaggggagtgcagggccacggcggcagcaatgtccaccggcttcttgggctggacaccatgggtcacctccagatcctgccaggcgctcccaatggcgccggcgccggcacggcggcgtcgctctggccacagtccgcgccgcggccggtcactccaccgccgccgcacatggactcccagctcggcatggggacgctgggccaccacgacgtgctgtcgagcctcggcctcaagctgccctcgtcggcgtcgtcctcgccggcggcgagctactacagcgaccagctgcacgcggtggtgagcaacgcggggcgcccccaggcgccgtacgacgtcgccaccgcgtccctcccttgcaccaccgcggtgacctcactcccgtcggcgctgtcgagcgtctccgccgccgcgccgaccagcaacacggtcgggatggacctgccacccgtgtcgctcgccgcgccggagatgcagtactggaatggcccggcggcgatgtcggtgccgtggccggacttgcccactcccaacggcgcgttcccatga

SEQ ID NO: 11704 - DNA, 504 bp, Oryza sativa
  Clone ID: TFbOSC900050j.C1.o4.fg
atgccgcggcacttctgcaagtcgtgccgccgctactggaccaagggcggctccctccgcaacgtccccgtcggcggcggctcccgcaagagctcgacttcctcctcctccgccgccgccgccgccgcctcatcgtcgtcgtcgccttcttcgccagccaagagccccaagcgctccaagaactccaagcgccgccgcgtctctccgccccctcctcagcccgtgcctgcgccgccgccgcccaccaccgccgacgctgccgacgtagccgcaccgacggcaccagaagccacaaccaagaaagccccggaagacctcaccgcggcggcagcgacacagccggcggtggcgctcgggctcggcgtcgccgacggcggcggcggcgggaaggagcacctggacacgagcccgttcgagtggccgtcgggctgcgacctcgggccgtactggccaaccggcgtgttcgccgacaccgatccatcactgttccttaacctgccatga

SEQ ID NO: 11705 - DNA, 1416 bp, Oryza sativa
  Clone ID: TFbOSC401036j.C1.o10.fg
atggcgagcggcggcgcattatccccggtggaggagaagcccacggtggtgaagacgaccaaggcggagcagcacgaggaggaggcggcggtggcggtgaaaagcgcggcggagatgatgaagaagagcagcccgtgctgcccccggtgcaactccatcaagaccaagttctgctactacaacaactacagcatggcgcagccgcgctacttctgccgcgagtgccgccgctactggacccagggcggctccctccgcaacgtccccgtcggcggcggctgccgcaagagcaagcgctcgtcggcctcgtcggcgtcggcgtcggcggcgtctcctcctgctcctgcggtgggcgccgcgccaccggtggtgccggcgctgtcgtcggcgatcagcaagctgctgcagtcggagcccatggcggcgccgtgcgcggacttccccaacgtgctcccgaccttcgtgtccaccgggttcgagctccccgccgccgccggcgaccgcctctcgctggggtcgttcggggcgttcggcaacctgtcggcggcggtggcggctcccggcggtggtggtgggtcgtcgacgaccacgtcgttcatggacatgctgaggggagttggagggcttttcgacggcgtcggcaacagccatcagatgggcggcaatggcggcggcggaggcagctactacgcgcctctcatcaccggcgccggcaatggcatgctgatgccgccgccgccgctgccgccattttctggttctctgatgcagcatgggatgcaggggctgttcgccaatcatgcgatgggaggaggtggtggtggagtgatgaacgccggcgaggacggcagcgtgatggcggggctgggaggaggccagtggccgccggcgcttggtggtgcagacgagcagcagggcggcggcgacggtggcgaagctgtgatgacgaaggacaccggcggcggcgcatcgtcgtcggcgtcgaggccggactacttctacggctggaacagcgccgccggcggcgtcgtcgctggaggcggcatcggcggcaacgccgccgctgccaccggagcaacgccatggcagggcctcatcgacagcagctcggccatgatgcccactaccacgcagaccacactatttgttggttcctatgataagggtgtaaatcatgccctccaagataaccaggaggtgcacatgctgaagattcttggagtgatcacagctcccaaaagccctccaaaggaggccttgaatatagatgtattgccagatcttctgaaattggacaatggcttctctacccacagggtgctgacatccccttacttggcttgcaagctttgggaaaaggagatgaagcaacagaacattggtgttggacaacagataagctcaaaagcctggtag

SEQ ID NO: 11706 - DNA, 789 bp, Oryza sativa
  Clone ID: TFbOSC400765j.C1.o2.fg
atgctgggttcggaccagctcgagcaccgcccggcgccgtcggctccccgcgccgagccggacgatgtcgccgacgacgtggaggtggaggcgttccgggacatccacccggagccgtcgcctccgcatctaccgccgccgccgctcaggcagccgtcgtgggacgccgcgagccaccgctcgctgtcgtcctccggcgcgggcggcggcggcgacgtcgagctgttcgccaccatgagccgcgagttcaccgccatggtggcggccgggtcgtcgtccgcgcccagccccgacgttcccggcgacgcccccgccgccgccgacctgaacctgctgcagctggcgcgcatcggcgagaacgagccggcggccgaggcgaacgcgctcgccatcgtgccggcggcggcgggcagcggcccgccggcgccggtggagcaggtgaagaaggaggaggtggaggcgaaggtggcggcgtggcaggcggaggaggtggccaagatcaacaacaagttcaagcgcgaggaggtcgtcatcaatggctgggagagccagcaagtcgacaaggccaccgcctggctcgccaagatcgagaggaagctggaggaggagcgggcgaaggcgacggagaaggctcgcaacgaggcggcggcggcgcggcggaaggcggaggagcggcgggcgtcggcggaggcgcggcgcgggaggaagacggcagaggtgctcgaccgtgccaacttctgcaaggccgccggcagggtgccatccaagcgctccttcttctccttctaa

SEQ ID NO: 11707 - DNA, 885 bp, Oryza sativa
  Clone ID: TFbOSC407314j.C1.o3.fg
atgttgcatgagcagcacgcgccgccgccgcagccggagccggaggtttcgctacagctgtcggcgcccgccaccgccgccgacgatgtcgctgcaggcgacgacgaggaggtcaccgtcgtcaccacgtaccgcgacatccaccctctgacgccgccgtcgccgacgacgacgacgacgccacccacgcggctcgggtccgccgcgtactcgtgggacacggccagcagccaccggtccgtgtcgtccgaggagcagttcatgacgatgagccgggagttcacggccatggtcgccgccgggacgaccatgcagactggccccaacgacggcaacaacggcggtgaccagctcaccagcatcggcgaggacgagctggaggagaccaacccgctggcaattgtgccggacagccacccgatcgccacgccggccaggagcagggcgtcccagctggaggttgtccccgcggcagggccatcgccggcgccgccggtggaggcgaggcaggtgaagaaggaggaggtggagacgaaggtgtcggcgtggcagacggcggaggtggccaagatcaacaaccggttcaagagggaggaggttgtcatcaacgggtgggagaccgagcaggtcgagaaagcatccgcatggctcaagaagatcgaggtgttcttgatgactgaacaactaacgcagagaaagctggacgagcagcgcgccaaggcgctggagaggacgcagaacgacatcgcgaaggcgcggcgcaaggcggaggagaagagggcgtcggcggaggcgaagagaggcctcaagctcgccaaggtgctcgagctcgccaacttcatgaaggctgttgggagggtgcctaccaagcgatccttcttctag

SEQ ID NO: 11708 - DNA, 885 bp, Oryza sativa
  Clone ID: TFbOSC407323j.C1.o1.fg
atgttgcatgagcagcacgcgccgccgccgcagccggagccggaggtttcgctacagctgtcggcgcccgccaccgccgccgacgatgtcgctgcaggcgacgacgaggaggtcaccgtcgtcaccacgtaccgcgacatccaccctctgacgccgccgtcgccgacgacgacgacgacgccacccacgcggctcgggtccgccgcgtactcgtgggacacggccagcagccaccggtccgtgtcgtccgaggagcagttcatgacgatgagccgggagttcacggccatggtcgccgccgggacgaccatgcagactggccccaacgacggcaacaacgacggtgaccagctcaccagcatcggcgaggacgagctggaggagaccaacccgctggcaattgtgccggacagccacccgatcgccacgccggccaggagcagggcgtcccagctgaaggttgtccccgcggcagggccatcgccggcgccgccggtggaggcgaggcaggtgaagaaggaggaggtggagacgaaggtgtcggcgtggcagacggcggaggtggccaagatcaacaaccggttcaagagggaggaggttgtcatcaacgggtgggagaccgagcaggtcgagaaagcatccgcatggctcaagaagatcgaggtgttcttgatgactgaacaactaacgcagagaaagctggacgagcagcgcgccaaggcgctggagaggacgcagaacgacatcgcgaaggcgcggcgcaaggcggaggagaagagggcgtcggcggaggcgaagagaggcctcaagctcgccaaggtgctcgagctcgccaacttcatgaaggctgttgggagggtgcctaccaagcgatccttcttctag

SEQ ID NO: 11709 - DNA, 1632 bp, Oryza sativa
  Clone ID: TFbOSC401520j.C1.o20.fg
atggcactgccggcggtggggcctcgcggcgcgaccgatccagatccagcgccctcgccgctgcgcgtgcacggcatcggcatcggcagccacgcctcgcgtggcacggcaccgcgaggtgaggaggaagaggaggaggaggagtggagaggcgacggcgacgcgggctcggaggaggaggagggggaagcggtcagtgactccttctcccactcgctgagagagtgccagaagcagcggaagctcagagcggagggggctgcgttgctgctttcaccggccaagcatgagctcaccggcggaggtggtgggagcatagaactgctggtgctctcgccgaggtgcttggttgggggtaatgttggaggaatgagcaagagctccacagcgtcatcacggagcagatcaggcacattcccgagccccggtaccccaaactaccaccggcattgcgctagcaccatgcagtaccctaagggatggagctcagagcgggtgccacttggaggtggtaccaataggaggtatgggggcagtggggttgttcttcctttcaacaatgggaggaagctgccatcaaaatgggaggatgcagagaagtggatcctaagtccagtttcctgtgatgggattggaaggatgtcagccccggcgcctcaccatagacggcccaagtcaaagagtggcccacttggccacccaggcggaataccgggtgcttatgcggctgcttcgccgtttgtgccctgctttgatggtgttctggcagcggctaattttgcagcacattctcctttttctgctggggttctcatgccagagcacgtgcgcaatggtgacttcagcagtggaagaggtagaagtggggatgatggcagtagccgatcttactctgcagagaaggacccatatatcttgagatcagcaagtatacatgcgtggacagagacacttatggaagcatccgcctttgctaatatctcagaagaaactgcacaagatgataaattgcaaggcctgcgaggagaaactcctgccatttccagtccaataataaagaaagatgttgccacacaaatgagtcctgatgacagtatatcgtcttctccaaaagcaagacattcatgttccagtttaccatcaggacatcctattaaagaaccaaatagtaatgcacttaaacctgaagtccgagatgtccaggtagatgatcaagtaactgtgacccggtggtccaagcgacatgtaacacgagggtctgataggcggtcaacaaatattgtcgagtggaggaagaaaacaattgagactcgagctccatcttttgatgaaaaagaaagagaaagctgcgtatcaaagtgcaagagggaggaagcgaagatcactgcttgggaaaatctgcagaaagcaaaagcagaggcagcaattcgaaagttagagatgaagcttgaaaagaagaggtcatcatcgatggatagaatcttgggcaaactacgcactgctcaaaagaaagcgcaagacatgcgtagtgcagtttctgacgttgcagctcatgtcagccaacaaatcagaattaatcaggaagtcagatttttccttgctgtggcagctggaggtgacggggttatttaa

SEQ ID NO: 11710 - DNA, 951 bp, Oryza sativa
  Clone ID: TFbOSC12505j.C1.o18.fg
atgttgagtgaacaaacggcggctagtggtagcagcagcagcagccgcggcgccgacgaccgggagattgtcatcagcaccggccgggagatcgtcgtcagaagcagcgggggtgaggagagggaggaggaggtggtggtggaggaggagctcgaggagccggagttcagggacatccacgcgctgagcccgccgccgacgccgacgccgagccagccgtcgtcgtcgtaccaccggcggaggagggagtcgtgggagtccgcggcggggagcaggcacacgtcgatccgctccgtggggagcgacaccgccccaagtgagctcttccctactatgagcagggagttctcggccatggtcgccgcagcagccaacgccaacgccgccgccgccgcagccgcgaacggcggcgactccagccgcgccggggtggacgacgcgctggggaggatcggggaggatgagctcgaggagacgaacccgctcgccatcgtcccggacagcaaccccatcccgtcccctcgccgcgcccacctcgcgctccccgcccccggcgacgtgtcgtcggcgggcggcggccacggcgacgaggtgtcggtggggcaggtgaagaaggaggaggtggagtccaagatcgccgcgtggcagatcgccgaggtcgccaaggtcaacaaccgcttcaagcgcgaggaggtcgtcatcaatggctgggagggcgaccaggtcgagaaggccaacgcctggctcaagaagtacgagaggaagctggaggagaagagggccaaggcgatggagaaggcgcagaacgaggtggcgaaggcgcggcggaaggcggaggagaagcgggcgtcggcggaggcgaagaggggcaccaaggtggcgcgcgtgctggagctcgccaacttcatgagggccgtggggagggcgccatccaagcgctccttcttctga

SEQ ID NO: 11711 - DNA, 1596 bp, Oryza sativa
  Clone ID: TFbOSC401648j.C1.o50.fg
atggagtatgaaaggattcacaaggttcaggctggtgcactttctccgacaaagctaaggatgaagcttctgggaactcacaatcgtgtgagggtcatcagcaacagctcatcacggacatcaccttcgaagaacactgaaccatcgcaagcacagaacagactattagtttgtgatgttcttgaagaagtttcaggcagctctgatggatccaaatgctcctcagcaatcaacaaaactgaagctttagagaaggatccaccattggacatcaacaaggttgaggacatgaccaaaagttcagttcagcaacctgcatcaagcaactcaagcatgatacatccagttcgaaccatagaagaagagagtaatgactgtgatagtggtattgacaatgctagtaccagtagtttcgagttccatggaggagagaaaacagcagcgcagaatccaacatcaggatatttctcgagacagacttcctccaagtggaatgatgctgagaaatggattgttaataagcaaaatgttcaacaaaatatctctaagggcgcaccacagaaccagagtgcacagcagatgaattcagctgcaggcaggggttttattgtgcccaaaatttcaaaccgaaacataattcctcgccccatgcagaacatgaaaagaccgagtccagcttcttccgcttctcgaagcatattagagaggttatcttttggttcacatcaaccaaagttggttaggcatgcagatgtctgtacagttaataatgctggtgtcacctcagagtatcaaacaaaggcaaccgataacagttcatcaattgaaataaggccctacaaagatcccaaagctattcctgcagttcattcggtgtccgtgagagatgtgggcacagaaatgactcccataccgagtcaggatccttcaaggacaggaactccacttggatcaatgacaccaactcgtagcccaaattgctctataccatcaactcctgtaggaggacggtcaacagcatcaccaggagatgacaacacagatgatggaccatatttcaacagaaaaggtggcacaaatgaaatatcagacgatgaaatgagattgaagacaaggaaagaaattgccgccctgggtatacaactaggaaagatgaacattgctacatgggctagcaaagaggagctagaactagtctctgcatccccaagcattgctgatttggagcggatgaagaaagaatatgcagctcgtgcagcagcatatgaagaagcagaaaattttaagcatacagcaagattcaagaaggaagagttgaagattgaagcatgggagagccttcaaaaagcaaaaatagaatctgaaatgaagagaatagaggaacatgcagagaaattgcgaagcgaagccatggcgaagatggctgaaaagctagaaatgacacggcgtttagctgaagagaaacgagcctcagccaatgcaaggatgaaccaacaagcagcaaaggcggttcacaaggctgagctgattcgccagacaggacgagttccagggtcatgtatcctatgctgcagtggttgcttctgtcaacactag

SEQ ID NO: 11712 - DNA, 612 bp, Oryza sativa
  Clone ID: TFbOSC401780j.C1.o8.fg
atggccggggaggcattgaaggaggcgggggcgacgcccgccgcagcgaacgcgggggaggagaaggccgtcatcccggcggcttcgacatcgccggtgatctccaagaccgatgatgacacggagccgccggccgatgactccaaggctctcgtcgtcttcgtcgagaaggttgctgataaacctcatgctgagaaggcaacagcaacagcaacaccaacaaggacctcaaatgacagagatattgcccttgcaaaggtggagacagacaagcgagaatcgttgatcaaagcatgggaggagaacgaaaaggcaaaagcggagaacagggcctctaagaagttattggatattatttcatgggagaacacaaagaaggcagtaataaaaactcaactgaaaaagaaggaagaagagttggaaaggaagaaggcagagtacgctgagaaggcgaagaacaaggaagcaatcgtccataaggaagctgaagaaaagagagcaatggtgatggcccggcgcggtgaagaagtgatcaaggccgaggagatagcagctaagtaccgtgcaaccggagtgacaccgaagaaacatatcgggtgttttggggcataa

SEQ ID NO: 11713 - DNA, 549 bp, Oryza sativa
  Clone ID: TFbOSC402101j.C1.o10.fg
atggagacccaggaggcgaagagagcagatgtggcggcggcgccggcgacggcgaccggcggtgaggccgtcaaaccggccgccggcgatgctggcgcagtaaccaagacgaatgcagcagatggaccttcagcaccagcaggcaaagctgcaactccaacgggttcggttgacagagacgccatactcgcaaacgtggagctggagaggaaactgtcaatgatcaaggcgtgggaggagagcgagaagagcaaagcggagaacaaggctcagaagaagatgtcatccatactctcatgggagaacacgaggaaggcagctatagaagcaaaactgcgaacacaagaggagaagctggagaggaagaaggcggagtacgcggagaagatgaggaaccaggtagcggcgatccacaaggcggcggaggagaagagggcgacggtggaggcgacgcggcacgaggagataatcaagtatgaggagatggccgccaagcacaggtccaaggggactacacccaccaaattcctctcttgtttcggctcctag

SEQ ID NO: 11714 - DNA, 516 bp, Oryza sativa
  Clone ID: TFbOSC408029j.C1.o2.fg
ggcggtgaccagctcaccagcatcggcgaggacgagctggaggagaccaacccgctggcaattgtgccggacagccacccgatcgccacgccggccaggagcagggcgtcccagctggaggttgtccccgcggcagggccatcgccggcgccgccggtggaggcgaggcaggtgaagaaggaggaggtggagacgaaggtgtcggcgtggcagacggcggaggtggccaagatcaacaaccggttcaagagggaggaggttgtcatcaacgggtgggagaccgagcaggtcgagaaagcatccgcatggctcaagaagatcgagagaaagctggacgagcagcgcgccaaggcgctggagaggacgcagaacgacatcgcgaaggcgcggcgcaaggcggaggagaagagggcgtcggcggaggcgaagagaggcctcaagctcgccaaggtgctcgagctcgccaacttcatgaaggctgttgggagggtgcctaccaagcgatccttcttctag

SEQ ID NO: 11715 - DNA, 1533 bp, Oryza sativa
  Clone ID: TFbOSC401731j.C1.o33.fg
atggagtacgagcgcatcgagaagccgttccccacccagggcggtgggttctcgccgaagcggctgcgcgcgatgttgctgggggtggagaagcggcggaaggggcaggaggaggaggaggagggggacgccggggaggtggacgacgagtacggcgcggtgcccaagtcctctgtcagatccgacgccgactccgatgcgcgcagaggaggtagcatgtgcgaagaatacaaggatgtagatgtggtgagcaccatctcagaatcttcatcctcgttggagacagggagtgggcaccgatcgcgtgacacccactccatgggttcacgagtaagggtgcctgaggaggactcctgtgactctgagagtgtggcttcaaactttgagttccataaggagcgaggggcctctgctcggtctgtgacggcggcaatcgttcctccattctcaaagcctgcaccatcaaagtgggacgatgcccagaaatggatcgccagcccgacaacaaaccgtcctggtagggctggtggagtgccacagaggaagatggaaaaaactagctttggtggcgggaggctgccggctacgaaggttgtgttggaggccacagaggagatagatactaagagggttgatccaagccaagagaaaagggaaattgggtggcaaaaagcggtgaattgggccccacctgatccatatccagaagttgagacttgtgcaaagtctgcacttgctgaagaaattacagtagctgattcagctgttacttttagtcgccatgattcatctgccacgcttcagagcgcgacaacatgcatacctcccccaccaacagtccgatcagtgtcaatgagagacatgggtacagaaatgacccctattgcgagccaggagccatcccgaacaggaacaccggtgagagcaacgagtccagattgttctcgcccaactactccacgaaaaacaataggccccaatgcaatcggtgctgttattggccatggtgaatgtagcaacgtggaattaagtgaacaagaattgcaaatgaagactaggagggagataatgctcctcggcactcagcttggtaaaaccaacattgctgcatgggcaagcaacaaggaagaggaaaaagatgcatcactttcgcttaaaggagtgcccatggaccaatctacacagaaggtaacagaaattcgtgcagcagcgtgggaggaggcagagaaggctaaatatttagcaagatttaaacgagaagagattaagatccaagcatgggaagatcatcagagagcaaaaatcgaagctgaaatgagaaaaattgaggtcgacgtggaaaggatgcgagcccgtgcgcaggacaagctgatgagccagctcgcatcggcgagacacactgccgacgagaagcgggccgcggcggagctgaaacggagccgtgcggctgcaaagacggcggagcaggcagaccacatcaggagaaccggcaggatgccgtcctccattggctgctggaactggtgctcgtag

SEQ ID NO: 11716 - DNA, 1281 bp, Oryza sativa
  Clone ID: TFbOSC101572j.C1.o8.fg
atgcttctcggactagagaaaaatcagcacaacggggaggacacatcgcctgaggccaacgattccggcgagctggacgaccagagtaagtccactaccccagaaatggtgttgcacagctcaatcattctcatttacggattcaccaaatcgctaattgcgtcaacagggagcatggagtgctccacctccaccgaaatgtcgagcaacagtggccacagatcaagaaaccgagctcaggacgacgacagcttcgactccgagagcagctcgtcgggcccgccgacggtgaagaggccggcggcggtgaccgccttgctgccaccgttctctaggccgacgccgtcgaagtgggatgatgcagagaagtggatttctagccccacggcgaaccgcggtggccgtgtggggagtgcagctggggctgcgccgaagaaatcggcgctggcatttcctgaacatgtaagccggcctccagccgttgctaaggtggttgctgaggtccccatcaacactggaaccttggtgaagaattcagttgctctcgcacagcctatttcatttaatcctgcacaaagtgcttcgatagttgatgaaccagctcctgcagttaggtctgtttcgatgagagacatgggcacagaaatgactcctattgccagccaggagccctctcggactgggactcctattatagcttctagtccaacctcctctcggacaccaacaccacaacgtaatgcagaaatcagtattggtgaatttggtccaaataagatggaaatgtctgaggaggaactacaaatgaatacaagaaaggaaatcatggatcttggccaacggctgggaaagacaactatagctgcatgggctagcaaggaagagaaatctacaacaagtttcgcaaatgtcataaccgacaaggctgtagaaatcgacagagaggctcgtgctgcagattgggaggaggcagagaaagcaaaatatcttgcaaggtttcagagggaagaggtaaagattcaagcttgggaaaaccaccagaaagcaaaaattgaagctgaaatgaagaggatggaggcaaagatagagatcaagagagctcgcgagcaggacaggctttcgagcaagttggcagctgcaaggcacaaggcagaggcgaggagggaggccgctgagtccaggaagaaccaagaagcagcaagaactgaagagcaggcggctcagatccggaaaaccgggcacataccttcctcaatctcctgctggtgctggtgcctgtga

SEQ ID NO: 11717 - DNA, 516 bp, Oryza sativa
  Clone ID: TFbOSC400879j.C1.o25.fg
atggcggaggtggcgccgccggcgccggcgccggagccgaccaaggacatcgccgaggagagggccgccgtgccggcgccggaggagtcgaaggccatgaccgtcgtcgatgatgctgagaaagctgcagcaacaggtggctcacacgaaagagacgctctcctgacgacggtcgccacggagaagaggatatcgctgatcaaggcgtgggaggagaacgaaaaggccaaggccgacaacaaggcggccaagaagttggccgacatcgcctcatgggagaactccaaggtggccgagatcgaggccgagattaagaagtaccaagagtacctggagaggaagaaggcggagcaggtggagaagttgatgaacggcgtggcgaaggtgcacagggcggcggaggagaagcgagcggcgacggaggcgcggcgaggggaggaggtggtgaaggccgaggaggccgcagcaaagtaccgcgccaagggagagccgcccaagaagttgctcttcggttga

SEQ ID NO: 11718 - DNA, 1482 bp, Oryza sativa
  Clone ID: TFbOSC402100j.C1.o4.fg
atggagcccaagtcttcttcttcctcacactatctgcagccatctgcaacattgccatcaacaagaagaaactcattccaaggagtgggagctgaagctggaggaggaggaggaggcatgaacccattcgggcccacattcagtgacccactctgcagcctcaacctcaaggagacctcagagttcgtgaggtcatccttccccatggctaccatggcgaggagcaacagcagcaacggcgccaccggcaatggcggccatggctaccaccgcgagacctccacggcctcttcatcctcttcctcctcggcctcagctcagaggaggcgagccgagcagcagcagcagcaggtgccagctactccagggcggccattgctgttcttcaattcctcgagccctgcacatcaccagctcgtctccgcgaggaggtcggtgccttccaagtgggaggatgcggagaagtgggtgaggcaggcgtcgtccgaccaccatggcggccatcaccaccaccatggcaagggctccaagcttcaggaggagaagagggcgtcggcggtgaggaggtcggtggatgctgacgtcactgctcttgctctctacactgctcctgctgcagaagtgttcctcaaagacaagttcactgacaatgtggagccctccaaggagagcttcgtgttccggagctcctactgcgagccaacaaagaacacggcggcgcaggcggtggccgccggcaacggcatcgaccaccggcgtgacatcggcacggagatgactccgctgggcagctccaccacctcgaggtgccacacgccgatcaagagcacctcgccggcgaggcacaacacgccggcgagccggtcgggccccctggtgccgtacgccggcggtggcggcggcgccggccaggacatctcggacctcgccgactgccacttcgccaagctggacctcggcgcgcagttcgacgccatgctcatcaactggagctccaaggaggaggaggaggaggaggtgtccaagagcttgaggcacttcgaggccagcgtcgccgccgtcggcgagaagcgcggcggcgccggcgactgccggtgggaggacgatgacagggccaagagctgcataaggtatcagagggaagaggcaaagattcaagcttggatcaacctggagagtgccaaggctgaagcacagtccagaaagctagaggtgaagattcagaagatgagatcaaacctggaggagaagctgatgaggaggatgacgaccgtgcaccggcgcgccgaggagtggagagcgacggcgcaggcgcagcacctccagcagctgaagcgcgccgccgagcaagtccggcgggccaaggccaccagccaccatcaccaccaccaccacctcgccggcagcaacgcctcctgcggctgcttcccctgcaatggcagcaacaacatcatcagtggcaacctcctgaactactattag

SEQ ID NO: 11719 - DNA, 621 bp, Oryza sativa
  Clone ID: TFbOSC400524j.C1.o27.fg
atggctgaggaggaggccaagaaggtggaggtggaggtcaccgaggcgccacccgccgctgccgctgccgcggagacggagccggctgccaaggacgtcgccgaggagaaggccgtcatccccgcccccgcgccgccggccgaggaggagaagcctcccgtcgacgactccaaggcgctggccatcgtcgagaaggttgcagatgaacctcctgccgagaaacctgctcaagggggctctaatgacagagatgttgctcttgcaagggtggaaactgagaagaggaactcattgatcaaagcatgggaggaaaatgagaagacaaaagctgagaacaaggcttcgaagaagctatctgctattctttcctgggagaacacaaagaaagcaaacatagaagctcaactgaagaagattgaggagcaactggaaaagaagaaggctgaatatgcagagaagatgaagaacaaagtcgcgatcgtccacaaggaagctgaggagaagagagcaatggtcgaggcaaagcgcggcgaggaagtcctaaaggccgaggagatggcagccaagtaccgtgccaccggccatgctcccaagaaactcatcgggtgctttggggcctaa

SEQ ID NO: 11720 - DNA, 1284 bp, Oryza sativa
  Clone ID: TFbOSC417639j.C1.o12.fg
atggagtacgagaggatacacaaagttcagatgggagtgatgtctccaaccaagctgaggatgaagctgctgggatcccatggcggcagcatcggcagggttgacgaggcaaagaagtcgccgcgagcgtcgccggcgaggctcgacgccgacgaggacgacgacgaccaccccaagaacagcctcctgccccaagaactcgacgaagattatcccaaggaccagtcggattcttctcgctcgcgctccgacgcgagccatgggagagctggcaatggctacgacagcggcggcttcgagttctacagggaggagaggccgccgccaccgccgccggcggcggtggcggtggtcggcgggacgttcttcaggcaggtgccgtcaaagtggaacgacgccgagaagtggctcgccgggagacacgtcgtgcactccaacccaatcttctccaagaaggccgccgccgcagcagcggccgtgtccggccgcgttgcgccggaggcctcggcgtcgtcgtcgccgccgtcggtggcgagcaggcagcgccagcagaagaggctccgcgtgtcgtcggaggcggcggcggtgtcgatgcgggacgtggggacggagatgacgccgatggcgagcaaggagcagtcgcggagcggcacgcccgccggcgccgccacgccgtcgctgagtccgctctgctcggtgccgacgagcccgaggggcgccgcgtccgcgtcgtcggcgtcgtcggagcgggagctccagatcaggacgcgccgcgagatcgccgcgctcgggctgcagctgggcaagatgaacatcgcgtcgtgggccagcaaggacgacgacgacgagctcccccgcgcctcgccggagaagagaccgagaccgagaccgagacctcactccggcgacggcggcggcgaggccaagaaaagggagttcgaggcgcgcgccatggcgtggcaggagacgcacaagtgcaagctcgcgttgaggtttcagaggaaggaggtgaagattcaggaatgggagagctgccagaaggccaaattcgaagccaagatgaggcacgcagaggtgcaggcagagcagatgaaggcgagggcgaagcagaagctgagcaggaggctgtcggcgttgagccacaaggcggaggggaagcaggcgagggtggaggctcgccggagccggcaggcggcgcggctggcccgccaggtgcaccgcatccgggagaccggcgccgcgccgtcgcgcctccgccgctgctgcagctggctgttcctctga

SEQ ID NO: 11721 - DNA, 738 bp, Oryza sativa
  Clone ID: TFbOSC900142j.C1.o22.fg
atgtggtctgaagcacatggtatcagcactagtcctttgatgaaaaaggtgaaggttattgattgcttatcttgctgtgagcacttcttcaatgggtattatgaaggacggatgtatcaaaatctatggcctgaaatgcttaaattgaatgactggcctatttcaaaccattttgaagagcttttgccttctcatggagttaaatacatcaattctttgccttttcaagcatacacaaacttgaagtctggtttgctgaatgtctcaacattgcttcctgatgacatcttaaagcttgacatgggaccaaaatcatatatagcttatggctatgcacaggagcttggtagaggagattctgttacaaaacttcactgcgatttgtctgatgcagatgcaaatgacttggcctgtcctataaaaagtgagtccgccgaggaaggtgctttatgggatatttttaggagggaagatgttccaaaactgaaattgtaccttgacaagcattctaagaaatttcgccatatatactgttctgcagttcaaaaggtatgtaaccctgtacatgatgaaacattttgtctaacaaaagaacaaaagagaaagctcaaagaggagcatggttatttcactactagaaaaagcattttcgccggcgggggaaactcgtcttcgcaggcggacggccggtccacctgcagcccaaagttcactggcgggctggaggtccgcatttga

SEQ ID NO: 11722 - DNA, 2628 bp, Oryza sativa
  Clone ID: TFbOSC400337j.C1.o7.fg
atgggattaagcgattatgatctaatgggggtggcggtaccagggacgggtgttggtggaccccatcctgaagcccttaaagaaaggatgctttgtaacctctgggaggtgtatactttagctcagagaaatcgaaaatttaatgaacttctgaatgatgaagcgataatgatgaagccttcaaaagaatcgaagaaaagaggtgcaggaaagaaacaagaggaagaagagaataataccatatccattgaggatgaaatgtgtgatgcgaacaataagaaggggaagaagatgctcactggggaaaatgctttgatgtgccaccagtgtcaaagaaatgacaaagggagggtgatttggtgtaaatcatgcaacaataagcgcttctgtgagccatgcatgaaacgatggtacccaggtttgtcagaagttgattttgctgcaaaatgcccatattgtagaaagaactgtaattgcaaggcatgcctaagaatgataggagttgaaaagccccctgaaaagaagatttctgaggaaaatcaacgacgttatgcttttcgtattgtagacttgttgcttccttggttgaaagaacttcaacaggagcagatgaaggagaaggaattagagggtagattacaaggtattggaggattttctaactgcctatttacatttttatttgcaggtgtttctatggatgaagtaaagttggaacaagctgattgtgatatggatgagcgtgtttattgtgataggtgcaaaacttcgatagttgattttcatagaagctgcaaggcttgttcgtatgacttgtgccttgcatgctgctgggagcttcgcaaaggtgagattccaggaggagaagaggcaaagagtgtgcagtgggaagagagaggtcagaagtatgtttttggtaatatttccaaggatgagaagaaaagggtatcttcgaagaggcacatggagacccccagtactgaaacttgcaatgacatggctgttgctggggacccaaataaccctttgttactgtggaaagctaatagtgatggcagtataccttgtccaccaaaggaaatagggggctgcggtgcttcatctttggtactcagatgcttattaccagaaattatgctttctgagttagaacacagggctaacaaagttattaagagagaagcatttgataaagcaataaacgaaacaagtgatcagtgcccttgcttttatcacacaagcaagataagaacaaatgctactcgagaggcagcaaacagaaagggctcaagtgataactacttgtactgtccagatgccaataatatccaggaggatgacctgtcgcactttcagatgcattggtcaaaaggtgaaccggttattgtttctgatgctcttcggttaacatctggtctgagctgggagccattggttatgtggcgggcattgcgagagaagaaaaccaatggtgatgttgaagatgagcactttgctgttaaggcagtggattgccttgattggaatgaggtggaaattaacatacacatgttctttatggggtatatgagaggtagaagacatccgatgaccttttggcctgagatgcttaagctaaaagattggccaccatctagtatgtttgaccagaggttacctcgccatggtgctgagtttataactgcattgccatttcccgagtatactgatccacgatatggcccgctaaatcttgctgtcaggcttcctgctggtgtactgaagcctgatcttgggccaaaaacttatattgcttatggatgttatgaagagttaggcaggggtgactctgtgaccaagcttcattgcgacatgtctgatgcggtaaatatcttgatgcacacagctgaagtgtcctatgacactgaacagcttgacaagatagcaaaaattaaaatgaaaatgagagaacaagatcttcatgaactgtttggggtttcagaatcaggcgccaagggtaaagctgatgatgaagcatcgaaaatctcatgtaacatggaaaacaaacacacctctaaccaaagtactaagggtttggacattaatgctttaccacctgatgattctggaagtgatattggggataaaccatcattttgtcaatctgaggtttctcacccaattcatgaccagactttctatttaactgtggagcataagagaaagctcaaggaagaacacggtgttgaaccatggacattcgagcagaagctaggcgatgcagttttcattcctgctggatgtccacaccaatcttgcatcaaggttgctctagactttgtttcccctgaaaatgttggtgagtgtgttaagctgaccggagagtttagacgtcttccatctgatcacagggctaaagaagataaactagagattaagaagattgctctcaatgctcttaaagaagtcgtaaatttcttagatcctttaccaaaagggtcaaagaacagggatgaagtggtagaagtgaccaaaccaaaaaggaaatacggtaaccgaagaggtgacctgaagagtggggaagaccaacccattgatgaatccatagaagaaaggaagcctaaaaagcgagggagatctaaacggtga

SEQ ID NO: 11723 - DNA, 2994 bp, Oryza sativa
  Clone ID: TFbOSC400891j.C1.o23.fg
atgccgcccaagaggaagcgcggtggcgggaggccgcgcaaggccccggaggacgccgccgccaaggaaaacggtgagaagacaaacaaggaggaggaaacgcaggcttctcctgaggagaatggcgcagggcagactcaggcctcgagaaccgcaagaaagcgcaggaagggtcctgttgctgatccctcttcgactgaacttccacccaggaagctcagggacaggcggaacgttccagcggtagactacaaggagaataagcacacaaaaaagatggatggaacttcaaccatgtgccatcagtgccaaaggaaggacagtggaagagttgtgaggtgccggaatggtgctgaaaaaaacaggaggcacagatattgtgtcaagtgcatcaaacgctggtacccgcatctaacagaggacgattttgagaactgctgtccagtttgtcacaataactgcaattgtaagacttgtctgcggacaaatgtaataaataagggtgacaaggagtttgccgatggtaagaacaaaattaaatactctctgcgtattgcacgctttttgctcccttggttgaaacaacttcaccaagagcagatgctagagaaaagtgttgaggccacaattaaagggatcgatgtaactgacttggaggttcctcaagctcagtttaataatgatgagcggatttactgtgataactgcagaacatccattgttgacttccacagaagttgtaaaagtggtcactatgatctctgcctcagctgctgccaggagttgcgtcaaggtcttactactggtactgttgtcacttgtgacacagctgttgatgtacctgaaatagaaggcaaggaaggtttgcaagagggaagtagtcatagcagtgctgtaggtcaaggggcttctgatcaacagaatgacaggttgataggtagtgcagctccttcagaggattgcactcctagtttgatatggagggcaaaaagcaacggaagcataccatgcccacctaatgcaggtggttgcggggattgtcttctcgaacttaggtgtttgtttaaggagaactttatttctgatttactggataaagtcaattcagtggtcaataaggaaacagagcaggagttgggaggctctagatgttcctgcttcactgaatccggtgaagtgaacaatgaaacatcacggaaatcagcttgcagagaggactccaatgataactacatatattgtccaactgctagagaagttcaaagtggagctttagatcattttcagcagcattggttgaatggtcagccagtcattgttcgtgacgtgcttgagctaacttctggactgagctgggagccaatggttatgtggcgggccttacgggaaaagagagacaagaaagagcatgaacggctctcagttatagctcttgattgtctgacatggtttgagtttatgtaccaccaggatgtgttggtggtgccagtttcatatctggggttcaacagcaccattgaaactactttatatttcaaactggttgatataaatattcacatgttttttgaggggtattcccgtggagctgttggttcggaggatttgcctgtgctacttaagcttaaagattggccacaacatagttcctttgaggagcgcctgccgcggcatggtgctgagttcatgtctgcactaccatttcgtgagtatacagatccaaaatctggtccccttaatctggcagtgaagcttccaaaacatgttaaaaagccagatcttggtccaaagacatacattgcttatggtgtcgcccaagagttgggaataggtgattctgttacgaagatccattgcgacatgtctgatgcggttaatattctcatgcatactgatgaggtagaactcaaagctgaaaggattacagcaatagagaaaaagaaagagagcttacgtaaagatggcaagaatcttcatgttctgcgaccagaccatgacgatgatacatcaatagctctcagtgaatcaactgaagtgccaagatctcgaggacttgaaaatggctcaagcattaagcagccagcaccaaatgttgctgtaatggaccagggaggtgttcatacagatatggtagctgatgaagctgagggaaacttgagtctgtctaatgggcaatcacccaatcaaagtgatgcacataatatggatattactttctccaagggggaaacagaccattctatctgcacaattaatgggggagaggagatgggcaatggctttgggagggaagataaatgtaaatcttctcatggtgtaggatcatctgaatcttctgattgtcaaagacgcagtaggcgacgtgatgcttgctcttccagtgcaacaggggaaataaacgaaaccagcatggagactaacaaatttaccatatctattgagcccaaagatgatcacccatttgttgagggaaatcagacagagggtggtgcattgtgggatatcttccgacgtgaagatgtcagcaaattgcatgattatctgatgaagcatgcagaagagtttagacattataattatgaaacagtcaaacaggtttctcatcctattcacgatcaatgcttttatctaacaaatgagcacaagagaaagctcaaggaagaacatggaattgagccttggacatttgaacagaaacttggtgaggctgtgtttatcccagcaggatgtccccaccaagtcagaaatttgaagtcatgtataaaggttgcacttgactttgtttctccggaaaatgtgcaagagtgcatcaggctgacagaagaatttcgcttgcttccgaagggtcatagggtgaatgaagataaactagaggttaagaagatagctctatatgcacttgatcaagccattgacgatatcacaggcaaaagttgcaatgaaaggacaaaggatgaaggggaagaggaggcgtctgccccaagtgttagttaa

SEQ ID NO: 11724 - DNA, 1788 bp, Oryza sativa
  Clone ID: TFbOSC420889j.C1.o1.fg
atggggagcgcgcccctgctcggcaccaccgtcgacgaggaggatttctcgccgccgagcaccagcggccgcggccgcggcggcaggaagcagggacgcgggaggggtgggaattcgtgccaccaatgcaagagggtgaagccgcggccggaggagatggtcaggtgccagctctgcggcgacaaggtcttctgcgccgcatgcatcaagaacaagtacccggagatgcagcaggccgaggttagagataagtgccctttctgtcgaaatatctgcaactgcactcgctgcaatcccagtgacaagtcggatggacccaggaacccatttgtcaggagatgtaacagcagtagttcagtaaaacggagagtgaagactgctgcctcaggtttaagatgcagggttgatactgcggcactacaggcaaaagcaattgataaattagaagctaacagtaggataaacaatgaatctgccatgttagataaggcagatacactagatgtcaggactgatgaggttgacactgaaactaaaagcaaatatgccaactacatgctacactacttggcgccacatttgacaaagctgaacaaggaccagatgagtgagatagaaaaggaggctaaaattcaaagattggaattgtctcagttgagtgtggagcaggctgcctgccggcatgatgagagagtattctgtgaccattgcaaaacttcaatctttgatctgcatagaagctgtccaggctgctcctatgaattatgcatcgtctgttgtaaggagctccgcgaagccaaacttatgggctcttgtaaggaagaactgttctcttatcctaatagaggacctgactacatgcatggtggtgatggtgattcagtaccagagttgataaactacaaacaaggagacctgtctagcaaccaatctaaggacatacagtggcgtgttgattctgacaagatttattgtcctccaactgaacttggtgggtgtggtaatcatattcttcagttgagacgaatattttcaaaagactggttgagtaaactcgaagtggatgctttccaaatgcgtaaacaattagaaccatctgatattatcggtagagacacttgtgagtgctcatgttctactgatcatgcaagttcaaggaaagctgccagcagagaggattcgactgataactacatatactgccctacattggataatggaaagccagaagatctcacacacttccagaagcattgggtgaaaggcgaacccgtaattgttcaacaggttctcaagaaaatgtcatgtttgagttgggagccaccagatatgtggtctaaagtacatggcaccggcactagtcctgagatgaaaaacgtgaaggctattgattgtttatcttgctgtgaggtcgagatatgcactcaagacttcttcaatgggtattatgaaggtcggatgtatcaaaatctatggcctgaaatgcttaaattgaaggactggcctacatcaaatcattttgaagagcttttgccttcccatggagttaaatacatgaattctttaccttttcaaccatacacaaacttgaagtctggtttgctgaatgtctcaaccttgcttcctgatgacatcttaaagcttgacatgggcccaaaatcatatatagcttatggctatgcacaggaacttggtagaggagattctgttacaaagcttcactgcgatttgtctgatgcattcatgaagagtccttgggcaagttcattttcttctttgaagacttaa

SEQ ID NO: 11725 - DNA, 2754 bp, Oryza sativa
  Clone ID: TFbOSC401978j.C1.o35.fg
atggcggcggaggaggtggaggcggcggcgatcgacggatccggcgaggaggcgaagcggaagagtggtaagcagaggggatcgggcgccaaggggaggcgccggaacggcgaccgggctttccgcccgccggcgatgaggccggaggaagaagggcgcggtgttgcgacgaggcccggggcgctcagggaaaggaagccgccgcccaacgccttcaacgcgccagacgatgatgaggatgtcgagaaaactgatcaacttctcgagcctctcaacaagcccaaaagacgtgatgcagggaagaagagaggacccagaaaaaagaaagtggatcaagagaacatcaaaacccacaggcataacgcaaatgcagtaaaaggcaagatgttagtcaatgataaggtttcgaagactgaaaagaagcaaagggaagaaaatgttgacaggtatcctgatttgcctgaaaatgaatttgctgcaaaatgcccttattgtcgcaagaattgtaattgcaaggcatgcctgcgaatgagaggtgtcgaagagcctccaagaaaggaaatttctaaagaaaatcagattcgttatgcctgtcatgtgttacgcttgttgcgtccttggctgatagaactgcgacaggagcagatggcagagaaggaattagaggctaagatacaaggtgtttcagttgatcaaataaaggtggaacaagctgagcttcgcaaaggtgagatccctggaggagaagaggtggaaattttggatcctgaagaaagagacaaggattatgcttttggtaagattctgtcagatggtgagaaccaaagggactctttgaagtgtcgcagcgacacccaaaacagtgagtcaaacaaaggcatggcttctgacgaaaaccaaaagaaggctctgttactttggaaagcaaacagtaatggtagcataccttgcccacgaaaggaaaaggaagactgcagtttttcatctctagatctgaaatgcttgtttccagagaagttgctccctgaattagaagatagatctgagaaggtcttctggagtgaaacatttgcaaaagaactaggtagaacaagtgagctgtgcccttgttttgatcactcaggcaagataagaagtgacagcaagaaattacgtcaggctgcaaatagggaggactcgagtgataactacttatactgtccggtggccactgatatccaggacgctgacctgttgcactttcagatgcattgggcaaagggcgaaccagttgttgtttcagacactcttaagctaacttctggtcttagctgggagccgatggttatgtggcgggcagtacgagaacgaaccaaagggaaggcagaagatgagcagtttgctgtgagggcagtagattgcctcgactggtgtgaggtggaaattaacatacacatgttttttatgggatatacaaggggcagaactcatcccaggacctactggcctgagatgcttaagctaaaggactggcccccttctagctcatttgatcagcgattgcctcgccatggtgctgaatttatcagtgcattgccatttccggagtatactgatccacgatatggtccgctaaatcttgcagtgaagcttcctggtggtgtcctgaagccagatcttgggccaaaaacttacattgcctatggattttctgaagagttgggcaggggtgactctgtaaccaaacttcactgtgacatgtctgatgcagtaaacatcttaacacacacagcggaagtgccctgtgagacttatgatgctgttcagattaaaaacacgcagaaaaagatgaaaatgcaagatgacatggaaatatatgggatgatagaatcaggcagtgaactcaagccatcagcatgcccagttgaattggggaacaaagctgttggtgaagcaccaaaggcctcatgcagcaaagaaaatgttcataccttgaaagacaagtctaatggttggtggagaaaatatacttttggtttggatataaacgcttcaccacctgatgatgctggaggtgatgccagggatgaagcattgtcctatgaatctgtggtacatagtgatgtagctcagtgtccaaaccataaccatgagaccaataattctgatgatgcacgtattggagctcagagatgtcaaaagaaagctaaaggtcgtcctccgaagacaggttcaggggtatcagagcaccaggaaagtggtggtgctttgtgggatattttccgaagagaggactctgagaaattacaagacttccttaggaagcatgcgccagaatttcggcacatccactgcaatccagtgaaacaggttattcatccaattcatgatcaagctttctatttaactgcggagcataaaagaaagctgaaggaagaatatggtgttgaaccttggacctttgaacaaaagcttggcgaagcagttttgattcctgccggatgtcctcaccaagtcaggaatttgaagtcctgcatcaaggttgcactggactttgtttcccccgagaatgttggtgagtgtgttaggctgaccaaggaatttagacgacttccatcttcccacagggctaaagaagataagctagagatcaagaagatggctttccatgctctgaatgaagttctaaactttctggatcctccttcctcagaagggtcgaaagaagcggcggagaagcctcgaagggggcgtggtcgcccaagaaaacactag

SEQ ID NO: 11726 - DNA, 2742 bp, Oryza sativa
  unsure (1)..(2742): unsure at all n locations
  Clone ID: TFbOSC420010j.C1.o2.fg
atggaggcggcggcggcggcggccgccgtgccgcgaggagctgcggtgcaagcgctccgacggcaagcagtggcgatgcagcgcgccctcatgcccgacaagaccgtctgcgagaagcactacgtccaggccaagaagcgcgccgcctcctccgcgctccgggcctccctccgcaggtcctcagcctccgcctccgccgcgcggggcacgaccccgcctgcgcggatggcggtcggcaggcccatctccggcagggtcgcgggggagccggtgcacgtcgcggagctggtgntcncgccgctgcggccgccgccacggaggaggcagccggtccacgggctgcccatgggcaatgctgccggcgcgcgcaccgcggcggagctggtcgggaggggctcggcggggctggttgcctgcagctcggcggcgggggcggcagcggccgcaacctgccatcagtgccggagggtcgctaataccatttgttgtacaagctgcgacagaagggggtactgcaccaactgcatctcgagatggtactctgatatcccaattgatgatgttcgaaaggcaagggttcaggagatatctgctgtagataagttggaatatcttcatagcattctggcatctgtccttccagtattaaagcagatttattctgatcaatgtttcgaaattggtgttgatacaaaagcttatggacttaggacagatataatcagggcgaaggtcaatcctgatgagcaaatgtgctgtgatacctcaaattatcctcgcagtgacttctgcaaagtgccagtatttgattatcaccgacactgcccaaggtgtttgtatgacttatgtcttgactgttgtcgagacataaggcgatctaggaccagtgttgcaagaggagaatatgctgaaggtcgtgtggtagatagaagtaaagatacttcgaataaaagagcaagaatggaaccatctgcagaaagtgcaaatgataagtcagtcccacaacgaagggacataaaaaatattgacattagatctttattccctacatggagagtcaataatgatggaagcattacttgtgggcctcatgaggctggtggttgtggctcctcgaagttagtgttaaggcgaatattcaaaataaactggattagtaagcttgtaaaaaattctgaggaaatggtcaatggttgtaaagtacatgttcttgagaatggatgctcatcctgcaatgatggcagaacattagagttaactggtcatcgtaactttggtgtctcaacatgttcaaataatggtggtattgatcggttctgtgtgttctctcctgtattagaggacttgaaatctgaaggtattattcattttcgtaaacactggataaaaggagaacctgtagttatcaggaatgcgtttgagccttctctgtcatcaagctgggacccactaaatatttggcgaggaatccaggaaatcatggatgaagaagtggatgacgatgtcattgtcaaagctgtggattgctcaaaccaagcagaggtggatattgagctgaaacagtttatcaaaggttattcagatggtcacaagggggaagatggggaattgatgatgctgaaattgaaagagtggcccccacccagtgtattggaggagtttctgctatgccaaagaccagaatttattgtcaattttccattagttgattttatacattccaggtgggggctcctaaatctttctgctaaattgcccccagacaccctacaacctgaagttggcttgaagctgttaattgcatatggaagacatcaagaagctggtaaagatcctgttcgaagattcgtgctgtcaagcaccagagtaaaggtgcatatgctaatgcatacagccaaagggcatgacgtatgtccaaagaggctacaacctgagcgatctgaaaagattgccaatggaatgacaatgcatgtaaatgctcatgcacctgttcaaaatttgaatgtggatatgggggaacaatcacctgaccatgtaagctcaaagtttgatgaaagagcgcatgcgtctgccttgcgattacaagagaagtcttcagatgccaaacttaattgtggtttcgaaggctcttcaactgagttatcttgctcgtcacattcagaggaaccaaaagttaatggttcagaaagaagtcaggctggttctgtttgggatgtgttccgcaggcaggatatttcaaagctgaatgaatatttaactgctaactgggaagaactggcagctagtagtcaggttaagaatcctatttatgaacaatctatatatctcaacaagtatcataaaaggatactgaaggatcaatatggaattgaaccctggacattccaacaacatatcggtgaggctgtatttgttcctgctggctgcccattccaagtgaaaaatctccagtctacggttcaattggctcttgatttcctgtcaccggaaagtttgggggagtcggcccgaatggcccaggagattcgctgcctaccaaatgatcatgatgcaaaactgaagatgctcgagattggaaaaatctctttatatgcagctagttctgctgtcagagaaattcagagaataaccctcgatcccaagtttaatctagaccttaaattcgaggatcagaatctaactcaggcggtttctgagaacttggctagagtcaccaaacaacggaatgtaccatgcagctga

SEQ ID NO: 11727 - DNA, 2742 bp, Oryza sativa
  Clone ID: TFbOSC401726j.C1.o12.fg
atggaggcggcggcggcggcggccgccgtgccggaggagctgcggtgcaagcgctccgacggcaagcagtggcgatgcagcgcgccctccatgcccgacaagaccgtctgcgagaagcactacgtccaggccaagaagcgcgccgcctcctccgcgctccgggcctccctccgcaggtcctccgcctccgcctccgccgcgcggggcacgaccccgcctgcgcggatggcggtcgcgaggcccatctacggcagggtcgcgggggagccggtgtacgtggcggagccggcgctgccgccgccgccgccgccgccacggaggaggcagccggtccacgggctgcccatgggcaatgctgccggcgcgcgcaccgcggcggagctggtcgggaggggctcggcggggctggttgcctgcagctcggcggcgggggcggcagcggccgcaacctgccatcagtgccggagggtcgctaataccatttgttgtacaagctgcgacagaagggggtactgcaccaactgcatctcgagatggtactctgatatcccaattgatgatgttcgaaaggcaagggttcaggagatatctgctgtagataagttggaatatcttcatagcattctggcatctgtccttccagtattaaagcagatttattctgatcaatgtttcgaaattggtgttgatacaaaagcttatggacttaggacagatataatcagggcgaaggtcaatcctgatgagcaaatgtgctgtgatacctcaaattatcctcgcagtgacttctgcaaagtgccagtatttgattatcaccgacactgcccaaggtgtttgtatgacttatgtcttgactgttgtcgagacataaggcgatctaggaccagtgttgcaagaggagaatatgctgaaggtcgtgtggtagatagaagtaaagatacttcgaataaaagagcaagaatggaaccatctgcagaaagtgcaaatgataagtcagtcccacaacgaagggacataaaaaatattgacattagatctttattccctacatggagagtcaataatgatggaagcattacttgtgggcctcatgaggctggtggttgtggctcctcgaagttagtgttaaggcgaatattcaaaataaactggattagtaagcttgtaaaaaattctgaggaaatggtcaatggttgtaaagtacatgttcttgagaatggatgctcatcctgcaatgatggcagaacattagagttaactggtcatcgtaactttggtgtctcaacatgttcaaataatggtggtattgatcggttctgtgtgttctctcctgtattagaggacttgaaatctgaaggtattattcattttcgtaaacactggataaaaggagaacctgtagttatcaggaatgcgtttgagccttctctgtcatcaagctgggacccactaaatatttggcgaggaatccaggaaatcatggatgaagaagtggatgacgatgtcattgtcaaagctgtggattgctcaaaccaagcagaggtggatattgagctgaaacagtttatcaaaggttattcagatggtcacaagggggaagatggggaattgatgatgctgaaattgaaagagtggcccccacccagtgtattggaggagtttctgctatgccaaagaccagaatttattgtcaattttccattagttgattttatacattccaggtgggggctcctaaatctttctgctaaattgcccccagacaccctacaacctgaagttggcttgaagctgttaattgcatatggaagacatcaagaagctggtaaaggtgattcagtgacaaatctaatgattaacatggctgatgtggtgcatatgctaatgcatacagccaaagggcatgacgtatgtccaaagaggctacaacctgagcgatctgaaaagattgccaatggaatgacaatgcatgtaaatgctcatgcacctgttcaaaatttgaatgtggatatgggggaacaatcacctgaccatgtaagctcaaagtttgatgaaagagcgcatgcgtctgccttgcgattacaagagaagtcttcagatgccaaacttaattgtggtttcgaaggctcttcaactgagttatcttgctcgtcacattcagaggaaccaaaagttaatggttcagaaagaagtcaggctggttctgtttgggatgtgttccgcaggcaggatatttcaaagctgaatgaatatttaactgctaactgggaagaactggcagctagtagtcaggttaagaatcctatttatgaacaatctatatatctcaacaagtatcataaaaggatactgaaggatcaatatggaattgaaccctggacattccaacaacatatcggtgaggctgtatttgttcctgctggctgcccattccaagtgaaaaatctccagtctacggttcaattggctcttgatttcctgtcaccggaaagtttgggggagtcggcccgaatggcccaggagattcgctgcctaccaaatgatcatgatgcaaaactgaagatgctcgagattggaaaaatctctttatatgcagctagttctgctgtcagagaaattcagagaataaccctcgatcccaagtttaatctagaccttaaattcgaggatcagaatctaactcaggcggtttctgagaacttggctagagtcaccaaacaacggaatgtaccatgcagctga

SEQ ID NO: 11728 - DNA, 2039 bp, Oryza sativa
  Clone ID: TFbOSC900031j.C1.o1.fg
gacttaggacagatataatcagggcgaaggtcaatcctgatgagcaaatgtgctgtgatacctcaaattatcctcgcagtgacttctgcaaagtgccagtatttgattatcaccgacactgcccaaggtgtttgtatgacttatgtcttgactgttgtcgagacataaggcgatctaggaccagtgttgcaagaggagaatatgctgaaggtcgtgtggtagatagaagtaaagatacttcgaataaaagagcaagaatggaaccatctgcagaaagtgcaaatgataagtcagtcccacaacgaagggacataaaaaatattgacattagatctttattccctacatggagagtcaataatgatggaagcattacttgtgggcctcatgaggctggtggttgtggctcctcgaagttagtgttaaggcgaatattcaaaataaactggattagtaagcttgtaaaaaattctgaggaaatggtcaatggttgtaaagtacatgttcttgagaatggatgctcatcctgcaatgatggcagaacattagagttaactggtcatcgtaactttggtgtctcaacatgttcaaataatggtggtattgatcggttctgtgtgttctctcctgtattagaggacttgaaatctgaaggtattattcattttcgtaaacactggataaaaggagaacctgtagttatcaggaatgcgtttgagccttctctgtcatcaagctgggacccactaaatatttggcgaggaatccaggaaatcatggatgaagaagtggatgacgatgtcattgtcaaagctgtggattgctcaaaccaagcagaggtggatattgagctgaaacagtttatcaaaggttattcagatggtcacaagggggaagatggggaattgatgatgctgaaattgaaagagtggcccccacccagtgtattggaggagtttctgctatgccaaagaccagaatttattgtcaattttccattagttgattttatacattccaggtgggggctcctaaatctttctgctaaattgcccccagacaccctacaacctgaagttggcttgaagctgttaattgcatatggaagacatcaagaagctggtaaaggtgattcagtgacaaatctaatgattaacatggctgatgtggtgcatatgctaatgcatacagccaaagggcatgacgtatgtccaaagaggctacaacctgagcgatctgaaaagattgccaatggaatgacaatgcatgtaaatgctcatgcacctgttcaaaatttgaatgtggatatgggggaacaatcacctgaccatgtaagctcaaagtttgatgaaagagcgcatgcgtctgccttgcgattacaagagaagtcttcagatgccaaacttaattgtggtttcgaaggctcttcaactgagttatcttgctcgtcacattcagaggaaccaaaagttaatggttcagaaagaagtcaggctggttctgtttgggatgtgttccgcaggcaggatatttcaaagctgaatgaatatttaactgctaactgggaagaactggcagctagtagtcaggttaagaatcctatttatgaacaatctatatatctcaacaagtatcataaaaggatactgaaggatcaatatggaattgaaccctggacattccaacaacatatcggtgaggctgtatttgttcctgctggctgcccattccaagtgaaaaatctccagtctacggttcaattggctcttgatttcctgtcaccggaaagtttgggggagtcggcccgaatggcccaggagattcgctgcctaccaaatgatcatgatgcaaaactgaagatgctcgagattggaaaaatctctttatatgcagctagttctgctgtcagagaaattcagagaataaccctcgatcccaagtttaatctagaccttaaattcgaggatcagaatctaactcaggcggtttctgagaacttggctagagtcaccaaacaacggaatgtaccatgcagctga

SEQ ID NO: 11729 - DNA, 252 bp, Oryza sativa
  Clone ID: TFbOSC29814j.C1.o1.fg
atgcagttcgaggacgggggagatgttcatgttggtgccggtgagggtgaagatggtggcagggtcacagtggatgagcttaccagatgtctacgttgtggcatcagtgcaaatgcgacgcctcatatgcgccgtggaccagagggacggagaactttatgcaatgcttgtggtatagcatgggcaaagggaaaagtgcgaaaagttattgattctgatacccccatggataatgccatgtttgcacaaatg

SEQ ID NO: 11730 - DNA, 4356 bp, Oryza sativa
  Clone ID: TFbOSC404332j.C1.o19.fg
atgactatgatgacgcctcccccgctcgagccggaggaggacgagatgctcgtgcctcaccaggagctcgtcgctgctgacgccgcccagcccatggaagtggttgcgcaaacggaggcagctagcacggcggagagccagccagctgaggacccgcagacgtcgcggttcacgtggacgatcgagaacttcacccggatcaatgcgaagaagcactactcggatgcgtttgtcgttggcgggtacaaatggcgtgtgctcattttccctaaggggaacaacgtggaccatttctccatgtacttggatgttgccgactctgctaacctcccatatggttggagccgatatgctcagtttagcttggccgttgtcaaccagatccaacagaagtatacgatacgcaaagatactcagcatcaatttaatgcacgtgagagtgattggggtttcacatcttttatgcctttgagtgagctctatgatccaagtagaggataccttgtcgatgatactgttgttgtggaggctgaggttgctgtccgcaaaatggttgattattggacatatgattcaaaaaaagaaacaggttacgttggcctgaagaaccaaggagctacctgttacatgaactctctactacagacactataccatataccatacttcaggaaggctgtgtatcatatgccaaccaccgaaaatgatatgccatctgggagtattccgttggcattgcagagccttttctacaagctccagtatagtgacaatagtgtagccaccaaagagctgaccaaatcttttggatgggacacatatgattccttcatgcaacatgatgtacaagagctcaacagagttctctgtgagaaacttgaagataagatgaaggtgacaaatctgagaactgtcgtagagggaacgattgaaaagttattcgaaggtcaccacatcaattatatagagtgtataaatgttgactataaatccaacaggaaggagtccttttatgaccttcaacttgatgttaaaggttgtcgtgatgtgtatgcatcgtttgataaatatgttgaagttgagcgcctcgaaggtgataataagtatcatgcagagaatcatggtttacaggatgcgaaaaagggtgttctgttccttgatttccccccagttttgcaacttcaactgaagcgttttgagtacgactatatgagagataccatggttaagattaatgaccgctatgaattccctttgcaacttgatttggatagagatgatggaaaatatcttgctccagatgcagatagaagtataagaaacctttatgctcttcacaggtataaatttgatgatgagcgtgtaactaaagaagatactaagaaggcccttgaagagcaatacgggggtgaggaagagttgcctcaaataaatcctggtttcaacaacgctccatttaaattcacaaagtattcaaatgcctacatgcttgtctacatccgtgagagtgataaggacaaaataatgtgtaatgttgatgagaaggacattgctgagcatttaagggtaaggttgaagaaagaacaagaagagaaagaacacaaaaagaaagagaaggctgaagctcatctttataccatcataaaggtggctcgagatgagaatttgaaggagcaaattggcaaggatatatattttgacctggtggaccatgaaaaagttcgtagcttccgaattcagaagcagttactgtttaccactttcaaggaggaagttgcaaaggagtatggcatccctgtacaatttcagcgcttctggttgtgggctaagaggcagaaccacacatacaggcctaatcgtccattgagtcctcatgaagaaacacaatctgtgggacaactgagggaggtatcgaataaggcacacaatgctgagctgaagttgtttttggaagtagaacttggcccggatttgcggcctctccctccacctgagaagagcaaggaagatattcttctgttcttcaaactctataatcccgaaaaggaagaactctgttttgtggggaggctcttcgtaaaggccttgggaaaaccctcagaaatcttgaccaaactaaatgaaatggctggatttgtgccaaatgaagaaattgagctctacgaggcaagagctaaattcatgatgctatatttatgggataatctagtatatgtcactccattgaggcgtgttctaggagaaattaaatttgagccaaatgtgatgtgtgaacatattgacaaaaaagccactttccgtgctagtcagcttgaagatggggacatcatctgtttccaaaaatcacctatacctgatagtgacactcaaatgcgttatccagatgtcccttcgtatctggagtatgttcataataggcaggttgtgcactttcggttattggagaaaccaaaggatgatgacttttctttggaattgtcaaaacttcatacctatgatgatgttgttgagagagttgcccgtcagcttggtgtggatgatccagcgaaaattcgtctaacatcccataactgctattcgcagcagcctaaaccgcaacctatcagatatcggggagtggagcatcttttggacatgctcattcattataatcagacatcagacatattgtattatgaggtgttggatattccactgccagaattgcagggcctgaaaaccctgaaagttgcattccaccatgctacaaaggatgaggttgtgattcacagtatcaggcttccaaagaatagcaccattgcagacgtgattaatgatttgaaaacaaaggttgaactatccagtcccagtgctgaattgcgcttgttagaggtcttttaccacaagatatataagatttttccactccatgagaagatagagaatattaatgatcagtactggacactacgtgctgaggagattccagaggaggagaaaaatctcggtccaaatgatcggttaattcatgtttatcacttcatgaaagaccctcttcagaatcagcagattcagaactttggagatcctttttatcttgctatccgtgaaggtgagactttagcagaagtaaaggagcgcatacagaaaaaactccaagtccctgatgaggaattctgcaagtggaaattcgctttcatatccatgaaccggccagattacctccaagattcagatgttgtatctgcccgtttccagaggagagatgtctatggagcctgggagcagtatcttggtttggagcatgctgatactgcaccaaaaagggcctacacagccaatcagaaaaaattaaccagaattactgccgcagttagtgcggcgctgggttccgtgatagtaatagctgatgaaatttttgcatcaacttatatattgacaatattgtccaaaaaattatatctcatgtcgcgtataaaatttggagtcacgcgttcgatattcttctctcgtcactacgatctcaacaaagctccagtccacttaacactgcaactcccaacctcaccaatggacaacccgacgccgtcgtcgagctccggcggtggcggcgccgccgccgccgccaatgccagctccgacgagcaccgcaagacgtcgccggcgacggccgctgatttcttcgacgaggagcacaccttcgacgatatcctgctcccggtggacttgttcgacttcacgcacggactcgacgccggcgacggctgttacgtagacgatcaggctgcgattgggcagaagccgctgtcgccggcgccggagccggcggcagagcagcagccgtcgccggcgccggagcacggcgacgatgagcggctggtgatgtactaccaaggacaggagtacatcttcgaccccgtgcagccgcagaagattgaaaatatcttccaccatctgaatggacaggagatgattccacagagcatcaggccacaacccactaacctggtaagacccatcactgttcccgaggacttcgacaggtttgctgcgctgacgcggtatagggagaaaaagaggaacatcaagttcatcaagaaggcggattacagtgcccgaaaggaagtcgctttgcggatgaaacgcagcaaagggaaatttgcacctagggttcagacctctgaaaattccttggcacacagaaaggggataactttctgcaccaactgtggtgaaagcagcgacgccacacccatgatgcgccatgctcccaatggaaccaaatcattttgcaatgcttgtgggttgatgtgggcgaactcgagaaaaataagaaagatcagaaacccaacttccggggagcaagaagatcaataa

SEQ ID NO: 11731 - DNA, 629 bp, Oryza sativa
  Clone ID: TFbOSC30845j.C1.o1.np
gaattcctgcagccccaaaatttgctataggatatcgtgacttcgcggttttagctgtacgacaccgatgggttcagaccaaggaagctgccgagctcgattactagtcgtctgcacatgccgcaatggcggcggcagcggcgcctgcttccgcggccaacaacggtggcggcaactggcctggtcaagacagctgtctcacggcagcgcctgggcgcggcgcgcatagcaagaggtcatgcgcgacggccgcgaccgccgctgcgtggcacacccttggcccacatccgacattttagtcgtcgctgtcatcgtcccgcccgtcgtccgacttcccgtcctctaaaaagctgtcggccacaaggctgaacggctccagcggcagccgcggcaagaagagccccggccccgcgggggtgaaggtgggcatggaggccggcgtgtacgtggcggtgcatgcactgcgcgtcggagaaaacgtcgtagctgctgacgggtcccctgggtcccaagaccctctgcaacgcgtgtggcttgaggttcatgtctgggcggctgatgccggagtacaaggcggcggccatgccacctctgtggttgacgacgagcggcggcgaccatagtagtat

SEQ ID NO: 11732 - DNA, 888 bp, Oryza sativa
  Clone ID: TFbOSC413617j.C1.o3.fg
atggcttcctccaccttctcgctcttcttcccgatgtccaatgggcagtgttggccgccgtcgacggtggaggagtccgcggcctacgacgaccacagcaccgtcaccacctctccttcctcgccttcgtcgtcctccaccggctccgtcgactgcacgctctcgctcggcacgccgtcgtctcgccgcgccgagcccgtcgcggcggcggcgccagcggcaaaccatggggcgcccgtgccggcgcattatccgtcgctgtcagcggcgaccgtgtcctgggacgcgactgccgagtcgtactattgtggccagcaggggaggccggccaccggcgccgccaagtgcgccgccggcgccgggcacgacgcgctcctcgaccgccgctgcgccaactgcggcaccgcgtccacgccgctctggaggaacggccctcgcggacccaaggttcgtcgccggcgacgctcgctctcgccgtcgctgttctctatctctgcagttcacttcgcggtttcgccgacgtacgtcgtgtcgctgacattgccgccgtcgtacgtttctctgcagtcgctgtgcaacgcgtgcgggatcaggtacaagaaggaggagcggcgcgcggcggcgacgacgacgacggccgacggcgccgccggatgcggcttcatcaccgcgcagcgtggacgcgggtcgaccgcggccaaggcggcgcccgccgtgacgacgtgcggcgaggagacgtcaccgtacgtcgtcggcggcggcggcggcggcggcgaggtcgcggacgcggcgtatctcgcctggcggctcaacgtcgtcccaccggcggcgacggcgacggcgttctcggtgtggccggagcgagctagcctctaccactacaactag

SEQ ID NO: 11733 - DNA, 1313 bp, Oryza sativa
  Clone ID: TFbOSC100956j.C1.o1.fg
gtactcctctctggagaaatgggccaccagataagccagtgctctgcaatgcatgtggctcaagatggagaactaagggttcgctgacgaattacacaccaatgcatgctcgggatgatattgatgctgaggaacctagagctagcaagctgaaacctccaacattgaagctgaaggaacagaagcaactgaagaaaaatccaagccacatcacaatggagaatggaccattttctgatcaaaacttccgtaagatgggagatcctgacctaagtaatcgatctggttctggatcagcactatcatactcagagagttgtgccccctatggcactgctgatgcaagtgaaatgactgcttcagcacaatcacatgcttgggaatcacttgtgccatcaaagagaaggagttgtgtcactcggcctaagccttcacaaatggaaaaacttgcaaaggatcttaattccataatgcatgaagagcagctactttacctttcaggatcctcagaggaggatctaatttaccatagtgcaactcctgtggattcctttgagatgggatatggaagtatgcttctcagaccaaattcaaaatcactggaggaagaatcagaagcaagctctattcctgctgataataagtcatatattactagtgaatcttactcagggtcggtctcatttgtatatagtgaaagcaaggcaacaagcaaccaaaatgttataactgaacagccaaagaagtttctggtgcaaacatcagataatgctagaagggctaatctccatactgaaaatcaggatactctggagaatgcaaactcacctttagtttccctacatatggagggaaaagacagtgaagaaacaagagtaaagaccagtgcttcaaatcgccttacaaagtccaccatgaatcctctgaaaaggcctcatgacacccacttccaaagctccgtagaactaagaggaaccatgaggagtcctaaaagagtttctaaatatggtgatgctatgggtctaaagtgccaagcgtcgtttatgccgaaaccaggcaatggcaaagatttagcctgcagtgacagagcacttaacttattcatgttacccccggataaactatccatgctggttcctcctcagtatgccaacactgattctgatcaagacctgttgctggatgttcctcttaatgctcggcacccagaggccgagcttctttgccagccatctcaactgagctcagtagcccacagctccacctcagaggctgggaatgccggaggagaggggcgccttaagcagccctag

SEQ ID NO: 11734 - DNA, 1860 bp, Oryza sativa
  Clone ID: TFbOSC400173j.C1.o8.hg
atgagcggccaccacgaagctaagccctaccagccccgccgcggcccggctcccgccgacgaggaggccgcccccgccgctgcggcggacgaggcggaggcggaggcggaggtggaggctatggagcggtacgagcaggagcaggagtacgaggagggggaggagggggaggaggaggagtacgagggcggggagggggtccccatggacgccgacgcctccgccgcggccgtggcggggatggacccgcacggggagatggtgcccgtggccggcggggaggcgggcggcggctacccgcacgtggcgtcgaacaccctcacgctgtcgttccagggcgaggtctacgtcttcgagtccgtttccgccgagagggtgcaagctgtgctgttactgcttggaggaagagagctagcaccagggtcgggttcggtaccatcatcttcagcggcatacagtaagaagatgaattttcctcaccggatggcatcattgatgaggttccgggaaaagagaaaagagagaaactttgataagaagatccggtatactgttaggaaggaagttgcacttaggatgcagcgtaatagaggccagtttacatcatcaaaatcgaaggctgaagaagcaacatccgtcataactagttcggaaggttcgccaaattggggcgcagttgaaggtcgacctccatcagctgctgagtgccatcattgtggtattagtgcagcgtcaacacctatgatgcgccgtggtcctgatggcccaagaacattgtgcaatgcatgtggacttatgtgggcaaacaagggtacgatgagagaggtaacaaaaggtccccctgtgcccttgcaaattgtgccagctgcaaccaatgatgttaacggaatcgtcgaggcaacaggtgtcgagcagcacaattctgcagtcgaggaggcagtttctgctgcaaatggccatgaatcgcagtcgggagtcgccgtgatgcgaaggccgttggatcaaggtttgacggcccagaacgcctcctcttcctcttgtcttccatccccaccacgcgtgcgagacgagaccagcgcgacgacggccatggccgcggcggcgacggcggcgggggacgaggagttggagtcgctgctgcgaaacttccaccgcttctcccaggggtacaaggatgcacttgtggaggcccaggctttaagggtgaactgcagctctgaatccgagaggcgtcaggctctcgagtcgcacgttgcagatctcaagagtgataatgagcgattgagaaggctgtatactgaaactttgttcaagttcaccaatcagatgaaatttcacacagagtctcgtaatctgaaggaagaactggaaaaggcaaacacgagattgctatccatggaagaggagtataagagggaaatcgaacaacttaagcttggcagtgaaatgaacagcaatgacctggagaacaagctcagctgcgctgttgttcagcaagcaaccaatgaagctgtgataaagcaactcaatctggaactggaagctcataaagctcacattgacatgctaaatagcaggttggagcaggttactgctgatgtgcaccagcagtataaaaacgagatccaggatctgaaggatgtagtcattgttgaacaggaggagaaaaatgacatgcataggaagcttcagaatactgaaaatgaattgaggatcatgaagatgaagcaggcagagcagcaaagggattccatctcggtccagcacgtggagacactgaagcagaaggtgatgaagttccggaaggagaacgagtccctaaagcggaggctggcgatctctgaacttgactgctcatga

SEQ ID NO: 11735 - DNA, 1128 bp, Oryza sativa
  Clone ID: TFbOSC404775j.C1.o2.fg
atggagggggagcaccaccatcaccaccaggatcatcaccaaggccacttccaagccttctccctgcagcctaaggatcccccagtcttattcccctttgtgatcagtagaagaagcagcagcagcagccctagcgacagcaccactctaagctatggttcagaccatcacttgacacagcagcagcagcatcagcatcaagccatgcttgagccccaaaatatgattggaggatcatccgctggcatctttgcgacgccgttcccgaccgtcaagagcatccgcgacgacatgatcgagcggtcgcagttcgatccatacgataccgagaagctgcaggcgagctgcgggttagccaaggtcgtcgccggcggcaagtggagcgcggtgccagcggccaagatgaagatcacgaggaagatgggtgagccgtcgtccggtgtcactggcggggctgcgacgacggtggcgccgaagaagccgaggaggaggccggcgcaggcgtacgaggatcacggccatggcggcgccatgggccaagcttttggcgtgattagggtgtgctccgactgcaacaccaccaagactcccttgtggaggagtggcccgtgcggccccaagtcgctttgcaacgcgtgcggcatcaggcagaggaaggcgcggcgggcgatgatggcctccggactaccagcgtcccccaacgccgccggccccaaggcggccgcacatagcggcgccgctgcggtggcggctgcgcagccgaaggtgaagaaggagaagagagccgacgtcgaccggtcgtcgctgccgttcaagaaacggtgcaaggtcgtccaggtcgaggatcatcaaacgctgcccgccgccacaaacgcagccgccgcagctgccatggaggagacggccgagtccgccaccgtcgccccgcccccggcgccgacgacgaggggtggtactctcgtcgacagcatcgggctcagctggagcaagacccatgccgccgccaccgcctcctgcagcttccggccgtcaccggtggctcccggcttcgcggcggcggtgcaggacgagatcactgacgccgccatgctgctcatgacgctgtcctgcgggcttgtccggagctga

SEQ ID NO: 11736 - DNA, 1977 bp, Oryza sativa
  Clone ID: TFbOSC401181j.C1.o1.fg
atgcccgacgcggcggccgccgccgccgccgcccaggacgccgacgccgtgatgcgcgacgcacccgccgacgcagcagcaggcggcggcgacaacgacgacgacgacggggatgacggcacagaagaggacgaggaggaggatgacgacgaggagggcgatgaagaggagctgccgccggccgaggatccggcggccccggagccggtctcggcgttgttgccggggagcccgaaccagctgacgctgctgttccagggcgaggtctacgtgttcgaatccgtgacgcctgagaaggttcaagctgttctgttattgttaggaagaagtgaaatgccaccaggtttagctaacatggttttaccaaatcaacgtgagaacagaggttatgatgatttacttcagagaacagacattcctgccaaaagggttgcttcactcattaggttccgtgaaaagcggaaggaaagaaatttcgataaaaaaatacgttacgccgtacgcaaagaagtggcactcaggatgcaacgtaggaagggtcaatttgccggaagagcaaatatggagggagagtccctatctccaggctgtgaacttgcttcccagggttcaggccaagattttctatctcgagaatcaaagtgtcagaattgtggcactagtgaaaaaatgacaccggcaatgcgccgtggtccagctggtccaaggactctgtgcaacgcctgcggactgatgtgggctaacaagggtaccctgagaaattgccccaaggcaaaagttgaatcttctgtggttgcaactgagcagagcaatgcagctgtctctccgagtggaatcgacaacaaggaattggtggtaccaaaccctgaaaacattaccgcaagccatggcgaagtgctgcattctttcaaaggagattggggagagattggggagattgtcactcgttttccgcgcacacgcttcccaaactactcaacggtgtccctgaggggatcgagcgcgagggagatcacccgcgacgcgctgctgcagaaggtctccgaggagcgccagctccgcagccacctccgccgcgccgccgccgcggcgctctccatccagcagctaaccaagtctgcgaaccaccttatgtggccatttcaaaaagaagtccacagagtcattaggcatgtggctgttgttcatatgtggcgtgtttggagaagatactcagtcataagaattgtttcagaacagctccatgaagagtgggaagcattaataaaccagcctgacattaatctgacaaaacaatggatatcaagcatgatgcttagaccatttcttttcttcgttactcaaccatcaagctggtacaagggacaacaggacaagactctaaactcgatttcggcatgcttcaaaatcatcttgaatagcataaactcaatggatgcaagcaaaaatttatgttcctttgctgtgggcacgccagaagaaaggtgtaaccattcttgctgtaaggatggaaacatggttcagattactgacactgctatgaggttggctgtgtctttaactgattgcaaaacatggaaaaaaattacaagtgaggatactagagctgctgatgcatctgtggagagcttgattgaatttattggtgcaagccagagtggtacatatagttgtcttaggagatatatagtaaatcttggttctcatgccttggagaagaaaatttcttcaatctcaacagatgatcagttcctgattactgctagtgcagtcaccattgcgctacgacctttccattctatgagagcagggaggggtgctgatctaaatggtgcttcaaaggaatactttacacttatactcacaattccggatctttgcaaacgcttgccacctctgttgttgcctgctataaagcacatatctatactacaaccatccctagatattttactgggtgctttgttcaagggctag

SEQ ID NO: 11737 - DNA, 4455 bp, Oryza sativa
  Clone ID: TFbOSC416374j.C1.o12.fg
atgcccgacgcggcggccgccgccgccgccgcccaggacgccgacgccgtgatgcgcgacgcacccgccgacgcagcagcaggcggcggcgacaacgacgacgacgacggggatgacggcacagaagaggacgaggaggaggatgacgacgaggagggcgatgaagaggagctgccgccggccgaggatccggcggccccggagccggtctcggcgttgttgccggggagcccgaaccagctgacgctgctgttccagggcgaggtctacgtgttcgaatccgtgacgcctgagaaggttcaagctgttctgttattgttaggaagaagtgaaatgccaccaggtttagctaacatggttttaccaaatcaacgtgagaacagaggttatgatgatttacttcagagaacagacattcctgccaaaagggttgcttcactcattaggttccgtgaaaagcggaaggaaagaaatttcgataaaaaaatacgttacgccgtacgcaaagaagtggcactcaggatgcaacgtaggaagggtcaatttgccggaagagcaaatatggagggagagtccctatctccaggctgtgaacttgcttcccagggttcaggccaagattttctatctcgagaatcaaagtgtcagaattgtggcactagtgaaaaaatgacaccggcaatgcgccgtggtccagctggtccaaggactctgtgcaacgcctgcggactgatgtgggctaacaagggtaccctgagaaattgccccaaggcaaaagttgaatcttctgtggttgcaactgagcagagcaatgcagctgtctctccgagtggaatcgacaacaaggaattggtggtaccaaaccctgaaaacattaccgcaagccatggcgaagtgctgcattctttcaaaggagattggggagagattggggagattgtcactcgttttccgcgcacacgcttcccaaactactcaacggtgtccctgaggggatcgagcgcgagggagatcacccgcgacgcgctgctgcagaaggtctccgaggagcgccagctccgcagccacctccgccgcgccgccgccgcggcgctctccatccagcagctaaccaagtctgcgaaccaccttatgtggccatttcaaaaagaagtccacagagtcattaggcatgtggctgttgttcatatgtggcgtgtttggagaagatactcagtcataagaattgtttcagaacagctccatgaagagtgggaagcattaataaaccagcctgacattaatctgacaaaacaatggatatcaagcatgatgcttagaccatttcttttcttcgttactcaaccatcaagctggtacaagggacaacaggacaagactctaaactcgatttcggcatgcttcaaaatcatcttgaatagcataaactcaatggatgcaagcaaaaatttatgttcctttgctgtgggcacgccagaagaaaggtgtaaccattcttgctgtaaggatggaaacatggttcagattactgacactgctatgaggttggctgtgtctttaactgattgcaaaacatggaaaaaaattacaagtgaggatactagagctgctgatgcatctgtggagagcttgattgaatttattggtgcaagccagagtggtacatatagttgtcttaggagatatatagtaaatcttggttctcatgccttggagaagaaaatttcttcaatctcaacagatgatcagttcctgattactgctagtgcagtcaccattgcgctacgacctttccattctatgagagcagggaggggtgctgatctaaatggtgcttcaaaggaatactttacacttatactcacaattccggatctttgcaaacgcttgccacctctgttgttgcctgctataaagcacatatctatactacaaccatccctagatattttactgatctccaaggacaaaatatttgaggaaataactaaattggagaagtcaggggtttctagtggtggttctggtaccattccctactgtggatgggctcttggaaatcttgtaactttagctacagagcatgatgatttatccaattcagggtgctttgttcaagggctagattgttgcctatatgttgatgcaattaactgtgtttcccaaagcttactgaaattttttgaggagaacaaggaaatgcttcttagttttggtgatagtgttgatacatctttcatcaaggaaaatgataccagtgacagctgcagcagaacactgtttatggatcttctgaagccaatttaccagcagtggcacctcaggaaacttttggtgttggcaaaggaggatgctgtgtgcaagaggcaaaataatcatgacccagatacacagacccattcgcgtagcctaaaattgctggacattgtatgcttttactatcacatgctccgaattttctctttactgagtccatctattggttcattacctattctcaacatgctctcattcacccctggatttcttgttgatttatggggggcattagaaatatatatctttggacaagcagtccacaaattacaaggaccaaaacatgaaagagaatcagctacaagtagttcaggtgagcatgtatcctccatgaggcaaagaagaaatttcaaggatacatcaaacaagtggtcgaatgtgttccagaagattacaggaaaatcaaatgacgcagaggatacaaatttggttgacaatcctttaaattctgagcagaatggtgaagcattaattttatgggatattgaagccatgagacaaggatctgagtgtattggaaaggatttaatgcaaatgttgtatctgttttgtgctacgtatggacacctattgcttgtgctagatgatattgagttttacgagaagcaggttccttttaccctagagcagcagcgaaagattgcatcttcactcaatacgttcgtatacagtactttcattcagaatggtggaagcagcagcaaaccacttatagatgtgactgtgagatgtcttaatctactgtatgaaagggacagcagacacaagttttgtcctatttctctgtggctggcacctgctaggaatggccgaattccaatcgcagcggctgccagagcccatgatgcagcatttgctacattgccaggaaatcagttttttggaattcctatccggagctctgtacttactacaataccacatgtatatccatttgaggaaagagtgcagatgtttagagaatttattgagttggacaaagcatcccgaagagttactggagaagtatctgggccaggtccaggatctattgagatagttattcgtcgaggtcacattgttgaagatggatatagacagttgaactgtcttggatcaaaattgaagtcttgcattcatgtgtcgtttgtcagtgagtgtggccttcctgaagctggtttggactatggtggtctatcaaaggagtttttgacggatctgtctaaagctgccttcagtccagaatatgggcttttttcacaagcatcagcatctgatagcagcttaattccaagcaattctgctaaacttttggataatggcatcgatatgattgaatttcttggccgagttgttggcaaagcgctctatgaaggaattctattggactattgtttttcacctgtatttgtgcagaaacttcttgggcgctatagttttttggatgaactatcaactcttgattctgagctttacagaagtctaatgcaactcaagcactatgaaggggacgttgaggacctatgtttggattttactctgactgaagagttgggtggtagaagaattgtccatgaactgaggcctggtggtaaaaacatctcagttacaaatgaaaataaattgcactatgttcatgctatagcagactacaagctcaatcgtcagatactgccttttgcaaatgcattttacagaggactcggtgatctcatttcaccatcttggctgagcttgtttaatgctaacgaatttaatcagctgctttcaggcggattacaggattttgatgtcgatgatcttcggaacaacaccaagtatactggtggttataccgagtcaagtcgatctgttaaactcttctgggaggttatcaaaggatttaagccaacagaacgttgcatgctactgaagtttgtgacaagctgttcccgagctccattacttggattcaagtatttgcagccttctttcacaattcataaggttccatgtgatgttacactttgggctacaattggaggccaggacgtggatcgtcttccatctgcttccacgtgctataacacactcaagcttccaacatacaaacggtcaagtacgctgaggagcaaactgctatacgcgattagctcaaatactgggtttgaactctcgtag

SEQ ID NO: 11738 - DNA, 816 bp, Oryza sativa
  Clone ID: TFbOSC417054j.C1.o4.fg
atgcggaaaccgacgccgtacgtctccctccatgacgtcgtcgccttcgatttcgtcgacggcgacgtccccttcgacgacctcgtcgacggcgaggggctgtgctgccccgacgacccgtttgaggaggtcatgagatgcctctcggcggtggacgaccctttcttggcggcgttcaagcttgattgctcgccgccgacgcccgcggccgacgccgacgtggactccaggagcgaggagcacatgcacgccgacgttggcggcgggctggacttgcagagagcagtaggcggcggcgatgagaaggcgggcacgccgagcaccgtcgacgacgttccgtggctccaagcttcggctgtggcgaggaagccgcgccgcgcacccgccgccgtacgcaagagggtctggtcactggtatccccccagctggccaccgccgccgccgccgccgtcgacaacagccgcgacgaagtttccagcggcggcggcggcggaggagaaggaggagaacactgctcgcgccccgccaagcggcggcgcaaatgcggcgaggagaagaggtgcggccactgccagacgacggagacgccgcagtggcgggtggggccggacgggccgagcacgctgtgcaacgcgtgcggcatccggtacaggattgaccacctgctgccggagtaccggccgtcgacgagccccggcttcgggagcgacgggtactccaaccgccacaggaaggtggtgaagctcagggagaagaagaggaagaaggccatgctggccgccaccgcaacggcgctaacttctgggcctgtgtga

SEQ ID NO: 11739 - DNA, 669 bp, Oryza sativa
  Clone ID: TFbOSC411828j.C1.o3.hg
ccaccgcaccacgacggccgcccccgcgtcgccgcccgagtagcccgtatctggacgcccggccacaagccgccctcgtcgtcgcccgacatctacctcgtcaggaggacaccgaagctgccggtgacgcggcctccccgtaccaagcaagctccgcccacagcgcccgcgcccgcgcctccgccgccgccgccgcagccggcgtcgccgaagacgaagacgaaggcgaaggcgaagaagccgaagaggaagagaagctgcgtgcactgcggctcgacggagacgccgcagtggcgggaggggccgacggggcgcggcacgctgtgcaacgcgtgcggcgtgcggtacaggcaagggaggctgctgccggagtaccgccccaaggggagccccaccttctcgccgtccgtgcacgccgccaaccaccgccaggtgctcgagctccgccgccagcagcggcagagcaccaacccctccactccaccgccgccgccggtgtccgccgccgagccaatccccgacgagcaaaaagaagaggtggtaagcgtgccagtcgccgccgccgcgcccgccaccgacggcggcgcggcgagctcgctggacgcgctgctgctcgacgggccgtcggcgccgctcatcgtggacggcgacgatttcttggttagttag

SEQ ID NO: 11740 - DNA, 1062 bp, Oryza sativa
  Clone ID: TFbOSC404988j.C1.o3.fg
atgtctactatctacatgagccagctacctgctactctccctctaatggagggggatcaggatcaggggctctacccagccttccatagagcaaaggaccctcctatcttgttccctttcatgatcgacagcgccgtcgagcaccaagggcaaatctatggagatcagggcttgaggaggcagcaggttttgggtgaatccaatcaacagttcaatgatcacatgatgatgggcggatcagatgtcttcctcacaccgtctccgttccgaccaaccatccaaagcatcggcagcgacatgatccagcgatcatcttatgatccatacgatatcgagagtaacaacaagcagcatgccaatggatcaaccagcaagtggatgtcgacgccgccaatgaagatgaggatcataaggaagggggcggcaaccgatcctgagggcggggcggtgagaaagccaaggagaagagcacaagcgcaccaggatgagagccagcaacaactgcagcaagctttgggtgtcgttagagtgtgctcggactgcaacaccaccaagacccccttgtggagaagtggtccttgtggccccaagtccctttgcaacgcgtgtggcatcaggcaaaggaaggcgcggcgggcgatggccgctgctgccaacggcggagcggcggtggcgccggcaaagagcgtggccgcggcgccggtgaacaataagccggcggcgaagaaggagaagagggcggcggacgtcgaccggtcgctgccgttcaagaaacggtgcaagatggtcgatcacgttgctgctgccgtcgctgccaccaagcccacggctgctggagaagtagtggccgccgctccgaaggaccaagatcacgtcatcgtcgtcggtggcgagaacgccgccgccacctccatgccggcacagaacccgatatccaaggcggcggcgaccgccgctgccgccgccgcctctccggcgttcttccacggcctccctcgcgacgagatcaccgacgccgccatgctgctcatgaccctatcctgtggcctcgtccacagctag

SEQ ID NO: 11741 - DNA, 678 bp, Oryza sativa
  Clone ID: TFbOSC401615j.C1.o47.fg
atgggttcttccgatcagaaggtgatcgggatcgccgcggcggcagcggcggcggcggaggaggctgggaggcggtgctgcgtcgaatgcggcgccaccaccacgcccatgtggcgcggcggcccgaccggccccaggtcgctttgcaatgcgtgcgggatccggtacaggaagaagaggaggcaagagctaggcctagacaagaagcagcaacaagaacatcatcctcatcatcatcaacaacagcagcagcagtatcagcggcagcaacagcaacagcaacaagaagatcacagtgatgcagcaagttcagtaaaagacagtagcagcagcagtagcaacaaaagcagcagcctccaagtgatctctgaaatcgtcatatcgcgatccaaatccgattgcgaaggcgcgatggagggaaattgtgtgcccttgaagaggttagtgcaacaagtagattttctactatcatctactgggattacagaaagctgccaatgtgttgctgtttcttgtgccaatcagatgggattacagaaagctgccaatgtgttgctgtttcttgtgccaatcagagttctgacaatggaaaacaacagctgtgacattttgcatatcatcagaataataggcagaggctgtggcattgagtccaagaccagaataatagacagataa

SEQ ID NO: 11742 - DNA, 1164 bp, Oryza sativa
  Clone ID: TFbOSC400622j.C1.o13.fg
atggcgtcggagtgggaaatggccatgggcgtcgacctcggcatggggatgagcacgtaccacaacgcctccggtggcatcgccgccgcgccgatgatgggccaccacggcggaggaggcggcggcggcgggtactccgccgcgcaccaccaccaccaccattactacgggatgcctcatcaggcggcgatgggcgacgccatgcgcgtcgacgacctcctcgacctctccaacactcccggcgcccacgacttcttcccggcctccgctgccgccgccgccgcaggtgaccacgggcaccaccaccaccaccacatcggcggcatgggcgagccgtcgggcgccacgccgtcggccacgtcgtcagatcaccagacgtcgatgctctccttcgccgacgacttctacatacccaccgaggacgctgccgagctggagtggctatccaagttcgtcgacgactcctactccgacatgccgaattaccagtcgtccgcgcacgccgcaatggcggcggcggctgcttccgcggccaacaacggcggcggcagctcggccggccaagacagctgcctcacggcggcgcctggccgcggcgcccgtagcaagaggtcgcgcgcgacggccgcggccgccgccgcgtggcactccctcgtcccgcgcccgccgtcccagtcgtcgccgtcgtcgtcgtgctcgtcgtccgacttcccgtcctcgaacaagccatcgggcaccgcgaggccgaacggctcaggaggcggcagccgcggcaagaagagccccggccccgcgggggcggaggtgggcatggaggccggcgtgcggcggtgcacgcactgcgcgtcggagaagacgccgcagtggcggacggggcccctgggccccaagaccctgtgcaacgcgtgcggcgtgaggttcaagtccgggcggctgatgccggagtacaggccggcggcgagccccacgttcgtgctgacgcagcactccaactcccaccgcaaggtcatggagctgcgccgccagaaggagctcctcatcatccgcggcagccaccgcgacgccgccgcggccgcagcagcagccgccgccgccgccgccgcgggatccgccgcggcgaccgggaggccggagctcatgttccgcgactacggcgtgtgctga

SEQ ID NO: 11743 - DNA, 812 bp, Oryza sativa
  Clone ID: TFbOSC400622j.C1.o23.gp
ttataccaacagaattgattgatctctctcatagaggaggaagaacttgcaagggaggtaggtaccaacaaattaattaacaaaaaagcattgaaaaatatctggaataaggcaaaaaagagaaaaaaagggagaggaaataaacaagagaaagggagacgggagaatttcgcaaaaggatctaagcccgcgcgtctgtgctgtgcatgcatccatccatgcatgcgatgtgatgcgtagctgcgcctgcatggctcgctctggacgccgcgtgcgccgcttgatcagcacacgccgtagtcgcggaacatgagctccggcctcccggtcgccgcggcggatcccgcggcggcggcggcggcggctgctgctgcggccgcggcggcgtcgcggtggctgccgcggatgatgaggagctccttctggcggcgcagctccatgaccttgcggtgggagttggagtgctgcgtcagcacgaacgtggggctcgccgccggcctgtactccggcatcagccgcccggacttgaacctcacgccgcacgcgttgcacagggtcttggggcccaggggccccgtccgccactgcggcgtcttctccgacgcgcagtgcgtgcaccgccgcacgccggcctccatgcccacctccgcccccgcggggccggggctcttcttgccgcggctgccgcctcctgagccgttcggcctcgcggtgcccgatggcttgttcgaggacgggaagtcggacgacgagcacgacgacgacggcgacgactgggacggcgggcgcgggacgagggagtgccacgcggc

SEQ ID NO: 11744 - DNA, 927 bp, Oryza sativa
  Clone ID: TFbOSC405544j.C1.o2.fg
atggcggcggagcccccggcggacggccgcgatcccccggcggacgatggcgccgccggcgacggcgcggtggagtccgcggcggcggaggcgctcctgagcgcggcgtcggagcagctgacgctcgtgtaccagggggaggtctacgtcttcgaccccgtcccgccccaaaaggtcgcgccctttttcaccccttccaaaatttttttccatcgcgtccgtttggttcttccctttcgccctttcggtagctccgtgcctatctttggtgaatttgagaatagggttcaggctgttctattggtacttggagggtctgacatgcctcctggtttagtaagcatggctgtacctaccacattcgatgaaaagagtacaactgtggctgccagaagagttgcttccttaatgaggtttcgtgagaagaggaaggaaagatgttttgataagaaaataagatacagtgttcgtaaggaggttgctcaaaagatgaaacgacgtaaaggccagtttgctggaagggcagactttggtgatggttcatgttcttctgcaccatgcggctccacagccaatggcgaggatgatcatatccgagaaacgcattgccaaaattgtggcatcagctcaaggcttactccagcaatgcgtcgtgggccagctggtccaaggtccctctgtaatgcctgtggcctaatgtgggcaaacaagggcaccctaagaagtcctttgaatgcccccaaaatgactgtgcagcatcctgctgatctgagtaaaacgggtgatacagatgacagcaaagcaaatctgtgtgctgagcataatcaaaccactatgaaaactgacactgagatggtgccagagcaggagcagaaggcagacgtgttgccaccaaccaaagaagaagatagcatggctacctcgtga

SEQ ID NO: 11745 - DNA, 660 bp, Oryza sativa
  Clone ID: TFbOSC400014j.C1.o11.fg
atggttggtgataaggacgcggcggcgctggctggagagctgaccggcgacgcgggcgccagcttgaacggcttctttgaccacacgggtttggagtcggcggtggtaggggaggggcaaggggaaggggaggaggaggaggagctggagtggctttcgaacaaggacgcgttcccgtcggtggacaccatggcggcggaggtggagtcggcggcgcccggggcgccggcgcgcgcggcggtggggccgaggaccaagggtttgcggcggcgccggcgggtgactgctccgtggagcctggcgccccttctgtcgcgcccgcgtcaggcggcggcggcggcggcggacgcgggggcgccgcggcgccggtgcacccactgcgccgtggatgagacgccgcagtggcggctcgggccggacggcccccgcacgctgtgcaacgcgtgcggcgtgcggttcaagtccgggcgcctcttcccggagtaccgcccggcgaacagccccaccttctcgccgctgctgcactccaactcccaccgccgcgtcatggagatgcgcctccagagcgaggaggacgcctcggccgccagccgcgtcaacgccaaggcacgccgcgccgagcgcgcggcggcgcgcctcgccggcaaggacaagaagtga

SEQ ID NO: 11746 - DNA, 1587 bp, Oryza sativa
  Clone ID: TFbOSC401803j.C1.o31.fg
atggtggtggtcgacgggctccacgacggcggcggcggtgacctccaggccttgctggatgacgcgggggtggatgatgtcgcggcaaggggcggcggcgaggtagaggaggaggtggagcggccgtcgaacgaggacgcgttcccggcggtggagaagatggcgacggcagcggcggcgaaggggttgcagtgccggcactgcgggacgacggagacgccgcagtggcgccatggcccggagggccaccgcacgctgtgcaacgcgtgcagcatgcgctaccggagcggcaagctggtgccggagtaccggccgctgaggagcccgacgttctcgccggagcttcactccaacaggcaccaccgcgtcctccagctgcgccgccgaccggggccccagtcagccgccccgtcccccgcggcggtggcgaggtacggcggcgaggcgaaggaggaggaagaggagctggcatgggtgtcgaacaaggacgcgttcgcgacggtggagaccaccatggcgccgtcgccgcgggtggtggagacaccaccggaacacgaccaccggccggcgaacaccccgaccacctctccagagccgcactccgacagaccccgccgcgtcgtccagctacctcgccgcctgcaggagccatccgcatcagccaacctcgcccatgcagtggcggcgacggcgagggcggggcgagagtgcgcgcactgcgggacgacgaagacgccggcgtggcgccttggcccggacagccgccgcaagctgtgcaacgcgtgcggcaacaagtaccggagcggccagctgaacagcacgaccttctcccagaattcccaagaacagaagaagaagagcaagagctcggcgtgttccagggagaggaagcgatcggcggtggcggcgacggtggtggtgggtggtggtctccgtgacgacgcggcggcgatcgcggacgaacacctcgacggcggcgacctccaggccttgttggatgacgtggcgttggatgacgtcgcggcgaggggtggcggcgacgccggcgaggcgaaggaggaagaagaggagctggagtggctgtcgaacaaggacgcgttcccgacggtggagacgatgtcgccggcgccgccggagaaccgaacgaaggcgcccgtgccgccggcggggtggcagtgccggcactgcgggtcgacggagacgccgctgtggcgcgagcgcgacggcccggcggaggcggagcacgtgaggaaggaggagacaccaccgaacatcaccccggcaaccaaacaccgccgcatcgtcgacctcctccgctgctccactgctcttaacacggcggcgaaggcggtggagcggcggtgcacgcactgcgggacgacgaagacgccggcgtggctgagtggtccggacagccgcggcaagctgtgcaacgcgtgcgggaagcagtacaggaaaggtcggctggtgccggagtaccggcctctcaactgtccgaccttctcgccggagctgcactccaacgcacacgcacaccgccgtcgccgagagtcgccggtcgccatcgccatcgccggcgagaagtga

SEQ ID NO: 11747 - DNA, 609 bp, Oryza sativa
  Clone ID: TFbOSC102322j.C1.o22.fg
atgggcgcccgtgccggcgcattatccgtcgctgtcagcggcgaccgtgtcctgggacgcgactgccgagtcgtactattgtggccagcaggggaggccggccaccggcgccgccaagtgcgccgccggcgccgggcacgacgcgctcctcgaccgccgctgcgccaactgcggcaccgcgtccacgccgctctggaggaacggccctcgcggacccaagttcacttcgcggtttcgccgacgtacgtcgtgtcgctgacattgccgccgtcgtacgtttctctgcagtcgctgtgcaacgcgtgcgggatcaggtacaagaaggaggagcggcgcgcggcggcgacgacgacgacggccgacggcgccgccggatgcggcttcatcaccgcgcagcgtggacgcgggtcgaccgcggccaaggcggcgcccgccgtgacgacgtgcggcgaggagacgtcaccgtacgtcgtcggcggcggcggcggcggcggcgaggtcgcggacgcggcgtatctcgcctggcggctcaacgtcgtcccaccggcggcgacggcgacggcgttctcggtgtggccggagcgagctagcctctaccactacaactag

SEQ ID NO: 11748 - DNA, 930 bp, Oryza sativa
  Clone ID: TFbOSC418119j.C1.o10.fg
atggatgtgcacccgccgaatgcggccgcctcctcgctggaggagttgttcccgcaccagcccgccacggaaagtgatagaagtggcatagagtggctctctgtctatgtagaggactgcttgtcaacctctgcatcctgcacaaaccctgtctctgcagaactaccgcctattacaatggcaagtcaaggtgctgcaaaaccaaagttaccaccacgctcatctaccaatgcaagaaaaaagaaaaggagcctggcatctgtcataagcgacactgatgaccaacattgtatcacgctgtttgtcgagccaccgctactcctgctcgatcataaggactggctagcagagagtgagcttatcctccccaagaaggacaaagatgaagaacttgtccaagagcaagaacaagaggaggaagagaattacaaaatgagtgcaggaatgcaattccagcaggagcaactggtgatcacttgtagctattgtttgtccagccaatcaccacagtggtgggatggtccatcagggcctacctgcgatgcttgtcgtctgaggattgaggcgaggaatgggcacaccaccagttccaagaagcgctatggccaagagattgacaaagaacaggacataggaaagcggcgagataagaagaagatcaagaaggctgtttatgtgaatgatgagctgctatcggaggagccaatgaagaggtgcacccattgcttgtcctacaagacgccacagtggaggaccggtcccttggggcctaagacgctatgcaatgcttgcggtgtgaggttcaagtctggcaggctgctgccggaatacaggcctgctaatagtccaacttttgtgagtgacatacactccaattctcataagaaggtcatgcagctgaggaattctgttccacacccaaggaagtga

SEQ ID NO: 11749 - DNA, 645 bp, Oryza sativa
  Clone ID: TFbOSC413566j.C1.o12.fg
atggcgggcgggcagtactactacaggcagtgcggcggcgtcgcggaggaggacagtcggtcgccgtacggcggcggcggtgcggcggtggactgcacgctgtcgctcggcacgccgtccacgcggcgcgcggaggcgggcgcgtacggcggcgggctgcagccgtgggacgtgccgtcgtcggcgcgccctggcggcggcggcggcggcaagcaggacggcgccggcgtggctccttgcaacaaggaggcccccgccgccggccgcctgcctcgccgctgcgccaactgcgacacgatgtcgacgccgctctggcgaaatggtcccaggggacccaagtcgctgtgcaacgcgtgcgggatccggtacaagaaggaggagaggcgcgccgcggcggcggtggcgccgacgccgccgccgtcgctggacaccggcgccgggtacgcgtactgctactcgcgacagccgccgccgccaccggcgccgcagtggggatgctacggccaggccgcggcgaagtcggcgtcgtacgcgatgttcgacgcggcggacgacgggccctgcctgtcgtggcggctcaacatgatgccatcctcgccggcgttcgccgtcggcgagcggcccggcctgttccaatactattag

SEQ ID NO: 11750 - DNA, 881 bp, Oryza sativa
  Clone ID: TFbOSC101319j.C1.o7.np
cgacggagttgtcctcgtagaaccagtgcgcctgctccagcaagaacaggatccgctcgaacgactccaaatcctccttgggcacgttgagcacgaagcggctgcgatttttccgtttccaccggcgattcgattcacatggttggcatgtgcccatgagaatgtctactttgttttcaggagtttgctgtgccagcccggcggttgaattgttgccatctttgagcccagacatcctggttcgagatgcgcggctagaggattgctgggaagtagctgatactcattgcagctcgttctttccagattacacttttccactggaccttgttctacgtattgatcgttacattgccctcctatccggtttttcggttccacctggctgcatgagaacttgccttgtcgccgttaacagtaattcgcttagtagaagtatcagcattgaatgtggagatttaagagatgctgacttccaagaaaaacacggtctcagtaaggcctccatagctggcattcttacagtagacacggtggcagactatcttcccagaagagggcctctcaagcagagaagaacaggtattgcatatatagcaaatgttgcagtccgaaaggaagaacgtcgtaaaggaatcgctaaaatgcttgttgcagaagcagaggagcgagcaaagagttggggttgccgatccatggcattacattgtgatgtaaacaacattgctgcgctgcgtctgtacaaaaatctaggatacaaatgcatccatgtaccagaagatgctaagtggccagaacctaagatagcaaaaggagtgcgatacaactttatgatgaagctagtacccaagatgtagtgtatatgatcagaacagagaaac

SEQ ID NO: 11751 - DNA, 411 bp, Oryza sativa
  Clone ID: TFbOSC900385j.C1.o23.fg
atggattcctcgtcggtcgagaaggggagtgggtcgatagatccggacgagcgcacggcctccggcgagcccaaggcgtgcaccgactgccacaccaccaagactccgctctggcgcggcggcccctccggccccaagtcgctgtgcaacgcgtgcgggatccggtaccggaagaagagacgggaggcgctggggctcgacgccggcgagggcggcgcggagcggcaggagaagaagaagagcaagagggagagaggggaggaggtgaccatggagctccgcatggtggggttcgggaaggaggtggtcctgaagcagcggcggcggatgcggcggaggagacgcctcggcgaggaggagaaggcggccatcctcctcatggccctctcctccggagtcatctacgcctga

SEQ ID NO: 11752 - DNA, 1290 bp, Oryza sativa
  Clone ID: TFbOSC401000j.C1.o33.fg
atgccgtcctacgcgcaccaccacagttctctgggggatgacgaggaggagaacgggcgtttcttgagcctgtgtttgcttggtttctggaattttgggaatttatggtttttgctgtgtgtgtatgtgggtgccttttggacggagaaggatgggaagatggacgcgctgaaaagtagttgccggtcggaggaggcggccgacgagggggcggccgcggcgccgtcggcgtgggggatggttgagagggacgggttctccgtcgaggacctgctcgacctcgaggagttctgcgaggcggaaaaggacgccgccgaggagaacgagcaggcgctggccctcgtcgccgcgccagaggaggaaaagtcgaaggacgactcccagccgtcgtccgtcgtaacgtacgagcttgtggcgcccccgccgccgcctccggagattgttgacctgccggcgcatgacgtcgaggagctagagtgggtgtcgcgtatcatggacgactccctttccgagttgcccccgccgccgcagcctcctgcgtccgtcgtggcgtcgctggccgcgcggccgccgcagcctcggcagctgcagcggcggcctcaggacggagcttaccgcgcgctgccacccgcgtcctatccggtgcggactccgaccatctgcgcgctgtcaacggaggcgctggtgccggtgaaggcgaaacgcagcaagcgctctcgggccacggcgtggtctctctcgggggcaccgcctttctcggactccacgtcatcctcgtccacaaccaccacctcctcgtgctcctcgtcggcttcgttctcgtcgttctcgccgctcctcaagtttgagtggcacccgctcggcggcacgtcggacctcccggacgatcaccttctgccgccggggaagaagtccaagcacggtaagaacggcaagaacaagcctaagaagcgtggccgcaagccgaagcagctcccaccacatccctcgggcgcggcggcgtcggcccccgcgccgggcgaccggcgctgtagccactgcggcgtgcagaagaccccgcagtggcgcgcggggccggagggcgccaagacgctctgcaacgcgtgcggcgtccgctacaagtccggccggctcctccccgagtaccgcccggcgtgcagccccaccttcgtgagcgccatccactccaactcccaccgcaaggtgctcgagatgaggcgcaagaaggaggtcggctccggactcctcaccgccgccgccgccgcagcgcccgccgtggcgtcgttctag

SEQ ID NO: 11753 - DNA, 1164 bp, Oryza sativa
  Clone ID: TFbOSC401779j.C1.o10.fg
atgtcgtcgttcgcgcaccaccaccatggctcgctggtggagaaggacgggaggatgtccgcgctgaggagtagccttaggccgtacgaggcggccgaggagatggccgcggcggcggccgccggcgggccggcggcggcgtggggggcggtggagaggggggcagggatgatgggggacgggttctcggtggaggacttgctggaccttgaggagctctgtgaggtggacagggacggcggcgagcaaggcgaggcggcggcggcggcggcggccgccgtggagaaggagaggtctagtgactcccatggctcatcggtggtgtcgtatgagcccatgccgctgctgccgccggtgatggacctgccggcgcatgacgtggaggagcttgagtgggtgtcccgtatcatggacgactcgctcgccgagctcccgctgccgcagctccccgcggcggcggcggcgttggcggcgtgcggcaagccgcagcaccggcggccgcacgaaggcgcggcgtcggcgttgttggaccctatgcgcaccccgaccatttgcgcgctgtcgacggaggcgctggtgccggtgaagtcgcggcggagcaagcggtcgcgtgcctccgtgtggtcgctctccggcgcgcccctgtccgactcgacgtcgtcgtcgtccaccgcgacaacctcgtcctgctcgtcgtcggcctccttctcgccgttcctccagtacgtggacttccccgcgctagtcgcctccgacctgctcgacgagcagccgcgctccaagaagtccaagcacggcaagaacggcaagcagaagcccaagaagcgcgggcgcaagccgaagcaccagcagccgccgcacctcgccgccgccgccggcggcggcgccgccctccccgccacgggcgaccgccgctgcagccactgcggcgtccagaagacgccccagtggcgcgccggccccgagggcgccaagacgctctgcaacgcctgcggcgtccgctacaagtcgggccgcctcctcccggagtaccggccggcctgcagcccgacgttcgtcagcagcctgcactccaactcccaccgcaaggtgctcgagatgcgccgcaagaaggagacccccgtcatcgtggcggccgccgcgccggccgtcgcctctttctag

SEQ ID NO: 11754 - DNA, 1164 bp, Oryza sativa
  Clone ID: TFbOSC401064j.C1.o72.fg
atggaggtgacggccgagttcggcggcgcctactacggcggcgcggcgggccgcgagaagaaggcgctgcagcaggggtgcggggaccacttcgccgtggacgacctcctcgtgttgccctacggcgaggaggatgaaacaacaagggagggtgaggccaccggcggtaaggaggaggctgccggctttgggaacgcgtcggcggactcgtcgaccataacggccctggatagctgcagcaattccttcggcctagccgacggcgacttccccggcgagctgtgcgagccgtacgatcaactcgcggagctggaatggctatccaactatatgaacgagggagacgacgcattcgccaccgaggacctccagaagctgcagctcatctccggcatcccctccggtgggttctcgacggcgagcgtcccgtcggctcaagctcaagctgcgtcggcggctgcctccatggcagtgcagcccggcggcttcctgccggaggcccctgtccccgccaaggcacgaagcaagcgctcccgcgctgcgcctggcaactggtcgtcccgcctgctcgtgctgccgccgcctccggcctccccgccgtccccggcatccatggccatctcgccggcggagtctggcgtgtcggcgcatgcgttccctattaagaagccgtcgaagccggctaagaagaaagacgcgccggcgccaccggcgcaggcgcagctctcgagcgtgccggtgcactcgggcggctcggcgccagcggccgcggccggggaagggaggcggtgcctgcactgcgagactgacaagacgccacagtggaggacggggccgatggggcccaagacactgtgcaacgcgtgcggggtgcggtacaagtccgggcgactggtgccggagtaccggccggcggcgagccccaccttcatggtatcgaagcactccaactcccaccgcaaggtgctggagctgcgccggcagaaggagatgcaccagcagacgccgcatcatcaccagccgcaggtggccgccgccggtggagtggggagcctaatgcacatgcagagctccatgctgttcgacggagtgtcgcccgtcgtgagcggcgacgacttcttgatccaccaccacctaaggacagacttccggccgcccatctag

SEQ ID NO: 11755 - DNA, 1161 bp, Oryza sativa
  Clone ID: TFbOSC900183j.C1.o21.fg
atggaggtggcggcggcggactacgccggcggggtccgtgtcaagaaggaggccggaggctgcggcggcagcggggacatgttcctcgtcgatgacctcctcgacctgccgtgcgacgaggaggaggaggagacggggttgtgcggggcgtacggcggcggcggcgccggcctgggagcgggcgtcgtcggaggtggcggggatgaccgcgcggccgggaacgcgtcggccgactcgtcgacggtgacggccgtcgacagctgcagcaactcattctccggcctcgccgacggggacttctccggcgggctgtgcgagccgtatgaacaactcgcggagctggaatgggtgtccacctacatgggcgaggagaccttgcccacggaggatctccggaagcttcagctcatctccggcatccccgccgcgccgcgcgcgccgcccgctctggccgtctccgcggtgcagctgccggcaggaggcgccggcgcgctgcccacggaggcgcccgtgccggggaaggcgcggagcaagcggtcccgcgtcgcgccgtgcagctggtcgtcgcgcctgatggtcctgccgccgccgccggcgtcgccgccgtccccggcgtcggcggtcatctcgccgtccgagtcgggcaccgcggcgccggcattcccggccaagaaggcggcgaagtccgccaagaagaaggacgggccgtcccccgcgccggcgccgaacgcggccgcgcaggcggcggcggaggggaggaggtgcctccactgcgagacggacaagacgccgcagtggaggacggggcccatgggtcccaagacgctgtgcaacgcgtgcggggtgcggtacaagtccgggcggctcgtgccggagtaccggccggcggcgagcccgacgttcgtggtgtccaagcactccaactcccaccgcaaggtggtggagctgcggcgccagaaggagatgcagctcctgcaccaccaccagcagccgccgccgcacgtgggcgcgggcggcggcggcgccgccggagggctgctccacgtgacgagcccgctgctgttcgacgggccgacgtcgtcggcgccgctcttcgccggcgcggacgaattcctgatccataaccgcataagcccggactaccggcgccaggctacctag

SEQ ID NO: 11756 - DNA, 631 bp, Oryza sativa
  Clone ID: TFbOSC225j.C1.o10.np
accacctcacttcacttggggggcaagttgcaagtctcaagtttacaaatccacccctttcacaaacaaaccgaagcttcttctccacttcgtcccacacttcaacgcctcgcgatcgatcgccccaaatccccgccgccgccgccgccgccgcgaatcgccggatgcccgccgcccggggcggccggcgcacgcctattaacagtgaaatttggtaatcggcaaagacgtcatcggcttagaatcattatctgctgcagcatctcggaatcagccgatgggagttatcaagtcgccaatagtcggattcctgctatattcgcctgcttcttgattgccaataagggtatcatcggggttttagccgatttcatgacatcggacctccagccgatgtgtgctttaaacctcggatcgatgcttatttatcatatcattgctagccgattggtttataccggattatattgcaatattatattatcatcagccgattgcctttatatcatcatctacattggacatatagccgatttatcaaaaccctatcgctatcggctggtatcggcatcggctattatcgactatcggctggaactactctatcggcttgtcagccgatcggttgttt

SEQ ID NO: 11757 - DNA, 2448 bp, Oryza sativa
  Clone ID: TFbOSC400773j.C1.o134.fg
atgtcgctccggccgagcgagcggatggggatccgccagaagggctacaaggcgtcgatggacgcggcggaggggcggcggcggcgggaggacatcaccgtgatactccgcaaggccgaccgcgatcgcgccctcaaggagaagaggcggcgccccacggccaccgccgccgccgaggggttgccgcaggcggcgcactcgtcggccatcgagaagaagttggagagcctgccgatgatggtgcaggggttgtactcggatgacagcagcatgcagttggagtcgaccacgcagttcaggaagctgctctctgtcgaccattgtcctccaattgatgaggtgattagatctggagtgctccctcgctttgtggaattcctcaccagggaggagtacccccagctccagtttgaggcagcatgggctctcaccaatattgcttcaggaacagcagccaacacaatggcagttattgaacatggtgctgtgcccatctttgtgaagctcctcagctcaccaagagaggatgctgtctgggccctgggaaatgtggctggggattccacaaaatgccgtaacctggttcttatgcatggtgcaatgttaccgctactgcagcagctcaatgagcatgctaaactctcgatgctgaggaacagtgcctggaccctttctaacttctgccgtggcaagccgcagcctgacttcaagcatgttgaacctgcgcttccagtgctgcgggagctcatcctctctcaagatgaggagatcctaacggactcatgttgggcactctcttacctgtcagatggttctaatgacaatatacaagctgtgattgaaactggcgtgtgtgattggcttgttgagctccttagccatccttcacctgtggtgctcattcctgctctccgcacggttggcaacattgtaactggggatgatgcgcagacccagagtaaattaaccaaaactgcagatactggacaaaattatttgcaaaactacggatttaatccacaatactatggaaccacagatttagtgctgactttaagcatgtgtattgttggtcatccccaagcacttccctgtcttttcaatcttttgacaacaactcaaaagaaaagcgtcaagagagaagcttgctggacaatctccaacatcacagctggaactaaagagcagattcaggctgtgatcgattcaaacataattgctcctctattgcatctgttgcaacatgctgagtttgatgtcaaaaaggaggctgtttgggcaatttctaatgccacatctggtgggacattcaatcagatagagtatcttgttagtcagggttgcatcaagccgctttgtgatttacttgttcaccaagattccaaaacagtgttaacttgtttggaggcccttgataatatcttgagggttggggaggctaagaagaacttgggggcttgtaatatgaacatatttgtgccgatggttgatgaagctgatggcttggacaaaattgaggatctccagaaccatgacaatgttgagatatataataaggcagtttatgtgcttgagtcatactgggtgcaggaggatgaccaacagccctttcttattccatctgtatctgaatctgaatctgacaatgaaatgtttcagtttggcagtttcggtaaagtttcggtgaagtgcccgatttggatggaaatgcaccgtagctgtctgttcagggggctttccagaatcggagagtcaagttatccgagtcatggtttggtcctgctaacttgttatgaggcagcagtcaggcggttggttcatatggattatggttctccacacaagggggtgggtactggaaattggtcggtcggggaagggcatactcttgcttgtgttgtcgggttagctattacttttaccttcctttcagtagcgagaaaaaggttgcccgtgaatcgtgatacacaaagccgctgtgatgacgggacggatccagaattaggccctattacgcttccttctctcccttttctttcgtctcccctctcccctgttctcatgttctcactggtggtggggatcggcgtggcggaggaagggaggaggagctgcgtcgaatgccgcgccaccaccacgcccatgtggcgcagcggcccgaccggccccaggtctctatgcaacgcttgcggaatccggtaccggaagaagaggaggcaggatcttgggctggacctgaaccagccacagaagcaggagcatggtgaggtaatacctgaagtaaaagacagtaacagcaacagcaacaactgcaacagtgggagtggaaatagcagcagcaacttgcaggttgttccgaaaaggaggcttctgatgggtgtggaggaggctgcattgttgctaatgacattgtcgtccccatctgcatccacattgctacatggctga

SEQ ID NO: 11758 - DNA, 999 bp, Oryza sativa
  Clone ID: TFbOSC101253j.C1.o2.fg
atgtcccaccacgacggcagcaagccctaccagccacgccggggccccgagcgcccccctcctccggccccggcggacgatgcggcggcgcacgtcgcgcccacggtcgaccacctcgccgcggtggccgccgaggccgaggcgatggcccgcttcgaggaggagcaccgcgccctgggggcggaggaggagtatgaggaggaggaggatgagttggaggaggaggaggaggagatggaggaggatgaggacgcgcaacatcatgagggggtgggcggcgaggtggctgtcccgatggacgcggaggccgccgcgcagctggacccgcacggcgggatgctcgccgcctccggcgctgtccagcccatggcgtccaaccaactcaccctctcgttccagggcgaggtctacgtcttcgactctgtctcccctgacaaggttcaagcagtgctcttgctactcggtggaagggagctgaacccaggtttgggctctggagcatcgtcatctgcgccatacagtaagaggttgaattttccacaccgggtggcatctttgatgcggttcagagaaaagcggaaggagcgcaactttgataagaagatccggtattctgttcggaaggaagttgcacttaggatgcagcgcaatagaggtcagtttacatcttcaaaaccaaagggtgatgaagcaacatcggaattgacagcttcagatggctccccaaactggggatcagtggaaggtcggcctccctctgctgctgaatgccatcactgtggtataaatgcaaaggctacacctatgatgcgtcgtggacctgatgggccaagaacattatgcaatgcctgtggcctcatgtgggcaaacaaggttaaaatgccaagttcaaggtgtcatgccaacttggggatgttgagggacctatcaaaagcacctcccacacctattcaagttgtggcatcagttaatgatggtccatttttaagcagttgctga

SEQ ID NO: 11759 - DNA, 2355 bp, Oryza sativa
  Clone ID: TFbOSC400406j.C1.o1.fg
atggccatcgatggcttcctcctcctctccaattcactcgccgcagccgccgccgccttctcttctgcgctctcggctacttgtactcccgagatgcggcgccgcctggcaagcgggccccaggatcggtgtccccacacgtcagcgataagtgagggtacaggatacagtacgagatgggaaaggggggttggtggtggtgatgccatgatgcacatgctggtggcccccgatggaggcggcggaggggagatgccgccgccgtacgggggagccgcggcggcgccgccgccgccgatggagcaggagctggagctccaccgcgacaacgccgacgacggcctcgacggccacgtgcggtgcttgaggtgtggtatatccggcaacgcgacgccccatatgcgccgcggccctgatggcccaagaactctctgtaatgcgtgcggcattgcgtacagaaaggggaaaatgagacgaatgatagaagctgaaccacctatagatgaagctgcacttgctaagctggttcctgaggtaggcatggaatttgagagtgaggacaaggcctatgaattctacaacaaatatgctggacatgttggttttagtgttcggaaaagtacatcacacaaatcttccggaaatattaccaaagtaaggacttttgtttgctcaagggaaggttacaacagggacaaaaaatcattggaagcaaagaagccaaggctggatacaagaattggttgtccagcgcggttgattattaaagtcacaccagagagtaaatacagagtcactgacttcaaagcggaccacaatcatcagctggcccctccttcgacaatgcatatgttaaggtcacagaggatattgacagaacttcagtctggggaagcagaattgtcagatgattctgtcatgacacctacaacaaaagcaaccggtgatcttgttgtgagacaaattggtttccttcgaagtatctctctcctcccagcagattataagaattatctccgttcaaagcgtatgaaggctatgcaactcggtgatggtggcgcaatattgaaatatttgcagacaatgcaaatggaaaatcctgctttcttttacaccatgcagattgatgaagacgacaagctaaccaacttcttttgggctgacccaaaatctagagaagacttcaactactttggtgatgtcctctgtctagacacaacttacaaaataaatggatatggcagaccattgtcattattcctcggagtgaatcatcacaaacaaacaattgtttttggtgcagctatgctttatgatgaatcatttgagtcatataggtggctgtttgagagttttaagattgctatgcatggaaaacaaccagcggtagctttagtagatcaatctattccacttgctagtgcaatggcagcagcatggccaaatactactcaaagaacttgtgcttggcatgtatatcagaactctcttaagcaccttaatcatgttttccaaggttcaaaaacatttgcaaaggattttagcagatgtgtatttggctatgaggaagaggaagaattcttgtttgcctggagaagcatgctagaaaagtatgatcttaggcataatgagtggctgtctaaattgtttgatgaaagggaaagatgggctttggcatatgagagacatatattttgtgctgacataataagtgcacttcaagctgaaagcttcagtagtgttctgaaaaagttcttgggccctcaactggatttactgtccttcttcaagcattatgaaagagccgtagatgagcaccgctatgctgagctccaagctgacttccaagctagtcaaagttatccaagaatacccccagccaagatgttaaagcaagctgcccatacatataccccagtggtgtttgagatctttcgtaaagagtttgagctgttcatggactctgttctgttcagttgtggggaagctggggcaacctctgagtacaaagtcgctccctctgaaaaacccaaggaacattttgttagatttgactcgagtgactgctcctgtatctgcacttgtaggaagtttgagtttatgggtattccatgttgccatatgttgaaggtgctcgattacagaaatatcaaagaattacctcagagatatctgttgaagcgatggagaaggactgccaagtctgcaaatgaagaaaaccaagggacactcctgtttctaatatgcatgagaattcatttcgcagaagctcatgatgcaggtgacttgaatctaaacattattccttctgcacggtgcctgctccacgatactggcgttgaagcagtgaggtga

SEQ ID NO: 11760 - DNA, 876 bp, Oryza sativa
  Clone ID: TFbOSC900101j.C1.o2.fg
atggcgtcggcgacgtcgacgacgcccgacctgtcgctgcacatcagcctgccgagcggtggcgcggcggtggggacgacggcgccgccggggctggggaacggcggtgcggttggtggtgccggcggcggcaaggcggcgggtggtggtgacccgtggcggaggctggatggctccacagcgtcgacggagctgtcgctgtcgacgccgcagcagcagcaggagggcagtacatcggcggccgatgtgctgccgtggcggctgcggcagccgacggcggcggcggcgtccgtgccggtgacactgccgacgataccgatggatggagcgacgcccaaatcggtgctagagctgatggacgtcaaggatctgaccctagctcatgtgaagagccatctgcagatgtataggaccgtgaagagcactgacaagccagcagcagcctcagggccgatggacggcagcggctccggctccggctccggcgacgacgagctcctggccggcgatggaaggcaggcgacgtcatcgggcgccgatgcggaccggcggatgtcgttcaccgagcaccggtcctcctccgagggcgcggcgagccatgccggcggtggcggcgacggcgactgctcctcctctgccgtcaactccgacaccatcagagcgcgcagcaattcgccgagggggctgtgggctttgacctcagacctgatactagctgacatcctagaaatgtgtaaccaagggcctcttcctgtgttgctttgtcctttactttccttgccattactcccagtgtctactgatactgtagcagatatactgaggttcaataataggagaaatttatgtattgggcatcaaacattgtttttttaa

SEQ ID NO: 11761 - DNA, 425 bp, Oryza sativa
  Clone ID: TFbOSC31068j.C1.o1.fg
atggcgaccaccacctgcagccgcaggggagcgacgccgaagtcggtgctggagctgatgaacgtgaaggatctgacactggcgcatgtcaagagtcacctccagatgtataggacagtgaagagcacagacagatcatcccacattgcctcaggagaggcgcagctgcagcagcaggcaggaatggaggtggccatggaggcggcagctggaggaggaggaaatggtggtggtggtggtggtggggtggtgctaccgatgatgccggcatgtgacgacatggttgggatctgtagctcccctgcgccgcctgccgcagcgactagttccgctgctgcctacttcctctgcgcgacgacgacgtcaacagcaactgctccactggcagtagtgccatcgcctcctgctccaaccattcccacaag

SEQ ID NO: 11762 - DNA, 861 bp, Oryza sativa
  Clone ID: TFbOSC400549j.C1.o9.fg
atgggcaacctcgccgccgccgccgccgcctcctccgccgcagccggcggcggcggcgccggggacgccgggggatcgggcgacgggtacctctccgacggtgggctgctgctgtcctccggcaagcggcggcgcgcgcaggagaggaagaaagctgtcccttggactgaagaagagcaccgaacatttcttgctggtcttgaaaagctaggaaagggggactggaggggtatatctaagaactttgttactaccaggactccaactcaagtggctagtcatgctcagaaatattttcttagacaaactaatccaaacaagaagaagcgcagatcaagcctttttgatatgatggcaactgatatgtcaccagcaccaaactgccctgtcttgccaccatcaatgggaaaattacatgatatggtagctatgactaaacaactccagaacagcagtttggaaggagtctcatcttcaagcacagttaatctagcaccacaagttgcaagagatcttcctcccccaattccatcttttaaagcaacaaatgtagattcaagtctcagcaaaatgaaccacatggacggtttcttgagggcgcccatgctgttcagaccaattccaagaatcgctgaaggggcatcttcatcgactcctgcaactgcaagcatagctgatctggaatttcaagctaacctgactgcatgttctaatgcattattcgcgagtccgagaagaaagccaaagaaggcagatcctccagcagagaaggatctggatctgacagttgccccaccctcccaacaaaccagggccagtatttcttcccagaacgcagtaggcgtaattcaagtcgtatag

SEQ ID NO: 11763 - DNA, 798 bp, Oryza sativa
  Clone ID: TFbOSC422332j.C1.o27.fg
atggagcagcatgaggaggcagcggagaggaagccttcgccgccggtgatattccggctgttcggcgtcgaggtccgcggcggcggcggcggagttgacgaggaggagtacgaggaggaggaggtggagggtggattgttcatcaagaagagctccagtatgcccaacctcacctccatcgacccgctgccggtgccggccgacggcggcaaacggcgcgcctccgacgactccgagctcgcctccggccagcagaagcgccgccgccgcaaggtgcaggagaggaagaaaggggtaccatggactgaggaggagcacaagaaattcctggaagggctgaggcagctggggaaaggggactggagaggcatctccaagaactttgtgaccagcaggacggcgactcaggtggccagccacgcccagaagtacttcctccggcagaccaaccctggcaaaaagaagcgccgggccagcctctttgatgttgttgctgagtgcagtgatgatcagcttccaagtcctcagagtgttggaactaagcctcctacccaggatataattcatacagatcgcggcgatgtcccgatactaagctatccagttgctagaggctttagaggcgatagcgtgcaggttgatgaactaactgaatatgtgaagagattaaaggccgccgaggacatgtcgctctccatgatctctggactggaaatggcatcatcatccatcagcagtctagagctcagtatcgcgcctcctcattgcgcgatcgaggcggccatcaaggtgctgtga

SEQ ID NO: 11764 - DNA, 933 bp, Oryza sativa
  Clone ID: TFbOSC400601j.C1.o105.fg
atggcggcaacggcggcggtggcggcgatagcctcgtcggtgaaaagggcgaccaacaaccggaggaaacaacggcgcgccaaagtgcaatctggccgccagcatcggcagaggaagcggaggctcgtctggacagacgagctgcagaagatgttcagggaagcatttaaccagctctcgctgacacaaaatttgaattcttatcactctgttttgataataaagatccaagaggactatgaaaaaaatacccggtgcccacaaaaatactttaagttgatgaaattgatgattgatccgatgaatgatttaagtctaacccgagataacattgctagttatctccagaagcataagaaacgtcttcaaaaagaatatcagaaacatcagaatcttcttgaacaaaaagaccaacagttacctattgttgacaataccaataccagttctatccaacaaaaaaatatgcattatgaatcctgctacaatgaacatagtaacaagcaacccaagttgaaggaacccacgttgttgacagctaattatcatgggcttagaaacatgcatcatcatcacaaaaacatcatcaacatggaaccttccaatgtactgcggcctcctaacttgaacaatgcaaagggctttaatatgcccttcaacaaggaaggagtcgatgaagccatatatcagagccaactaatggcacatcaagtttatgcaaatcatgttgatgcaacagcacaaaccacctgggaagtaacgatgacgcaagatatgcgccccatatctcaagtacatcaacatggttgtgaaacaacacctgtcgattcctctaataatacaaatggcatatctgaaaataataattaccatgttgggaggaagaattctagagcaaatatggttggcatcctttggccattgttgagatag

SEQ ID NO: 11765 - DNA, 903 bp, Oryza sativa
  Clone ID: TFbOSC401371j.C1.o1.fg
atgggcccagataatggagcaaacaacaattccaacttggctgcaaggcaacgcttacggtggacaaatgagctgcacgaacgatttgttgaggctgttactcaacttggtggtcctgatagagcaactccgaaaggagttctaagaattatgggtgtacaagggttgacgatataccatgtgaaaagtcatttgcagaaatacaggcttgcaaagtacattcccgactcttcagctgatggtaacaaggctgaaaacaaagaccctggagatttgcttgctggacttgagggatcctctggcttacagatatctgaagctctgaagctgcagatggaggtccaaaagcgtctacatgaacagttagaagtacaaaggcagctgcagttgcgcattgaggcgcagggcaagtacctcaagaagatcattgaggagcagcagcgtctcggtggagtgaaatctgaaacacctgctgctggtgcttccgtcacattgccaagcgatcagttccctgattccgaaagaactgacccctcgactcctgcacctacatctgaatctccaactcaaggtgtaccttcgaatagggacaatggaggacaaaacgaagcaaccaagagcccccagcgcgatgattctctgtcccgccatgaaccactaacccctgattccaactgtcagcctggttctcctaccgctagtccaaagcatgagagggcagcaaagaggcaacgaggtaatggtgcagagttctcggaaactgacttcgcccttcctcattctatcttcgagtcgagttcggggtcagagttccaacaatgttccatgtcctactcagctgttgagttgggaagtttgaaggttgcgctttgtcgcggcgtcgacttctgctcatctgggtaa

SEQ ID NO: 11766 - DNA, 1239 bp, Oryza sativa
  Clone ID: TFbOSC401174j.C1.o9.fg
atggaggtggaccacgcggaccgcgacggcgcgcggcgccggtgccgcgagtacctgctcgcgctcgaggaggagcgccgcaagatccaggtgttccagcgggagctccctctctgcttcgacctcgtcacccagactatcgaggggatgaggagccagatggacgccgccggcagcgaggagacggtcagcgaccagggcccgccgccggtgctcgaggagttcatcccgctcaagcccagcctctcgctgtcctcctccgaggaggagagcacccacgccgacgccgccaagtcaggcaagaaggaggaggccgagacgtcggagaggcattcgtcgccgccgccgccgccgccggaggccaagaaggtgacgccggattggctccagtccgtgcagctctggagccaagaagaaccccagcagccatcgtctcctagcccaactcctaccaaggatttaccgtgcaagccggtggcgctgaacgccaggaaggccggcggagcgttccagccgttcgagaaggagaagcgcgccgagctgccggcgtcgtcgaccacggccgcggcgagctcgaccgtggtcggagacagcggcgacaagcccaccgatgatgacacggagaaacacatggagacggacaaggacaacgacaaggacgccaaggacaaggacaaggaaggccagtcgcagcctcaccggaagcctcgccggtgctgggcgccggagctccaccgccgcttcctgcaagcgctgcagcagctgggcgggtcccatgtagcgacgcccaagcagatccgggagctgatgaaggtggatggcctcaccaacgacgaggtcaagagccatttgcagaagtatcgtctacacacgaggaggccgagctcgacggggcagagcagcgccgcagccggcgtccccgccccgcctgcgccgcagttcgtcgtcgtcgggagcatctgggtacccccgccggaatacgctgccgcggccgccgcacagcagcacgtgcagcttgccgccgccggcaataatgcgtccgggagcgccaaccccgtgtacgctccggtggcgatgctgccggcaggcttgcagccgcattcgcatcggaagcagcaccagcagcagcagcaaggacagagacattccgggtcggaaggccggcggagcggggacgccggcgatggcagctcgtcctccccggccgtctcgtcgtcgtcgcagaccacctccgcttga

SEQ ID NO: 11767 - DNA, 1131 bp, Oryza sativa
  Clone ID: TFbOSC405568j.C1.o3.fg
atggtaattgatgaagataaatgccatgctgattctacaagctacatgctttctgcagaactcaacttttctgtcactgtatttacaagccccataaaagcactagactttcttcagaatcatgcagaaggtgttgatttggtgctggcagatgtccacatggaagagatgaatggttttgatttccttaaagttgcaagagagcttcataaatccattcaagtgattatgatgtcaactgaaacgacaatgtacacaatgaagaggtgcgtcaaacttggagctcaatttttggtcaataagccccttgatgctggaaccattaagaatttgtggcaatatgttgacttgaaagttctaagaatggagaagatcaaggacttgcttcaaggtattggagatgaaagcacttgtgccaatgaaacgaattctcttgctgaaaacccgaagaatgatactaagaagaaatattatctcatgtggactccacatctacagaaaaagtttttacatgctcttcaaatacttggaaaagatgcttcaccaaaaaatataaagaagatcatgggtgtggacaacattgattgtaggcaaattgctgctcatctgcagaaacatcgactacggctaacaaaggatttgaagaaagcatcatttacaacggataccagcaaggatgaatcaaattctagaatagggcctgcagagagtcatcacgtgtgccgcaacgcaagtacactgcagcctcgttccaacactcaacctacagaaacaaccatgcaaatcctctctgaagacgctgaatatgacgatgtttacgccgcgatgcgaagagccttacagtatgggattgtctttgatgagtccaagcattccagtgatccttctggtgatgaggatgaacaagttgtggtaggaggagatcaagatggatgtgccaatgaagccaatgacatagactcatctggtgatcatcatcaggttgctgctgttgtcactaaaccatgcaacgcaaatgcttcacaagagataatcaacaagatgactaattctgatggtatgcaagccaccaaaggaagcaaggcagcagttttccgccttgtggattattcagaatccgatagcgattag

SEQ ID NO: 11768 - DNA, 1068 bp, Oryza sativa
  unsure (1)..(1068): unsure at all n locations
  Clone ID: TFbOSC900405j.C1.o11.fg
atgtgcgtgcagggcgactccggcctggtcctcaccaccgaccccaagccgcggctccggtggacggtggagctccacgagcgcttcgtcgacgccgtcacccagctcggcggccccgacaaggcgacgcccaagacgatcatgagggtgatgggagtgaagggcctcaccctctaccacctcaagagccatctccagaaattcaggttagggaagcaaccgcacaaggagttcagcgagcactcagttaaggaagccgcggcaatggagatgcaaagaaacgcagcatcttcttcaggcataatgggcagaagcatgaaccatgaccgcaacgtgaacgatgccatcagaatgcagatggaggtgcaaagaaggctacatgagcaactagaggtgcagaagcatctgcagatgaggatcgaagcgcaggggaagtacatgcagtccatcctggagaaagcctatcagacgctcgccgccggcgatgtcgcggcggcggtggcgtgcggcccggcggggtacaaatccctaggcaaccaccaggcggcggtgctcgacgtgtgctccatgggcttcccttccctgcaagacctccacatgtacggcggcgccggcggcggccacctcgacctgcagcagcagcagccgccggcgtcgacgatggagagcttcttcgcctgcggcgacggcggcggctcgctggggaagacggcggcgaagacgaggcattacggcggcgccgggaagagcccgatgatgtggggcgtcgacgacgacgacgacgacgacgacccggccgggaagtgcggcggcggcggccatcatcagctgcagatgncncccccgccgatgatggacggcggcatcgacgtcatggactccctcgccgccgacgtctacgagacgaagccgatcatgtccggcgactcgacggggagcaagggcggcggctacgacgtcgcggcggcggcgtcgaagctggagaggccgtcgccgcggcggccgccgcagctggggagcccgtcggtgatggccggagctcagacgaggaacctatcctacgggtaa

SEQ ID NO: 11769 - DNA, 2070 bp, Oryza sativa
  Clone ID: TFbOSC412867j.C1.o2.fg
atggaggagaggaagggattgatggggagggagagggatcaattccccgtcggcatgcgggtcctcgccgtcgacgatgacccggtgtgcctcaaggttcttgagaccctcctccggcgctgccaataccatgtaacatcaaccaaccaggctattactgcgttgaagctgctcagggagaacagggacatgtttgatcttgtcatcagtgatgtccacatgcccgacatggacggatttaagctccttgagcttgtggggcttgaaatggatctcccagtcatcatgttatcagtaaatggagagacaaagactgtgatgaaggggataactcatggtgcctgtgactatcttctaaaaccggtccgaatcgaagaactaaggaacatatggcagcatgttgttaggaggaagttcggtaatcgtgagcgaaacaatcttgatttctccaaagaatgcaataagccgcaaagcgcggatactgatcatggaccataccaacctacctgtggttcttctgatcaaaatgggaggtccagcaggaaaaggaaagaactacacggcgaggacgacgatgaaggcgatgataatgattatcaagaaaatgatgagccctcagctgcaaagaagcccagagttgtatggtcagttgagctgcaccgaaaatttgttgccgctgtcaaccagcttggaattgacaaagctgtaccaaaaagaattcttgagcttatgaatgtggagaaactcaccagggaaaatgttgcaagtcatctacagaagtacaggctttacctcaagagactaggtgctgtagcatcacaacaagccagcattgttgctgcctttggaggcagagatccctccttcttgcatattggagcatttgaaggactccagagctatcaaccttttgcaccttctgctgctcttccatctttcaatccacatggcctgctaacccgaactagcgccgccgcggctttcggacttcaggagcttgctgccccctccagcacaattcagacttctacaggaaatgtcacagttggccattgcttggaagaaaaccagcaggcaaatctagcacaaggcttgaccgcggcgatcgggcaacctcagcttcaacagaactggattcatcaagaaggtaatggtctgtctgatgttttttctgggagttctctgaccaacactttgtccagcacactccaaagagttccaagcagttcattgccaccacaagaactcttggagtgcaaacaagccaaagttagcatgccgccatcgatacggataccgccttctagttcagcacttcttgagaggactcttggggtttccaccaatttgggagattctagtatatcccagcagggtgctcttccaatagatggtggattttctgctgacaggttaccattgcacagttcatttgatggcgctgttgcaacaaagctagatactagtttggcagcttcacagagagagattggccagcaggggaaattttcagttagcatgcttgtctccccttctgacaatcttgcattagccaaaaatgccaaaactggagctagttcttctggcagtactataattctccctcttgatactgcaagacattcagactacttgcagttcggaggtgcaagcaattctttgcagaaaatggatggacagaaacaagatcatatacagagctcaaacattatatggagttcaatgccaagcactcaactgccaagtgatacccaaattcataatactcaaaaccaaagattggacagcggaagttttaaccataatattggtgcccatttggctgaccaaacaaatgcaagtgcgtcaatacttccgcaaatgaagtttgacacaagaatatcagaagagaaaatgaagcagaagaatacatatgacttgggtagttcaaagctgcagggtggatttaattctagtggctgcaattttgatggccttctcaattccataatcaaagtggagaaggatgatctcccattcatggacaatgaattgggctgtgacctttttccacttggtgcctgcatatga

SEQ ID NO: 11770 - DNA, 1191 bp, Oryza sativa
  Clone ID: TFbOSC417054j.C1.o12.fg
atggtgggcggcggcagggagaggaacggcggcgtcaggcagtacaaccgatccaaggtgccgcggctacgctggacgcctgacctgcaccactgcttcgtccatgccattcacaagctcggcggccaggacaaggctacaccgaagcgagttttgcagctgatgggagtgggaggactcaccatatctcatgtcaaaagccatcttcagatgtacaggaacatgaggaatgatcttggaatgcaagggatacaggtgcaacaggtggatcaggagcacacatatggaggtggtgtggaagtttggactgatatgcagcagtgtgatcatgatgagtgtgatgtcccttgctgcagctgccactccccaaagcctagaaaggagccactgcttcacctccaactgaaaagcagtggcatgaatattgacgaaccaggcacgcgcgcacgcattgccgcgcccaatgtacgcagctgcagggacgacgccgcagcatctgcgacggagacgcgacgacgacgtggtgggaggccggaggaggtagacgacgacgcgaacgcgagcacgagccccagaattagccagctgcagctgctgcgtctcagaggccatggaatacgtgagagcgacatgtcaccgtcgacgagcctgcagtgctactatgtacgcagccagaggacgacgacgatgccgccgggcgctgctgctgcagcagccggcggcgatggcggatcacagtgctacgccgcacctcggtacagctcttcctccaagctgaaattcttggggttcgtggtgacatcggggcctcctcctcctcgtcttcctcctcctgctgcctgctgctgcggcagcgatgacaacatcccttttcaggtcggcacgtttgccccacaccgcgtcgcgccgccaacggcgagctgcggcggcggcggcggcggcggccgcgcggaggcgcgcccctcgtcgtcgtatcgctcggtgtggttcgaaccggccgccgccgccgccgcgagcaacaacggcgtggcgccggacggcgagcacgacgacggctgctcgctctcgctctcgctggcgttggacacgggatgcgccggcgccggcggcagcctggtctcgtcgacgacgtcgtcgtcgtcgggaagccggatcagcctcgacttgtcgctctccacgcttgactcgtag

SEQ ID NO: 11771 - DNA, 867 bp, Oryza sativa
  Clone ID: TFbOSC417459j.C1.o2.gm
atggtgggcggcggcagggagaggaacggcggcgtcaggcagtacaaccgatccaaggtgccgcggctacgctggacgcctgacctgcaccactgcttcgtccatgccattcacaagctcggcggccaggacaaggctacaccgaagcgagttttgcagctgatgggagtgggaggactcaccatatctcatgtcaaaagccatcttcagatgtacaggaacatgaggaatgatcttggaatgcaagggatacaggtgcaacaggtggatcaggagcacacatatggaggtggtgtggaagtttggactgatatgcagcagtgtgatcatgatgagtgtgatgtcccttgctgcagctgccactccccaaagcctagaaaggagccactgcttcacctccaactgaaaagcagtggcatgaatattgacgaaccaggcacgcgcgcacgcattgccgcgcccaatgtacgcagctgcagggacgacgccgcagcatctgcgacggagacgcgacgacgacgtggtgggaggccggaggaggtagacgacgacgcgaacgcgagcacgagccccagaattagccagctgcagctgctgcgtctcagaggccatggaatacgtgagagcgacatgtcaccgtcgacgagcctgcagtgctactatgtacgcagccagaggacgacgacgatgccgccgggcgctgctgctgcagcagccggcggcgatggcggatcacagtgctacgccgcacctcggtacagctcttcctccaagctgaaattcttgggcctggtctcgtcgacgacgtcgtcgtcgtcgggaagccggatcagcctcgacttgtcgctctccacgcttgactcgtag

SEQ ID NO: 11772 - DNA, 606 bp, Oryza sativa
  Clone ID: TFbOSC415628j.C1.o3.fg
atgcggtggccggaggagctgcaccgccgcttcgtccacgccgtccgccgcctcggcggatgccacgaggcaacaccgaagcgaattatgcagctgatgggcgctaagggagtcagtatatcgcacgttaaaagccatcttcagatgtacaggaactccaacaacagtagcaatgttaaccgtcgtcatcctgtcaccccacaaatcgattggacgacgacggcgcagcaggatgaacagcagagacgacagatgagcagcttcagcttccttgcaacaagaacggtgccagcagctggaattgggagccatagccaccagagacctcaccggcggcaagcgctgcacgccggagacgacgacggctgcgagctgacgctgtcgatcagcggcggcgccgctgaagaatcgaaagacggtggctcgagcatcaccgacgacgacgacgagcttctgatccagccaccggcgcctaacatcatcaacgacgacggatcaacgcggcatggtcatcgtcatccttttgcttgttccacacagccgctgccgccggcggccattaaccttgaacttacgatttcttctccttgctgctggctcacctag

SEQ ID NO: 11773 - DNA, 1404 bp, Oryza sativa
  Clone ID: TFbOSC900208j.C1.o22.fg
atgagcacacagagtgtcattgctgtaaagcaattcagtggccctgacaaaatcgcacaagcatacactgttccacagccatcagctcatgtgctctccaacgctaactatgactatgatctctgtggttcaacaaatagtacctcattatcatgtgctatccaatcctcaaacattaagaccgaatcaatcagttcatctagcctgccaaagatccttccatttagtactgactcaaatggtgaaagttcactttctcgcatgtcgcaagccgagttttcggacccaattttgtctagttcttctacattttgtacaagtctgtacacctcatcaccgatgaactctggttcatgccgaaaaaccggttatttgcctttcctgccacaacctcctaaatgtgagcagcagcagaattcagctgggcaatcatccagctctctgatgctccttgatgctgatctcagaaatagtggtcatgctgatgatgaacacacagatgacctcaaggactttcttaacctctcttcagattgtagcttccatgggaaatgcagtgccatggcttataatgagcagatggagtttcagttcttgtctgaacagctcggaattgcgatctcaaacaatgaggagagtcctcggttagatgacatatacgacagaccaccgcaacttatgtctcttccagtgtcatcttgctctgatcaggaggatctgcaggatgcaagatctcctgctaaagttcagttgagttcatctcggtcttcatctggaactgcatcatgtaacaaaccaagactgaggtggacaccggagctccacgagcgtttcgtagatgccgtgaacaagcttgaagggccagaaaaggcaactcccaagggtgttctgaagcttatgaaggtagagggcttgaccatctatcatataaagagccacttacagaagtatcggcttgcgaagtatcttccagagacaaaagaagacaagaagcaagaagaaaagaaaacaaaatcagtggctaatggaaatgatcatgcaaaaaagaagagtgctcaaatggcagaagctcttcggatgcaaatggaggtccagaaacaactccatgaacaactagaggtacaaaggcaattacagctgcgcatagaggaacacgcaagatatttgcagaagatattggaagaacaacagaaagcaagagaatccatatcctcaatgactagtacaacagaaggagaatctcctgaattcgcaccgatggagaaaaccgaggacaaagcagaaacctcttcagcacctttgtcaaagtgtagaattacagatactgatgcagaatgccattcaaaagttgataataaaaagacaaagcctcaggctgatcttgaaatggtgcatgacgaataa

SEQ ID NO: 11774 - DNA, 750 bp, Oryza sativa
  Clone ID: TFbOSC400570j.C1.o9.fg
atgtttgaggggtgctacggcggagtcgggtcggcggcggcggcggcggcgcgggacccgaagccgcggctgcggtggacgccggacctccacgagcgcttcgtcgacgccgtcaccaggctcggcggcccggacaaagcaacacccaagtcggtgctcagattaatgggcatgaaaggcctcaccctgtaccatctaaaaagccacctccagaaatatagactgggaaggcaaagcaagaaatcagcaggcctggagctagcagtagcagatagtggtgatgcgctaaagtatcaagtcgaagtccaaagaaaactgcaagaacaacttgaggttcaaaagaagctgcagatgcgaatagaagcccaagggaggtatttaaaggaaatactagagaaagctcagaaaaacatttccctggatgcaaatgggtctgctaacctctcatcaaccagatcacagattacagacatcaacctagctctttcaggtttcatggacaatgcaacacaagttcaggaggaaaacaatgaactgatgaaacctatatctgatgacaacctaaaagttaataatttgggctttcagctctaccatttaggaagtcaggagagtaaggatgttaagtgcactccaaaaactgaagagttgcttctactagacttgaatattcaaggaggatatgaactctcttctagaggaatgcaagggtgtgagttggatctgaagatcaaccagcagagaagatag

SEQ ID NO: 11775 - DNA, 1053 bp, Oryza sativa
  Clone ID: TFbOSC400084j.C1.o5.fg
atggccgtgtttggagaagctttagcagtaaagcttctttcagagccttacgtgcaaagaagcattgctttgaagtggcaaagaggatgccaaatgtatgaaccaaagcccttctcaagcattgtactagctcacaacgatccagtttcccacaatcaacaaattgaacgtattaacaacaatgtagtatctaatagtggtgggaacagctcaaacagcaactttgccgccagacagcgcttacggtggactgatgacctccatgatcgttttgtggatgctgtaacacagcttggtggacccgacagggcaactccgaagggaattcttagaataatgggtgttcaagggttgaccatctatcatgtcaaaagccatctgcaaaaatatcggcttgctaaatacattccagatcccacagctgatggtgccaagtctgacaagaaagatctcggagatttgcttgctgacattgaaagctcctcgggaatggaaataggggaggctttaaagttgcagatggaggtgcaaaggcagctacagctccggatagaagcccaaggaaggtacctccagaagatcattgaggagcagcagcggctcagtggtgtgctgggtgaatcaggcaagttaggcgccctgggaccagctccaggggagccataccaggattccaacaaaaccgacccctcgaccccggtaccgacttccgaatccccaatccgcgacaaggctggaagcggcttgttcaagaccatttcttcgcacgacgactgccgcgagcctttgacaccggactccagctgccgtgccggctcccctttggagagcccccccagggctagcaagaggatccgggtcagcagcgacattgatcatcgtgggaacaatgagttcccccctcctctcaaagttccggagccaagttcaggttcagatttccgacaggaaagctcagtgttattatcatccagcgcagtgcacttcgattctttggagagcctggatgcagatgaaaatgtcttcaccaatggttcaggcagtgatgattga

SEQ ID NO: 11776 - DNA, 1179 bp, Oryza sativa
  Clone ID: TFbOSC402805j.C1.o18.fg
atggagcggcatctgtttctgcatggaggaaatacacaaggagattctgggctggttctctcaactgacgctaaacctaggttgaaatggacacctgagttgcatcagcgatttgtagatgcagttaatcaattaggtggagcagagaaagctactccaaaaacagtcatgaggctcatgggcattccaggactcaccttataccatctgaaaagccatctccagaaatacaggctcagtaagaatctccaaggtcaagctaatgttgggacaacaaagaatgcccttggatgtacaggtgttgctgataggattcctggaacaagtgcattagcgatggccagtgcaagcgccattccacaggcagagaaaactattcaaatcggtgaagcactacagatgcaaattgaggtgcagaggcagctaaatgaacaacttgaggtacaacggcatctacagctgcggatagaagcccaagggaagtatctgcaggcagttcttgagcaagctcaagagacccttgggaagcagaacttgggccctgcaagcctggaagatgcaaaaataaaaatatcagaactggtctcacaagtttcaaatgaatgtctcagcaacgcagttacagaaataagagaaagttcaagtatacacagactagagccaaggcaaatccagtttgttgaaagttcagccaataactgtttgactgcagctgaaggattcaaggagcataggctacaaaaccacggggtactcaaagcatatgatgatagtacattattttgccgaaaacagtcccaagatcaagaatctcaatattcccttaacagaagcttaagtgagcgtagaatgggtcatctgtatagcggtaaacagtatcacaaatcagagggaagtgacagtgatacagaggttctacatgagtatatcacgcctcaaaagaatggcggaggcagcacaaccagttcaacatcaggaagcaaagaaataaatgtagagaagctatatcttgatgaaccaagctgcaaaagacaaacagttgactatcaaagagaaagcaagctactagattttgatcaacaaagttcagggaagaatcttgatctaaatactcacaatatagatgataacgatcaaggttatagacattttgacttgaacggcttcagctggagttga

SEQ ID NO: 11777 - DNA, 879 bp, Oryza sativa
  Clone ID: TFbOSC404146j.C1.o1.np
gtccctagtaacggagggaacaataaccctaatatggcggcaagacagcggttacgttggacaaatgagttgcatgaccgtttcgtggaggctgttactcagcttggtgggcctgatagagccactcctaagggagttctgagaattatgggtgtgccaggactgacaatataccatgtgaaaagtcacctacagaaataccggcttgcaaagtacattccagacccttcagctgatgacaacaaggatgaagataaagatccagggaatctgctttctgcacttgaaggttcatctggaatgcagatatctgaagccctgaagctgcagatggaggtccagaagcggctacatgaacaattagaggtgcaaaggcagctacagctgcgaattgaggcgcaggggaagtatctccagaagatcatcgaagagcagcagcgtgtcattggtgcaggagcttccagagccacgtcaagcgaacaattgcctgactctgagaaaactaacccaccaactccagtaccaatttctgaatctccagttcagggtgcaccccatagcaagaacagtcaaagccaagttgagccgacgaagagcccttcgcatgatgatgctctcccgtgtggtgaacctttaacacctgactccagctgccggcctggttcaccgacgctcagcccaaagcatgagcgtgcagccaagagacagaggggcagtgatgcaggcgatgtcacagcattcgcagatggagaatttgtacttccaccaggcatctttgagtcaagcacaggatccgagttcctgcaagcttatgcacatcttgatgctcctatttttggcacgaagaaatcccttcaaccgtgccagtacgtcaatctt

SEQ ID NO: 11778 - DNA, 2085 bp, Oryza sativa
  Clone ID: TFbOSC22451j.C1.o8.fg
atggcggcgacgcaggcgacggccgccagaaaattcccagagggtttgcgcgtgcttgccgtcgacgatagccccgtttgcctcatgctcctggaggcgttgcttcgccggtgcaagtaccaaccgacgatgacgagggacgcggcgacagcgctacggatgctccgggagaggccgggggatttcgacctggtgattagcgacgtgcacatgctggacatggacggcttcaagcttctcgagctcatcggccttgagatggatctccccgtcatcatgcaatccgcaaatggggagcttgaaactatgatgaagggcgtgacccatggggcatgtgactacttggtgaaaccagtgagcctcaaagacatccagaacatatggcaacatgtgtggaggaagagaaagcttgacataaggaaccacaatggcggttacaacgacggcggtgagctggttggcgcgacgcggaccaagaggaagtacacaaggaagatgagaaatgatggagataattatggtgagaacaaagagaacatggattcaactctgaagagacaaagggttgtctggacacctgagctgcaccgggactttgtcattgccgtccatgagcttggagttgatcgtgctgttccaaggaagatattgcggatgatgaaagtggactacatgaccagagagaatattgcaagtcatcttcagaagtatcggttatacctgaaaaggatcagcactcaaacaggcatggatcctgatcaatttcctgaaaaatggaagtatatgaatgaactggatgctctgaaaaattactgtgaaaatgggagataccgtctaaccccagccattgcctcctcaagctcgagcaatccatttgcaaggatgaattctgcatctgcattggcaacaaatggctttctgcccactcactcagttcagctcaagaacagccagagaaacatggccatggggacagttggccatggtggaagcccgggcaacaatcctgtgtttcagccactgcagaactcatcaaatgcaagaaagtgcttcccatctggcccatctgggagctcatttgcaaacatatcaaatggcttggtgttggatacagacgattctggtagctcatatgctggcatgttctgtaagagtatgtgggagacaagcaatggctctccatcttgccattctggcaactcgtctgcaaacaagtcaaataatggggtttcggcgcctgcaaatcagtttcaagtacagtcaaagtttgggttttcagctcttgcaaatcagtttccagtgcagtcaaattgtgggttttcggcgcctgcaaatcagtatcaagtgcagtcaaatggtgggttttcggtgcctgcaaaccagtttccagtgcagtcaaatggtgagtttttggcgccaacaaatcagtttccagtgcagtaccctgaagtgaataatcagcctttggttcagatgaatcaatcttctacaaaccacttcagcacaattggcaatgattaccaatttccggaccttgcaaactgtagcaaatactggcaacctacagcaccatcgatgtttcctgatcttggtcacaatgatgggacatctttccgcccgtcgcaggcgaacatcgccaatatcaaccagctctcaagctttgcagcctccagtggccaggaaccgatgtttggagatgaactacatggtcaaatgtcaccaatcatgagcaccatatcactgtcagatttcgatgatcagatggggtcattcaacataggaaacgacacaagcccagcagagatgatgcatgacaacttctcacttggtagtgactcgaacatcagttcttcaacaccaactgattcaagcttcggttctacatttcctgactttcatctcgacagccctgagatgccggctcagatgctgaatggtggggatgaagatggcattcttctccctgtgctcgatgacacagttgatcagcaagatctttttgatcaactagatgaaaacaatggtagggaaaaacttggtagtggccgatgtgttaggaagggtccctttgaatgtttcttttag

SEQ ID NO: 11779 - DNA, 2076 bp, Oryza sativa
  Clone ID: TFbOSC6952j.C1.o2.fg
atggcgccggtggaggatggccgcggggtggagttccccgtggggatgaaggtgctggtggtggacgacgaccctacatgcctcgccgtgctcaagaggatgctcctcgagtgccgctacgacgcgacaacttgttctcaggctacaagagcattaactatgctgcgagagaacaggcgtggttttgatgttataattagcgatgttcatatgcctgatatggacggattcaggttacttgaacttgttggccttgagatggatctcccagttattatgatgtctgctgattcaaggacagatatcgttatgaaaggaataaaacatggagcatgtgactacttaattaaacccgtcagaatggaggagttgaagaacatctggcaacatgttataaggaaaaagtttaatgaaaacaaggagcatgagcattcaggtagcctagatgatacagatcgtaccagaccaaccaataacgataatgagtatgcttcatctgcaaatgatggagctgaaggtagctggaagtctcagaaaaagaaacgggataaagatgatgacgatggtgaattggaaagtggtgacccttcttctacatcaaagaaaccaagagttgtttggtcagttgaactccaccaacaatttgtaaacgcagttaatcatctggggatagacaaagctgttcccaagaaaattttggagttgatgaatgttcctggtttaactagggaaaatgtcgccagccatttgcagaagttcagattgtatctgaagaggattgctcagcatcatgccggaatagctaatccattctgcccgcctgcttctagtggtaaagtaggctcactgggaggacttgatttccaagctttggctgcctcaggtcagatccctcctcaagccctggccgccttgcaggatgagctcctagggcgacctacaaatagtttggtattgcctggaagggaccagtcatctttacggcttgctgcagtcaaaggaaacaagccccatggggagagagaaatagcatttggtcaacctatatacaagtgccagaataatgcatatggggcattccctcaaagcagtccagctgttggaggaatgccttcattttcagcttggcccaataacaaacttggtatggcagactcaaccggcacattgggaggcatgagtaattctcagaatagcaatatagtcttgcatgaattgcaacagcagccagatgccatgctgtcaggaacccttcactctctagatgtcaaaccttctgggatagttatgccttctcagtcattaaatactttctcagccagtgagggtctctcccctaatcaaaataccttgatgatacctgctcagtcatctggttttctagcggccatgcctccatccatgaagcatgaacctgttcttgcaacttctcaaccatcgagtagtctgttaggtggtattgatttggttaatcaagcttcaacaagtcagcccttaataagtgcccatggaggggggaatctttctggccttgtaaatcgtaatccaaatgtagtaccttctcaagggatcagtacttttcatactccaaataatccatatttggttagtccaaattctatgggaatgggctccaaacaaccacctggtgttcttaagacagaaaactctgacgctctgaaccatagctatggttatcttggtggtagcaacccccctatggactctggcttactctcttcacaatcaaaaaatacacagtttggtttactgggtcaggatgacatcactggtagctggtcgcctctgccgaatgttgacagttatggtaatactgttgggctaagccaccctgggtccagttcatctagttttcaaagttctaatgtggctcttgggaaattgcctgatcaagggcgaggaaagaatcatggatttgttggtaaaggtacttgcattccaagccgctttgcagtggatgagattgaatctccaactaacaacttgagtcacagcattggaagcagtggagatattatgagccctgatattttcggatttagtggacagatgtga

SEQ ID NO: 11780 - DNA, 855 bp, Oryza sativa
  Clone ID: TFbOSC409883j.C1.o6.fg
atggagagggcgggctacggcgtcggcgtcggcggcgcgggggcggtgggagccggggtggtgctgtcgcgggaccccaagccgcggctgcggtggacgcccgacctgcacgagcgcttcgtcgaggccgtcaccaagctcggcgggcctgacaaggcaacccccaagtcggtgttgagactgatgggcatgaaaggtctcaccttgtaccacctcaagagccatcttcagaaatataggcttggaaagcagaacaagaaagatacaggcctagaagccagcagaggagcatttgctgcacatggcatcagttttgcctctgctgcacctcctaccatcccatcggctgaaaataacaatgcaggagaaacgccactggccgatgcgctgcggtatcaaattgaagtccaacggaaactgcacgaacagcttgaggttcagaagaagcttcaaatgcgaattgaggcccaagggaaatacctgcagacgatactggagaaagcccagaacaacctctcctatgatgcaactggaactgcaaacctcgaagcaaccagaacgcagcttacagatttcaacctggctctttcaggattcatgaacaatgtttcacaagtgtgtgaacagaacaatggagagctagcgaaagcgatatctgaagacaatctcagaactaccaatctaggctttcagctctaccatggaattcaggattccgacgatgtcaagtgttctcaagatgagggcttactgctgctagatttgaatatcaaaggaggaggatatgaccatctgtcctccaatgccatgcgaggcggcgaatccggtctgaagattagtcagcacaggaggtaa

SEQ ID NO: 11781 - DNA, 537 bp, Oryza sativa
  Clone ID: TFbOSC404146j.C1.o3.fg
atgggtgtgaagggtctcaccctttttcacttgaaaagccaccttcagaaatacagattaggaaagcaatctggcaaagagatggcagagcaatcaaaagacgcttcttatattttgggagctcaaagtggaacaaatctatctcctacagttccaactccagatttgaaagagagtcaagaactaaaagaagcactcagagcacagatggaagtgcaacgaaaattgcatgaacaagtggaggtccagaggcatgtacagatccgaatggaagcgtaccagaactacatcgacacgctactggagaaggcatgcaacatagtatctgagcaactgaatggcttcagcatatctgaccatgatctaacctctgctggtgtcatgttgagctcttcagacaccttgagcccctccatcttccaccagctctctgtcagctcgatcagcctgcacagtcccggaggcaaatcctccccttttgcagctgatgctgacctgttctttcagaaggcgcctgaaaaacgcaagtcatattga

SEQ ID NO: 11782 - DNA, 900 bp, Oryza sativa
  Clone ID: TFbOSC900288j.C1.o13.fg
atggccctgcaggctgcagccctgctctctttctttctttctttctttcttttttttttctttctttcagttcttgcttctcccgattatccttgtaaggggaacctctgctctgactgcattctcatgatgtaccatgcaaagaagttctctgtaccctttggaccgcagagtacacagagtaacgagcatatgagtaatattggagcttttggcgggtcaaacatgggcagccctgctaatcctgcagggagtgggaaacaacggctacgttggacctcagatctccataaccgctttgtggatgctattgctcagcttggtggacctgatagagcaacacctaaaggggttctcactgtaatgggtgttcctgggatcacaatttatcatgtgaagagccatttgcagaaatatcgccttgcaaagtacataccagaatctcctgctgaaggctcaaaagacgaaaagaaggattctagcgattccctctctaacacagattctgcaccaggaatgcaaatcaatgaagctttgaagatgcaaatggaggtccagaagcgactccatgaacaacttgaggtgcaaaggcagctgcagctgagaattgaagcacaagggaagtacttgcagatgatcatagaggagcagcaaaagctcggtggatcactcaaagcttgtgaggagcagaagctaccgcattcaccaccaagcttagatgactacccagatagcatgcagccatctccaaagaaacccaagatggacaacctgtcacctgattcggtacgggatgtgacacagtcagattttgaatcccatttgattggtccttgggatcaagaggctgcattccgagtggatgaatttaaagctgaccctggtctgaacaaatcataa

SEQ ID NO: 11783 - DNA, 656 bp, Oryza sativa
  Clone ID: TFbOSC11575j.C1.o2.fg
tggcgaccccgaagcagattcgcgagctgatgaaggttgatggattgaccaatgatgaggtgaaaagccatctccagaagtacaggttgcacacaagacggccgatgccgtcgccggcgccgccgacggcagcgacgccgcagctggtggtgctgggaggcatctgggtgccgccggagtacgcgacgcaggcggcggggccggccatctacggcgcgcacccggcgacgcagccgcactacacggcggcggtggcggcgcaggagtactaccaccaccaccaccaccacctgcagcaccaccccgccgccgccgccctggtgcaccaccgcgccgtagccccgcccccgccgctgccgcctcagcagcagctggcccctccctacagcgccaagtcgtcggcgtcggcgaggctcgggtccccggactccgacggccgtggcagcggcggcggcggcggcgccgccgcctccggagccggaagggacatgtccgagagcatcgaggaggaaggcgagggcgaggagcgggaggacgacgacgacgacgacgagatggcggcgaccaacaacgcccacgccgtcgacggcgacgacgacaacgacgagatcaacaccaccaccaccacgagcgcgggagcgataactactaattaa

SEQ ID NO: 11784 - DNA, 265 bp, Oryza sativa
  Clone ID: TFbOSC101630j.C1.o11.np
tgtcgcgacgtccctctccgtcacagatcggagagatgagctcggcggtgcgaggagaacgacgagcaggggcggcaacgaggttccctctctggcgtctcacgcgcggggccaccaagcgcgaggtcacgacccccacagcgcagtcgcatcgttcttccccgcgtcactcgacagcttttctaacgaagaacgcgtgcccaattttggctacatgaaccttgttcggtcacactccaagccgagctggtgcagaatctcgggt

SEQ ID NO: 11785 - DNA, 2559 bp, Oryza sativa
  Clone ID: TFbOSC900310j.C1.o4.hg
atggggtcgtcgtcggcgtcggcggcgcagcacgaggaggcggcggcggcggcggccttcgtcctcggcggcgtcgacatgcggatgctggcggcgaggacggcgacgggcgcgctggcgagggcgggcggcggcgaggcggcggcggcggcggcggcggcggcgaggttcgaggattgcatccggagcctcgaggccgagaaggccaagatggaggtgttccgccgcgagctccccatcagcgtccacctcatcgccgacgtgatcgagtggctcaaggacgaggtggagaagcagcggctgctacggcggcggcaggtggaggctccggcggcggcgccgccaccggagatgttcgcgccgccggcgacggcgaagaggaagtcggcggcgtcggcggcggcggagggggtgaaggcggaggcggacgcgaacgacaagcggagctggatgagctcggcgcagctgtggagctgcgggagccacacaagcaccagcaccagcaatggcggcagcgtcaagaagcagcagcacaaggtgtccaatgcgttcatgccactggccaccttgccggcgtttgcaaaatcactggagaaagccgacgccgccgtgccagacctgtccctctcctcccgggtggcgatggccgacgccccggcatgtccggcggcgccgagcgccaccagcagcgccgtcacggatgtcgctgtagcgcagcggcagcaggcggtgcaacggaaggccagacggtgctggtctccggagctccaccgccggttcgtcgccgcgctccagcgcctcggtggcccacaagctgcaactcccaagcagattagggagctgatgaaggttgatggcctcactaatgatgaagtcaaaagccacctgcagaagtaccggctgcacacgcggcgggcatccgacggcggtgatggtggcggtgaccatcagacggttggcggccgtctatggccgctgccaccggagcaatacaccacctcgcagcacagcacatcgcagtctggctcgccgcagggccccctccagctcaccgtgtcgtcgagccacgccgtgtcagtgaccgccggcgatagctgcgacggcggtgaggaggaagaggaggacgggaacccaatccacagtggtagtgaggggaaaacctccacgatttctcgcgccgccgccgccgccgccgccgtttggctgagcacctcgccgccggcgctattccccaccggggaaacctcgccggcgtgtctgtggagatttctgctgcgagggaagcttcttcgtcgactccgccggtgcggttgcggttcaggagctcgccgagcggcggcggcggcgatgagggaggcggtgacggtgcaggtcggcggcttcgccaactacgtcggctcccacttctggaacttccaggatgagttgctcgggctcgccgacgaccccgacgccgatccggtcttcaagaacgccgcgctggacatggacgtcctctaccgctccggcgagacgcaccagggtgttgctacctactgccctcgtctggtgtctgttgattctcgagggtctcttggctctttgagttcatccggtaatctcgactttgacaagttcgataactatggcagcgcacaagaggttgtttcagactggtcgcaaatagaggaaatgaatgagaggctaaggttctttgttgaagaatgtgaccatattcagggcatccagtttattgtggatgattcaggaggtttttccagtgtagctgcacagtttttggagaacattgctgatgattacacaaatacacttgtattgctttactgtgtgagggatccaatgacccttggaccatccaggaggaatcaaagggagtccattatgagagctcttcatgatgctgtttcattttcaaaactttcgtccttttgcaacctgatgaacatggttactgctctggatgtagcgatgcctgccccttctttgacagatagagatgctatggggaacatagagatgaagctgcactctttgacccctgaaatcagcgatgaggacgaagatccttattcagttgaatcgctagtggttcatggagctcttgatagaggcgggcaaaggacttccatatcacaagtgaaggactcggtatgttcagtctacgaagccagagagacaaagccaaaattttcccatctctcagcatctctttgccccctccctgtcccccttccgttcccgtcaatcttcagaggcaacattggccggcacggggagatccttagtgaccatacagaagaatcccagccaaagggctcacttgacatcgaatcgataccaatggcggcacggttacgatcaagcagcgccgtcctgcctttcatagagaggcgatcggggagcctccagaagcacggtgtcgcgagaggcgccatcgggtctctggtcctccatgactggggcttcgggagggaggaggtggaggacatgggggagcacctagcgaagttgctccgcccgtttcaccctgaaatggatcttacttcggattccgactag

SEQ ID NO: 11786 - DNA, 1659 bp, Oryza sativa
  Clone ID: TFbOSC401249j.C1.o76.fg
atgcggcggagcggagccccgccacaagaaaattactcggagagccgcgtgcgtctagttcagataaacctcgcgtacagtgcattcatcccgacagattggaacaacttggagacagctgagtcaaggcctaaatccacgggattaaacaaggttcgagccttcgaggagccaatgaggcgagcatgttctgctgccccttcagggtttcagaagacgagcttgcgaattccatccccctccacccacgaagcaccaaccggcgcgcagcaaaagaccagaaaattaaagccaggagcagaaaacaaccaatcatatcctgttggagtgcgtctttacaaactagagctggagactaaaaagaaccagataagcaaagaaaatgatagcgaggatatcatgaacaccaagaagattaagctgcacgactgccacttcggctcgccgctatgtgacccttcgccggcgccgcacctgctgagctccgccgccgccgccgggctgtcgttccacccggggctcgtgagctcggcggcgcagcaccagcagcacggcgcgggcggctggctgcacgaggagtactacgcgccgaggtcgtcgccgccgtcgtcgcttctcgcgcagacctgcgtcggctccaacgcgaccgcgttctacgccgccgagaacctgccgcagttcgacttcccagctctcggtacggcggcggcggcggcggccaaggcgccgttccggtcgtcggagagcgagctgtaccggccggtcgacccgctgctcctccgtgcggaccactcggtgaggacgtactacgtccggccgcagaagcgggattccggcgagaggacaccattgccgccgccgtcgcagcaacagcatcaggacagaatccacgggctcttcgccggcgctcccaccactcggcttctcagcggcgaacccaaaatccactcgtttccacctcaagtggcggcgaagccgattctgccggcgatggatgcgccgagcctgcagaaccagatggagaatcagctgacaaggaactgcatcggcgcggcaactccggtgacccccaccggaaacctcgccggatcaggtgcgccgagcaagacgcggatcaggtggacgcaggacctgcacgagcggttcgtcgactgcgtcaatcagctcggcggcgcagacaaggcaactccgaaggggattctgaagctgatgaattcggatggcctgacgatctaccacatcaagagccatctccagaaatatcgcatagcgaagtacatgccagcgtcatctgaagggaagcaactggagaaaagagcaacaggaaatgacatgcagaatctggaccccaaaactggaatgcaaatcacggaagcactgcgtgttcagctcgacgtgcagaggcgcctccatgaacagctagagattcagagaaatctgcagctgaggatagaggagcaggggaagaggctgcagaagatgttcgaggaccagctgaaggcgagcaggagcgtgatggaaccgcaggagctggacgacgtcgtcgccttcgccgccggcgacggagacgacgacgcgttcgatgacgtcgacgtgcagctgctggccgtcgctggcagcggctatgacgacgccgggttccagtccaaaataagctag

SEQ ID NO: 11787 - DNA, 996 bp, Oryza sativa
  Clone ID: TFbOSC900221j.C1.o21.fg
atgagggaggaggaggaaccgagctggttcgcgcggtgggaggagcagctgccggcgccggacgagctgatgccgctgtcgcagtcgctcatcacgcccgatctcgcggtggccttcgacatcccgacgcatgggggtggtggtggtggtggggtgggcgggggtgttgtcgggggtgatggggtgggaggtggaggtggtggtggtggtggtggtggcggtggcgtgggggcaggggagatgaacggcggggcgtcgtcggcggccgggtcgagcggcggcggcggcggcgggggaggtggcgacgagccggcgcggacgctcaagaggccccggctcgtgtggacgccgcagctgcacaagcggttcgtcgacgcggtggcgcacctcggcatcaagaacgccgtccccaagacgataatgcagctgatgagcgtcgatggcctcacgcgcgagaacgttgcgtcgcacctccagaagtaccgcctctacctcaagcgcatgcagggggtcggcaacggcggcggcggcggaggagggggcggcgccggcgccggcgggagccactcctccggctccggcacggacgccgccacggagcacctcttcgccaccgggccggtccccttcctcccgcccggccgcgcccccgccggcggggacccgtacccgccgttcgcccccatgggcgggcaccaccaccacccgccgcagatcggccacttccaccaccaccccgccgcgcgcccgctcggccactacggctccggcccgggcgccggcttcgaccacgggttcctcagccgggccgtcgccggaggcggcccgcccgtcggcccaccggggatgcaccaccgcatggtcggccccgccgccggcatggcgatgatggcgccgtcccccttcgccgaagagctggagctcggatcccgaggaggcggcggcggcggcgggcgccgcgagcttactctgttcccgacgaccggcgaccactga

SEQ ID NO: 11788 - DNA, 2076 bp, Oryza sativa
  Clone ID: TFbOSC401801j.C1.o6.fg
atggcgccggtggaggatggcggcggggtggagttccccgtggggatgaaggtgctggtggtggacgacgaccctacatgcctcgccgtgctcaagaggatgctcctcgagtgccgctacgacgcgacaacttgttctcaggctacaagagcattaactatgctgcgagagaacaggcgtggttttgatgttataattagcgatgttcatatgcctgatatggacggattcaggttacttgaacttgttggccttgagatggatctcccagttattatgatgtctgctgattcaaggacagatatcgttatgaaaggaataaaacatggagcatgtgactacttaattaaacccgtcagaatggaggagttgaagaacatctggcaacatgttataaggaaaaagtttaatgaaaacaaggagcatgagcattcaggtagcctagatgatacagatcgtaccagaccaaccaataacgataatgagtatgcttcatctgcaaatgatggagctgaaggtagctggaagtctcagaaaaagaaacgggataaagatgatgacgatggtgaattggaaagtggtgacccttcttctacatcaaagaaaccaagagttgtttggtcagttgaactccaccaacaatttgtaaacgcagttaatcatctggggatagacaaagctgttcccaagaaaattttggagttgatgaacgttcttggtttaaatagggaaaatgtcgccagccatgtgcagaagttcagattgtatctgaagaggattgctcagcatcatgccggaatagctaatccattctgcccgcctgcttctagtggtaaagtaggctcactgggaggacttgatttccaagctttggctgcctcaggtcagatccctcctcaagccctggccgccttgcaggatgagctcctagggcgacctacaaatagtttggtattgcctggaagggaccagtcatctttacggcttgctgcagtcaaaggaaacaagccccatggggagagagaaatagcatttggtcaacctatatacaagtgccagaataatgcatatggggcattccctcaaagcagtccagctgttggaggaatgccttcattttcagcttggcccaataacaaacttggtatggcagactcaaccggcacattgggaggcatgagtaattctcagaatagcaatatagtcttgcatgaattgcaacagcagccagatgccatgctgtcaggaacccttcactctctagatgtcaaaccttctgggatagttatgccttctcagtcattaaatactttctcagccagtgagggtctctcccctaatcaaaataccttgatgatacctgctcagtcatctggttttctagcggccatgcctccatccatgaagcatgaacctgttcttgcaacttctcaaccatcgagtagtctgttaggtggtattgatttggttaatcaagcttcaacaagtcagcccttaataagtgcccatggaggggggaatctttctggccttgtaaatcgtaatccaaatgtagtaccttctcaagggatcagtacttttcatactccaaataatccatatttggttagtccaaattctatgggaatgggctccaaacaaccacctggtgttcttaagacagaaaactctgacgctctgaaccatagctatggttatcttggtggtagcaacccccctatggactctggcttactctcttcacaatcaaaaaatacacagtttggtttactgggtcaggatgacatcactggtagctggtcgcctctgccgaatgttgacagttatggtaatactgttgggctaagccaccctgggtccagttcatctagttttcaaagttctaatgtggctcttgggaaattgcctgatcaagggcgaggaaagaatcatggatttgttggtaaaggtacttgcattccaagccgctttgcagtggatgagattgaatctccaactaacaacttgagtcacagcattggaagcagtggagatattatgagccctgatattttcggatttagtggacagatgtga

SEQ ID NO: 11789 - DNA, 1299 bp, Oryza sativa
  Clone ID: TFbOSC401261j.C1.o3.gm
atggggcgggtatttcccgccctcctgcccggccacattatttcgggacaaattcggcagcagctcagtggcggcgtcggcgtcggcggcgccgcggcggcggcgagctcgaatgatcggccgccgttgtgcgtccagggtgactccggcctcgtcctcaccaccgaccccaagccacgcctccgctggaccgtcgagctccatgaccgcttcgtcgacgccgtcacccagctcggaggcccggacaaggcgactccaaagacgatcatgagggttatgggagtcaagggactcacactttaccatctcaagagccatcttcagaaattcagacttgggaagcagcacaaggatttcaacgaccactcggttaaggatgcaatggacatgcaacggaatgcagcgtcttcttcgggcatcatgggaagaagcatgaatgacgtgcatgtgaatgaggcactaaggatgaagatggaagttcagagaagattccatgaacaattagaggtgcaaaagcaccttcagatgagggttgaggcccaggggaaatacatgcagaccatcctggagaaagcataccaagccatctcgtcctcaggagattgcgccacgtggcacgcaggatacaaatctctaggcagccaagctgtccttgacattggcagctccatgagcttcccttctctgcaagatgatctgcagttatatggaggaagccatctagatcacctgcatcagcagcatgagcagatggagatcaggccatcaattgataccttcttggcattcaattacagctccagtactgggaagagcccaatggtgtggcccggcgccgacgacggcggcggcgagccggcgaagatctccggcgatcatcagctccagatggcggcgccggcgacgacgacgatgatgatggaggccatcaccatgtcaggaggagactccatgggcagtaaggggtttgagggtcagatgagctctaagcttgacatgagatcaccacctccacagcaaacagtgctacctgtaggaagtgagaggatgagtagtccaattgttggagccaaggctaggaacatctcctatggccgcaacgtgcatgtgaatggggcagataagaaggcccagagccaagaacaacaagaggcagaaaagcacctccagatgagggttgaggcccaggagaaatacatgcggtccatgatggagaaagcacaccaagccctcgcatctggtgccacgtggcccgccgccaatgagcaggcgaagatctcacctccaggaaggaagtga

SEQ ID NO: 11790 - DNA, 1671 bp, Oryza sativa
  Clone ID: TFbOSC7339j.C1.o2.fg
atggcggccaccgccgcctacctcccgctccgtgcccaggcgcaggtgggcctggctccgctccggccgtcgggctcggccgctgctggggcgcggttgcccggccggacggcgcggcgccggcttgcggcgagaggcgggccggaggctgccggtatccgcgcggaggctgtccctggtggtggaggggtcgcgcggagggcggccatggtgcccccgtataatgttctaatcaccggttccacgaaaggtataggatatgctctggcaaaggaatttttgaaggctggcgataatgttgtaatctgctcaagatcagctgaaagggtagaatctgcggtgactgacttgaaaaaggaatttggagagcaacatgtgtggggaattgtctgtgatgttagggaaggaaaggatgtaaaggcactagttgattttgcacgtgacaagatgaagtatattgatatttggaaccataagaaggcaggattttctccttatctttgtgttcctttggcacagatcaacaatgctggatcaaatgcatatagttacaaaccgttggtcgagacctccgacgaggctctcatggaagtgatcacaactaacactcttggattaatgatatgttgtcgtgaggcaataaatatgatgagaaaccaacctcgaggtggccacatatttaacatcgatggtgctggttctgatggaaggccaaccccaaggtttgctgcatatggtgcaacgaagagaagtgtggtgcaccttacaaaatctctgcaggccgagttgcagatgaatgaagtgaacaatgttatggtgcacaatttgtcgcctggcatggttacaacagatcttcttatgtctggtgccacaacaaagcaggccaaatttttcatcaatatattagctgaacctgctaatgtggttgcggattatctcgttccaaacatcagagcaatacctactaaccagtccatgaaaccaacctacatccgttttctcacaggcttgaaagcctactccagaatattttcaaggattgcttttggtgctcgtaggaacaaaataatgtccaacagccagccagcacaagaggatgattgcatgtcgagcattctggtttctcgccttatccgggctatgcagccaacaaggagttaccttcgatggtctgatgatctccataagatgtttgtggaggctgtggcctaccatggaggtccctatgaagctaaaccaactgcagtgaaggagacaatgcaagctatgggtgtcacaagccttacgacccacaacatcaagagtcacctccagaagtacagggagagtttcagttcaggtgttgggtctcttcatgatcatgatctgctgagaaccacttctccaagcaaggaagcacttgatctggcatctgagatggttagggacaacgatgccgctatggctgaaatcgagatgttgaacgatttgctgttggatcacgatatagagatggtagagaccagtttctctgtggacgatttgcagatgatggagagggagctgatgagtgaaatcaagctgatcgagcacaacttcgagatatctgagagtgctcttgatgagtacatggatgacttggccaactacgcatttgaccttacgggtcctgcaaactcttctagtccatga

SEQ ID NO: 11791 - DNA, 1347 bp, Oryza sativa
  Clone ID: TFbOSC900146j.C1.o4.fg
atgtgccccgacattgaggaccgcgccgcggtggccggcgatgctggcatggaggtcgtcgggatgtcgtcggacgacatggatcagttcgacttctccgtcgatgacatagacttcggggacttcttcctgaggctggaggacggtgatgtgctcccggacctcgaggtcgacccggccgagatcttcaccgacttcgaggcaatcgcgacgagtggaggcgaaggtgtgcaggaccaggaggtgcccaccgtcgagctcttggcgcctgcggacgacgtcggtgtgctggatccgtgcggcgatgtcgtcgtcggggaggagaacgcggcgtttgccggggctggagaggagaagggagggtgtaaccaggacgatgatgcgggggaagcgaatgtcgacgatggagccgcggcggttgaggccaagtcttcgtcgccgtcatcgacgacgtcgtcgtcgcaggaggctgagagccggcacaagtcatccagcaagagctcccatgggaagaagaaagcgaaggtggactggacgcctgagcttcaccggaggttcgtgcaggcggtggagcagctcggcatcgacaaggccgtgccgtcgaggatacttgagatcatggggatcgactctctcacccggcacaacatagccagccatcttcagaagtaccggtcacacagaaaacacatgattgcgagagaggcggaggcagcgagttggacccaacggcggcagatttacgccgccggtggaggtgctgttgcgaagaggccggagtccaacgcgtggaccgtgccaaccattggcttccctcctcctccgccaccaccaccatcaccggctccgattcaacattttgctcgcccgttgcatgtttggggccacccgacgatggacccgtcccgagttccagtgtggccaccgcggcacctcgttccccgtggcccggcgccaccatgggttccaccgccgccgccgtcggaccctgctttctggcaccacccttacatgagggggccagcacatgtgccaactcaagggacaccttgcatggcgatgcccatgccagctgcgagatttcctgctccaccggtgccaggagttgtcccgtgtccaatgtataggccattgactccaccagcactggcgagcaagaatcagcaggacgcacagcttcaactccaggttcaaccatcaagcgagagcatcgacgcagctatcggtgatgttttatcgaaaccgtggttgcctttgcctcttggactgaagccaccttcagtggacagtgtgatgggcgagctgcagaggcaaggcgtagcaaacgttcctccagcgtgtggatga

SEQ ID NO: 11792 - DNA, 699 bp, Oryza sativa
  Clone ID: TFbOSC416785j.C1.o7.fg
atgcccggcgtgcggctgaaccaccaccaccatcatcagccccccgcggcggcgccgttcgtgggcgcggcgccgctgccgcaccacccgagatcaggcggcgcgtgctactgcgacccgtgccacgtcgccggcgcgtggcgcaggggtggctgcggcggcggcggcgcccgcggcgtgctcccggcgaagcgcgccccgcgcgcgccgcgcatgcgctggacgtccaccctccacgcccgcttcgtccacgccgtcgagctcctcggcggccatgacagggcaacgccaaagtcggttcttgagctgatggatgtgaaggacctcaccctggctcatgtcaagtctcacttgcagatgtacaggacagtgaagaataccgaaaggccggcagcttcgtcagatcaagctgatgggtttgagaatgggtcggccggcgagatctgcgacgagaactcgctcgacctgcacggcggatgcaggccggaggcgatgtcggcggcggcgcgacatggaagggaggactggtctggcttccatgagtccaacactggaaccatgcaaactctgaaggatatgcaatccaagagcctagagatcatatcagacatgaactcctgcgtttcggagacgacatcgagcaccagcgagctgaacctcgagttcacgctagggcgaccacaaaaccgaccaaactaa

SEQ ID NO: 11793 - DNA, 1764 bp, Oryza sativa
  Clone ID: TFbOSC415689j.C1.o8.fg
atgtctcgtccccaacctccaccgcttctccccgtcctccctgaactcggcggcctccaggcactcacctcatcctcggcttccctcgccacgtggctccgcggtggtggtcgggaggaggttgcagctatcaatctagatggcggtgatgcggtcatactggtcgttgtcccacctcacctcgccggccatggtggacaagggaggccgccccactacagcattgaacggaggaggtcacaacctcaattcgagtgccatgcgtatgtcaagggtgtaaaatatttggtattcgagttcaggggtgtaattcggctgacggcgatagctcacggagtggtaggcgacgtatttcttggcagcgaggcacctgtggtgacttcgtcaatttcaaaatatgctggtctagtcttcggaggtgctcatagggatgtgtcagccctaggagaggagaagctttctttttttggaaaatcgagtcaacaaaagagaataagcaccaatcagctctacaattctggaattccggtgactgtgccatcgcctctgcctgctataccagctaccctggatgaaaacattcccaggattccagatgggcagaatgttccgcgggagagagaattgagaagcacacctatgccacctcatcagaatcagagtactgttgctcctcttcatgggcattttcagtccagtaccgggtctgttgggcctctgcgttcgtcccaggcgataaggttctcttcagtttcaagcaatgagcaatatacaaatgccaatccttacaattctcaaccgccgagtagtgggagttcttcaacgctcaattatggatcacaatatggaggctttgaaccttccttgactgattttccaagagatgctgggccgacgtggtgtcctgatccagttgatggcttgcttggatatacagatgatgtccctgctgggaacaatttgactgaaaacagttctattgcagctggtgatgaacttgccaagcaaagtgaatggtggaatgattttatgaattatgactggaaagatattgataacacagcttgtactgaaactcaaccacaggttggaccagctgcgcaatcatctgtcgcagttcaccaatcagctgcccaacaatcagtttcatctcaatcaggagaaccttctgcagttgctataccctcgccctctggtgcctccaatacctccaactccaagacacgaatgagatggactcctgaacttcatgagcgctttgtagatgctgtcaatctacttggtggcagtgaaaaagctactcccaagggtgtgttaaagctaatgaaggcagacaatttgaccatttatcatgttaaaagtcaccttcagaaatacagaacagctcgatacagaccagaattgtctgaaggttcttcagaaaagaaggcagcctcaaaagaggacataccatcaatagatctgaaaggagggaactttgatctcactgaggcattgcgtctccagttagaactccaaaagaggcttcatgaacagcttgagatccaaagaagtttgcagctgagaattgaggagcaagggaagtgccttcagatgatgctcgagcagcagtgcatacctgggacagacaaggcggtggatgcttcaacctcagcagaaggaacaaagccatcttctgatcttccagaatcttctgccgtgaaggatgttccagagaacagtcagaacggaatagccaaacaaacaggcatgagaatccattaa

SEQ ID NO: 11794 - DNA, 702 bp, Oryza sativa
  Clone ID: TFbOSC419196j.C1.o4.fg
atggcgactactgctgccaccgcgccggatctgtcactccacataagcccgccttcgccgccggacatggccgccggcggcgagacgatggagcagttggctgagccaaagctgtgcctagggtttggcacggcggcggcggcggcggcggagcagtacaacaatggcggctgcaacctccagcagcagcagcggctgcaccaacctagccagatccagagattcaagaagagcgccagcggcggcagccctgtgtgctccggcggcgccaccggcaccggcggcgttgcggcggcgagatccgggaatggcggtggaggtgggaagaggagctctagggcgccgaggatgcgatggacgacggctctccatgcgcactttgtgcaagccgtcgagcttcttggaggccatgaaagagcgacaccaaagtcagtattggagttgatgaacgtgaaagatctcacgctggctcatgtgaagagtcacctgcaggcaacttatttgcttgacctggtgcagatgtatagaacagtgaagggaaccacagacagaacatgtgctgaaggccatgggcagatgagagatatgggctttctgaggagaggaggtggtggagtggatggctttgacgtgcttggtaacacctcttcaattgcaatcgccaatattagggccttcaatctcaaggatgcaaatatataa

SEQ ID NO: 11795 - DNA, 1620 bp, Oryza sativa
  Clone ID: TFbOSC401660j.C1.o24.fg
atgcttgaggtgtccacgctgcgaagccctaaggcggatcagcgggcgggcgtcggcggccaccatgtcgtcggcttcgtcccggcgccgccgtcgccggccgacgtcgccgacgaggtcgacgcgttcatcgtcgacgacagctgcctgctcgagtacatcgacttcagctgctgcgacgtgccgttcttccacgccgacgacggcgacatcctcccggacctcgaggtcgaccccacggagctcctcgccgagttcgccagctccccggacgacgagccgccgccgacgacgtcggctccgggccccggcgagccagctgctgctgcaggagccaaggaagacgtgaaggaagatggagccgccgccgccgccgccgccgccgccgctgactacgacgggtcgccgccgccaccgcgggggaagaagaagaaggacgacgaggaaaggtcgtcgtcgttgccggaggagaaagacgcgaagaacggcggcggcgacgaggtcctgagcgcggtgacgacggaggattcctcggccggtgccgccaagtcgtgctcgccgtcggcagagggccacagcaagaggaagccgtcgtcgtcgtcgtcatcggcggcggccggcaagaactctcacggcaagcgcaaggtgaaggtggactggacgccggagttgcaccggcggttcgtgcaggcggtggagcagctcgggatagacaaggccgtgccgtccaggatcctggagctcatgggcatcgagtgcctcactcgccacaacatcgccagccatctccagaaatatcggtcgcacaggaaacatctgatggcgagggaggcggaggcggcgagctggacgcagaagcggcagatgtacaccgccgccgccgccgccgccgcggtggcagccggcggcgggccaaggaaggacgccgccgccgccactgcggcggtggccccgtgggtcatgccgaccatcggtttccctccgccgcacgcggcggcgatggtgcctcccccgccgcaccctccaccgttctgccggccgccgctgcacgtgtggggccacccgaccgccggcgtcgagccgaccaccgcggcggcgccaccaccaccctcgccgcacgcgcagccgccgttgctgcccgtctggccgcgccacctggcgccgccgccgccgccgctgccggcggcgtgggcgcacggccaccagccggcgccggtggacccggcggcgtactggcagcaacagtataacgcggcgaggaagtggggcccgcaggcagtgacaccggggacgccgtgtatgccgccaccgttgcctccagccgccatgttgcagaggtttcctgtaccgccggtgcctggaatggtgccgcaccccatgtacagaccgataccgccgccgtcaccgccgcaggggaataaactcgctgccttgcagcttcagcttgatgcccacccgtctaaggagagcatagacgcagccatcggagatgttttagtgaagccatggctgccgcttcccctcggcctcaagccaccgtcgctggacagcgtcatgtctgagctgcacaagcagggcatccccaaggtgccaccggcggcgagcggtgccgccggctga

SEQ ID NO: 11796 - DNA, 1299 bp, Oryza sativa
  Clone ID: TFbOSC405553j.C1.o18.fg
atgctgcaaaggaacctgccgaatctctccctccggataagccctccggccgtctcgtcggcggcggcgccggtatcctccggaacaccgacgacggcggcgaggacgactctgccgaccggagtgattacagacgcagaaggaggaggcgaagtagcagcgttctttggaaaccctagctccggcagcgagccccccggtctgagcctggggctcgggccgacgacgccggcgcacgcggacgccggcggcggccgccatggcgaccaccacctgcagccgcaggggtgcgcgccgttcaagcgcgcggcggccagggcgtcccagctgccggcgggctcgaagcggagcgtccgcgcgccgcggatgcgatggaccaccgcgctccacgcccgcttcgtgcacgccgtcgagctcctcggcggccacgagagagcgacgccgaagtcggtgctggagctgatgaacgtgaaggatctgacactggcgcatgtcaagagtcacctccagatgtataggacagtgaagagcacagacagatcatcccacattgcctcaggagaggcgcagctgcagcagcaggcaggaatggaggtggccatggaggcggcagctggaggaggaggaaatggtggtggtggtggtggtggggtggtgctaccgatgatgccggcatgtgacgacatggttgggatctgtagctcccctgcgccgcctgccgcagcgactagttccgctgctgcctacttcctctgcgcgacgacgacgtcaacagcaactgctccactggcagtagtgccatcgcctcctgctccaaccattcccacaaggtttcatgaatgcatatatggagatgttgatgtagtaatacagtcaatttcaatgttaataaatgttttgctacatggaattgataagagctgcctcgctttaacttttcttgagcacaggaggactgaccaaacgccagcgctggaaaagggtgtcgcgattgttgactcgttgcaccggtgtcagaagcataactactcaccagtgcttcaagatgctcttcatcagggagctgaagaagatcatcttattaccgggaacctaccaatgggaggagcatcagcacaagcgagcattgaggccatggcgactaccaactcttcaagccctgcaagctcatctccatcacttgcaagcctggagcagctgctacctgaagactcgtttgcgcccaacctggagatctccctcgggagacataactggaacatggaccatcctgaagaactcagcctgaaatacctgtga

SEQ ID NO: 11797 - DNA, 969 bp, Oryza sativa
  Clone ID: TFbOSC417454j.C1.o3.fg
atgggattctacagctcgtaccaccacccatccacgtggccctccacgtcgccgtccccgctcgcggcgccgccgggcgccgcgtcgtcgccgctcgaccccacggcggcgttcctctcctccccccaccaccggatgctgtccgccgcctcggggaggctcaacggcatgctctccgtctccgacaccctccgcagctacggcgtccccggcgccgccgcccccggcgtcatcggcggcgcgcaccaccaccaccaccacctccacggcggccagccgttcgtcggcgccctcgcgtcccgcttcatgcccaagctccccgccaagcgcagcatgcgcgcgccgcgcatgcgctggacgagcaccctccacgcccgcttcgtccacgccgtcgagctcctcggcggccacgagagggcgacgcccaagtcggtgctggagctcatggacgtcaaggatctgacgctagcgcatgtcaagagccacctccagatgtatcgcaccgtgaagagcactgacaagcctgcagcctcttcagggccggcggacggcggctccggcgacgaggagttcgccggcggcgggcaggcggcgtcgggcggcggcgacagcatgtgcctgaggggtggcggcggcggcggggtggccgcggcggcgttcgcggagcacggccggtcggcgtcggagggcgccgccagctcggtcggcggcggcggcggcggcgacatggaccagtcgtcggccggcaacaccagcaccaccaggtggagcaactcctcaagggacccatggctgtcgtccaattcttgcaacatggacgcccatcgctccgtaggattgtcttctcctattgagaacttggaaccgtgcagatcgagcagctcgcaggtgtccaaccatgagctgagtagccctagtctcgagttcactctagggaggcctgactggcacggtgcagatcatgattag

SEQ ID NO: 11798 - DNA, 762 bp, Oryza sativa
  Clone ID: TFbOSC100626j.C1.o5.fg
atgggaattagcggcgagaggaagggagccgcgaggcagtacaacaggtccaaggtgccgaggctgagatggaccgcggagctccaccgcagcttcgtgcgagccatcgactgccttggcggccaacaaaaagcaactcctaagctcattcttcagctcatggatgtcagagggcttaccatatctcacgttaaaagtcacctacagatgtacagaggcacacggcatggcattggacaaaacgatatgcagccacagctacatctgaagcagcactcattcggcagtgatgagcagagccccaaggaattcatgtgcccacccataaaaagggccaaggtagggacagaagcttcaggcaaatacagatgcatggaagggagcagtgacatgaggagtagtgctcctcctgcaggcacccggtacttcatcgatgattgtatgcgactgcaagaagtgtccatggataggaggagatcagatcaacacgatgctgcagctgccgctcgtgctcgtgctcctgctgctgctgcttcaagccttcatcaggcactgggattttgggtgcagggaagaagagaggagccctttatggtacaccagattagtaaacccaaagcacatcaactgaaccatatggtcaggaacatgaagatatcttgcaaggagaaccacgaaagtagattcttcatgtccctcgtcatggtgctattactaatttctgctgatctcgtttctcgtgaaacaccctcgaagctgtga

SEQ ID NO: 11799 - DNA, 3462 bp, Oryza sativa
  Clone ID: TFbOSC401719j.C1.o42.fg
atggcgatgcgaggtgagccgtggcggcgccaggagggggagcaggcgcaggcggaggccgatcgggaacgcgagctggacctcttccgcagcggctccgcgccgcccacggtcgagggctccatgggcgcgctccacgccgccgccgccgccgacgtgttcctggaggacgagctccgggccgacccggcctaccactcctactactactccaacggcaacatcaaccctcgcctcccgccgccgctgctgtccaaggaggactggcgctccgcgcagcgccttcgccccggcttgggtgggatcggcgacgggaggaagcccagaggtggaggtggaggccgcggcggcggcggcgctggagggatgggtccaggggatggcctcattgggatgcccggtctcgagattggccgccagaatagcttctccggttttggcactataaaacgcctttctgtcgcaaaagtattggtcctgaaacttcttataattctattcaaggctaaagaaataacttctgacctatatatgatgcaggatgactcgtatcaacacgatacggatagacagggtgccaactgcaatggtacagacttgttgagttcttctaaagtgcagtatggtctacatcgtgagactggagctattagtggccttcactcagacagcaaagcaccatgcttgccagaaaaccagaatgaatcatcacactcatatgcatcaataataggatcatcactttcaagaagtgcatctccagatcctgaactagtgaggagagttcctagtccttgcctccccccaattggtgtgaaacttggtgctacagataagaagaataatgttggttcatcttctttcaattgtagttctcccaatattattgaatctgatgatttggtgtctgctctatctggtatgaacctgtcgtcatcaagagcaatgaacggaaacacaatggaccaatctaagctccatcaggatgtggatgatgttcgtaagttcctttttgatcagtacatggatcaaacaaatggcaatcagcgccattcctacatgaaacgttctgaacaaggacacgtgaaggttcctcaagaatattctggtgcttctatgaatccttctgttatgagaagccagatcaatgctggtggtttcacatcatttaacaactcatcggtgggatctggctttgcttctcctaggcttggatcccgatcaccaggtgggagtttatcttcacggcaaaatctaactggtgcatctaaccttccaaactacgttggaattggaagtccaactgcagcttctgcccaccagatgcctgttgatccactgtatgttcagttccttcgggcagcagaaattgctgcccttgcagctaactgtgaggatcctttgatggatagggctaatctaggaggttcttacatggatctatttggccctcagaaggcgtaccttagtccattgcttcagtcacagaagcaatatagttactacgggaatctcggggttggtcttggctatgctggtaactctttaacaagtcctattcttccctcgtcaccaggtggacctggtagtccacttaggcacggggatcgcagcatgcgctatccatctgggatgagaaattttggtggttcctttggctcctggaattcagatctcggtggtaagatggaggccaatttagttccatcacttctggaagaatttaagagcaacaaaagcaaatcatatgagctctctgaaatcgctggtcatgttgttgagttcagtgcggatcaatatggaagtagattcatacagcaaaagcttgaaacagccagcactgaagaaaaagacatggtttttgctgaaatcatgcctcaggctctcacattgatgactgatgtctttggaaactatgttgttcagaagttttttgagcatgggagctcagctcagataaaggagttggctgatcagctaattggacgtgtcttagcactcagcctccaaatgtatggttgccgagttatacagaaggccatagaagttgttgatttagatcagcagactaaaatggttgctgagcttgatggacaagtgatgcgctgtgtacgtgatcaaaatggaaatcacgttatacagaaatgtattgaatgcattccacagcatgctatccagttcattgtttcaaccttctatggtcaagttgtgatgctatcaactcatccatatggttgtcgggtgatacagagggtgctggagcattgtgatgatcctaaaacccagcaaatcatgatggatgagatcctacaatctgtttgcttgctggctacagaccagtatggtaactatgttgtccagcatgttctggaacatggcaaaccccacgagagatctgctattattgagaagttgattgggcagatagtacaaatgagccagcaaaagtttgcttcaaatgtcattgagaagtgtttagcctttgggaatcctgtggagcgtcaagtcctgattggtgaaatgcttggctccagtaatgagagcgaacatcttgaggtgatgatgaaagatcaatttgcaaactatgtggtacagaaggtgttagagacctgtgatgatcagcagagagagatgatccttacaaggataaaagctcatctgaacacactgaagaaatatacttacgggaagcatatagtggcacgcgtggaaaagctcgtcgcagccggagaaaatccgagtattatgggcgaggaggcgccggaggagtacgagctgggcggcggggaggacgagcgggtgatggagtgggagacggggctgcccggcgccgacgagctgaccccgctgtcgcagccgctggtgccggcggggctggcggcggcgttccgcatcccgccggagcccgggcgcacgctgctcgacgtgcaccgcgcgtcggcggcgacggtgtcccggttgcggcgcgcgtcgtcgtcgtcgtcgagctcgttcccggcgttcgcgtcgaagggagcgggaacgggagcggacgaggcggagtcagggggaggcgcggatggggggaacgggaacaccaacaacagcagcagcaagagggcgcggctggtgtggacgccgcagctgcacaagaggttcgtggaggtggtggcgcacctggggatgaagaacgcggtgcccaagacgatcatgcagctgatgaacgtggagggcctcacccgggagaacgtcgccagccacctccagaagtatcgcctctacgtgaagcggatgcagggcctctccaacgagggcccttccccctccgaccacatcttcgcctccacccccgtcccccacgcctccctccacgaccaggttccttctccttaccacccccacccccaccaccactcctacaacaacgccgcctatgccgccaccgtctcctcctaccaccactaccaccacgccaaccactga

SEQ ID NO: 11800 - DNA, 2226 bp, Oryza sativa
  Clone ID: TFbOSC900191j.C1.o18.fg
atggcggagaacaacggcgcggtgcctcccggctgcaagctcccggcgggaggattcttcgggaggctgcacgtgctcgtcgtcgacgacgacgccgcctacctcgaggagctcaagcttatgctgctcctcgccggctacgcagtgacgggcaagacgacggcggaggaagcgctgaaagaggtggaccagaatccggaggattacttccacatcgtcatgaccgacgtccacatgtcaggaatggacggcttcgatctcctccacaggatcaacggccgggtccctgtcatcatgttctccgagggcgaagatgtggtgatggtgatgaggacggtgatgaacggcgcatgcgactacatggtgaagccgatgacatcagaggcgatcaagttcatatggaagcacgtcctgcgctggaggctcagcgccctccccgcgaatgcctcatcatccctgcagccaagcgatcacctggcggcggctctagcggctgtggcgccgccgccgccgccggcggtgcagctgccggccgcaccggcgcaggctgggaacagggatggcgaagctcatgaggaggcagagttgtcgacacagcctcctgcgctggtgccatctggcgttcaagaggcggctgcagcggtatggagcagccgtggtgatggacaagaggcgccgccgccggcggtggctgcggcggcgaaggccccctcgaagaagaggggcgcgtcagaagtgtcggacaggggctccaacaatttggaggcgacgacggggaggaagaaggtgaggacaaggttcacatggacgacggtgtcgcacacatcgtttgtcagggcatacgagcagctgaaggaccaagaaggtccaaagaagataaagcaactgatggaacttgatggtatatttgtaactaaaactcaagtctcaagccatctacagaaatacagaagctggttagaaaatgaaagaaaaaaggaagaagcaacaagcagctcaccatgcaacccactgagttacaccaactgcctagatagaggcaactatgtgggagtgggagctaaagaaatcgagaatttcatttccagccatcagagatctctaggaactgcaattggtcaagaatcaactattgaacaggcaagccttcatagtgagattacatcagtcagtcgtgatgctcatgaaaatggaaacagccaggctagaggaagtgcgatgagcaatggtccaaagaagataaagcaactgatggaacttgatggtatatttgtaactaaaactcaagtctcaagccatctacagaaatacagaagctggttagaaaatgaaagaaaaaaggaagaagcaacaagcagctcaccatgcaacccactgagttacaccaactgcctagatagaggttatagtacttggaagcaaagttcagtcataactgaaggacagcaaagttcaagtttttctggacggcctattcattccatggccacatcaaatggttgtctaactacgactgatacccaagcaggcaactatgtgggagtgggagctaaagaaatcgagaatttcatttccagccatcagagatctctaggaactgcaattggtcaagaatcaactattgaacaggcaagccttcatagtgagattacatcagtcagtcgtgatgctcatgaaaatggaaacagccaggctagaggaagtgcgatgagcaatggtacttcaggtactcgtggtgtgcttgttacaaatgagaacctcctgcatgttgttagtgcatcgttgccatcaaacatgggacagccaacgcaaccaagtcaaagcttctgcaccaatgaattggcagctaactacagtattattagtgatcaaaaccctgggactagccatccaactagctctagtgctatcaataatcaaaactctaagacccaagaaatgtctgtttcacaaacagtagaacttgggtgtggcaacgatgtgatgttggattggccagaattagttggactggaagatcagctggataatgatgtgctaatgaacagcttctttgatggagacttactccagcagggtgtagttactgctatagatgggacgcaagagatgcttgcttttgattctaccggtgacttgggctcagtgccgccaagaggccttaacaacgaaattgccagccatgagaataccaatggaaagaacggcgcatctagtggaccttga

SEQ ID NO: 11801 - DNA, 2151 bp, Oryza sativa
  Clone ID: TFbOSC100899j.C1.o12.fg
atggaggagttgctcggcttggtgcggggcttcgtcgacgtcctcgtcctcgccggcggccgcacctcgtctggcgccgccgccacctggcgctccggtgacgtcaagaaggccctccaatgggccctcttcttcgaggaggttttcaagaacctgcgtgacgatggtcagtacgatgagtctgcaagtgagctcgatgctgcactcgttcaactcgcttcaagcccgaatttccccaagggtattgaggatatccgatcaaaaacacttgcgatggcaagagagttggttgtgaagcattttctgaaaacaacgaatgcggagaatttaggtgctgtacttcaagcagttgttgagatggatatggatggcatttctgctagtggtgaatgcaatgtgtgccaagagtatgtgcaatcgattttagatatgaatttacctagtttgatgcgaaccaagaatgcccgtgatgttggacattccactagctctgatgaattttgtgaagaatccttgtttacgggtaattcacagattctacttaaagaactacagaagaagctggattcaggatcgtgtatttctttggctgagagagaactgaacacacttctaaaaagcatgaaaaaggacagctttgatagtgcaggaagtacattgtgcacctcagcaactgctcagaaaacacaaatcatcgacaagtttatcctgtggaagcaatggaaagcaaagtgtttgtcgtacttgcttgatgagcgtaccattcggatcatgtcaggaactaatatgatctttaatgctcccaaggagcagtggatgggattgtttgaaccattaaaagtttctgcagattctagtcaaagtggcatcattgaagtcatggagctatgcttgttgggattggttgcaaggcaatggaactcattaatagagagcatcatgtcacatacttttagttcctttcctatatcaaaacaatatgctgatctgcaccagttgcttcaaggaacaactcaggatgaatgccaagacaagcttcttggtttcaaggagatggatatttgtgagtatgcaaggcaatcattagagagcgaaccgtacatattatggcttctacctccagttcttactgctgcagcaatgccgccacggtcaagcttgtttaagatataccttgttgaaatagataagcaactcggtgaagctgcttccaaagaccgaaaatgcaattgcggaggagatggaatagaccagcatcaaaactcttccaactttacatcagatctttatatcaacaaaagtgaatcacctaacggcaagctttcttctgaatcatatgctattgatacctctggatgtgattcttccttgccgccaacacagtcattatacaagggtaatccaagttctttaaggatggtttatcctaaagtatctgaacagaatagttggagtcaagaaccactgcctggaccatttgtttgtccaactagtgttgatttcttcgatcaacaagatatgactatttttgaccaacaaatacaagataacattgcagcaagtcctagcaccaaccttgcaaagcaaaatgagtggttctcatctggcacttccttgcagtatttggaaagttcggtgtctgctggttctgtgctgaaggctgttgatgcgacaagtacaacaccttcaaattatttgcattgtcatgcacagagaaatacatcaaatcctcccaacttcaatgaaatttgttctgaagcaactccaaaagctgtccagaaagttatgaaggttgacggcttaactatataccatgtaaaaagccatctacagaagtatcgcacagttcatcatcgacctcaactatctgatggtcgaggcatggaaaccacctgtgaaggattaagggtccagattggcttgcagaaacaacttcacgaacaacttgagatccaaagaaagctgcagctgcaagtagaagaacacagcaagtacctcgccatgataatcgagaagcagagcgagagcctaagacaactgggagcattaccaagatctctagatgcacccactcaggttttggataacagggaaacgtgcgagggacaaacaggagatgctgattcagcagagcaaaaacctgagaaatga

SEQ ID NO: 11802 - DNA, 921 bp, Oryza sativa
  Clone ID: TFbOSC900143j.C1.o24.fg
atgcaagcagaagtgaacatatctgaggccatagcttccaactttacatcagatctttatatcaacaaaagtgaatcacctaacggcaagctttcttctgaatcatatgctattgatacctctggatgtgattcttccttgccgccaacacagtcattatacaagggtaatccaagttctttaaggatggtttatcctaaagtatctgaacagaatagttggagtcaagaaccactgcctggaccatttgtttgtccaactagtgttgatttcttcgatcaacaagatatgactatttttgaccaacaaatacaagataacattgcagcaagtcctagcaccaaccttgcaaagcaaaatgagtggttctcatctggcacttccttgcagtatttggaaagttcggtgtctgctggttctgtgctgaaggctgttgatgcgacaagtacaacaccttcaaattatttgcattgtcatgcacagagaaatacatcaaatcctcccaacttcaatgaaatttgttctgaagcaactccaaaagctgtccagaaagttatgaaggttgacggcttaactatataccatgtaaaaagccatctacagaagtatcgcacagttcatcatcgacctcaactatctgatggtcgaggcatggaaaccacctgtgaaggattaagggtccagattggcttgcagaaacaacttcacgaacaacttgagatccaaagaaagctgcagctgcaagtagaagaacacagcaagtacctcgccatgataatcgagaagcagagcgagagcctaagacaactgggagcattaccaagatctctagatgcacccactcaggttttggataacagggaaacgtgcgagggacaaacaggagatgctgattcagcagagcaaaaacctgagaaatga

SEQ ID NO: 11803 - DNA, 1068 bp, Oryza sativa
  Clone ID: TFbOSC401119j.C1.o16.fg
atggggctggatgtgggggaaatcggcgtcggcgcggcggacctgagcctggatctcaagatgttcgccgccaagagcttcggccgcgtcaggggcaaggacaccaccaccaccgccatgggtgactgcatccggaggctcgaggaggagatgggcaagatcgaggtcttccgccgcgagctccccctctgcgtccgcctcctcgccgacgtgattgatgtgatgaaggaggaggtggagaagaagggtggtgatcgtaaggaggatgaggaggacgccgccggcgacaagagcaactggatgagcaccgcgcagctctggactgggaattccggcggcccagacgccgccgccgctgatccagagaagcaggacaaggtgaggatctcgtcggaggcgaagtccaacggcggcgcgtttgtgggctctggcgcgccggctttcgcgcggccgaagcagagcttgatgaggaaggaggacatggcgtacgacgtcaggatgccggatctgtcgctgctctcgccgcctgcttccgccgccgccgccgacgaaagccgccgtcaggtcgtgggcttctcccaggccgcggcgagggctgccgccatggcggcgtctggccccgctctcagcctccagccccagcctcagccggcggcggcgcagcagcagcagcaggcgaggaagacgaggcggtgctggtcgccggacctccaccgcaagttcgtcgccgccttgcagcaactcggtggccctcaagttgccactccaaagcaaatcagggagctgatgaaggtggatggactgacaaatgacgaggtcaaaagccatcttcagaagtaccgcctgcacaaccggccgagagtgccaagctcaacaattgtgaaccaaccgattgtgctcatgcaagggctctgttacattcctcaagagcaaagcagctcccagtctggatcccctgagggtcctctccatttctcaggctcaggcatggccggtggcggctcatcggcggcgacggtcagctgcgaggaggaggatggcaggtctgagagctatggctggaaatga

SEQ ID NO: 11804 - DNA, 966 bp, Oryza sativa
  Clone ID: TFbOSC1299j.C1.o1.fg
atgggaagtgcaggcaaggaggaggaggaggaggacggcggcggcggtgcaccggcggcggcggccaacaactacgggagctcgacgacgagcagtactacggaggaggagggatccggggagagcaggcggcgcacgtcgtcgtcgtcgtcggtgcgcccctacgtccgctccaagaaccctcgcctccgttggacgccggagctccacctctccttcgtccgcgccgtcgacaggctcggtggccaagatcgcgcaactcctaagctcgttcttcagctgatgaatgttagagggcttagcataggccatgtcaagagccatctccagatgtataggagcaagaagatcgatgagtccggccaggtgataggtggtgagtcatggagatcagatgatcatctgcaaatgcaaggtggtggccatgggggacaagcgtacaaccttggccatctttccctgcctgctctccatcatcgctctatcactgctggctccggtaccatcttccagtccaggtttggcaattcatggtccccatggagatgtcatggatcatactggctccctgcaggccatcacctgcttgttggatcaaaaccctattacccaccagcagctgaagctgaagctcctttccgcagatcaagtgctaggtatgtagctagagctaataccagcaaccatccagattttgtccaaggctcttcttcatctccagatgataatatcatgaaccatcaaagaccagttctgaaagagatgatctgcagtgagggtagtaaccatcaagaaggccctcttaatctggatctctcactcgatatctgtccgcggggcgagaagaggaagagagaatgcagctggaggaaacaagaggaagatcatgatcatgctactgttgctattggtgctgatcaagaagcagagagttgtgctactgggctctctctttctttgttctga

SEQ ID NO: 11805 - DNA, 945 bp, Oryza sativa
  Clone ID: TFbOSC401056j.C1.o7.fg
atggaaaaaactagtgcaggcaaggaggagggctccgagagtaagacggcggcggccaacaacgatgggagctcgacgagcagtactacggaggaggaggaatccggggagagccagcggcgcacgtcgtcgtcgtcgtcggtgcgcccctacatccgctccaagaaccctcgcctccgctggacgccggagctccatctctccttcgtccgcgccgtcgacaggctcggcggccaagatcgtgcaactcctaagctcgttcttcagttgatgaatgttagagggcttagcataggccatgtcaagagccatctccagatgtatagaagcaagaagatcgatgagtctggccaggtgataggtggtggctcatggagatcttcagatgaacagcagtatcatcatctgcaaatgcaaggtggtggtgacgggggacaagcgtacaaccttggccatctttccttgcctgcagctcttcatcatcgccacatcactgctggctccggtaccatcttgcagtccagggttgccaatgcatggtccccatggagatgccatggatcatactggctccgtgcaggccatcacctgcttgttggatcaaaaccctattacccaccaccaccagctgaagctagagctaataccagcagcaaccatccagattttgtccaaggctcttcttcatctccagatgatcataccatgaaccatcaaagaccagtagtgctgaaagagatgatctacaatgagggtagtaaccatcaaggaggtcctcttaatctcgatctctcactcgatatctgtccgcggggcgagaagaggaagagagaattgatcagctggaggaaacatgaggaagatcatgatcatactactattgctattggtggtgatcaagaagcagagagttgtgctactgggctctctctttctttgttctga

SEQ ID NO: 11806 - DNA, 990 bp, Oryza sativa
  Clone ID: TFbOSC401238j.C1.o21.fg
atggtgaggagggagaggatcgaaggagtgaggcagtacaacagatcgaaggtgcctcgcctgagatggacgcctgatctccatcactgctttgttcatgccattcacaagcttggaggccagcacaaggctacacctaagcgagttcttcagctgatgggagtgggaggactcactatatctcatgtcaaaagccatctgcagatgtacagaaacatgaggaatgatgacctaggtatgcaaggcattcagcagatggatgatcaggagcaaacatttgcaggaggcatgcaaatttggacagatatgcagctgcaggatcatcatcatgagtgcaatggaccctattgcagatgccactcctcatcaaaacatgcaaagggctcactgctgctgctacaccaccaccaccagcagcaacagctgcaaaggccaaatgagatggagacgagacgagcagaggcgagcacccaaacaggctttctcagaagccaaggaatatgtgagagggacgtgtcctccggcctccctgtcccagctgcctactactcctactacacgcccatggcgcacggcgcaccacctgccgccgcagacggtgccggacacgacgacccgccaaggctgctgggcctcgtcgtgatggcgacgacgacaaggcgtggctctcgcgaggagcacaaggcgacgccaccaccggagaacggcgcgatcaggcacgggaggaaggccaggcgtacgacggcggcggcagaggaggaggagcgtgacggcgacggcgacgagctctcgctgtcactgacgctggactcggggctcagttgccggagcagcggcggcgccggcgcatactgctgcagcgaaggcagcagcagcaactggctgatctcgtcgccgtcgtcgacgacgagcctcgtcgccggtggctgctcgcggcggagtactccggccatgcttagcagcgtcgtcagcttggacctgtccttgtga

SEQ ID NO: 11807 - DNA, 1107 bp, Oryza sativa
  Clone ID: TFbOSC900191j.C1.o19.fg
atggccggatcttgtagtgtcgccagtagcaacaaatccaagctcgccgatgaagagttcagtccggtgggcatgagggtactcctcatcgatgagagcaccacctacctcaagataatcaccaaactgctgcttaactgcggttataaaggtctgactgtaacaaattttgagattacgtacgtttggcgtgtggatgaagtgacgcccaagacggcggcgcgagatgctgtggaggagcttcacgagaacccttggagctacgacatggtcctcaccgaggtgcacgcgccggctgggatagacggcttcaacctcctccagtacgccggcaccgacatggatctaccagtcgtcgtgttctctgcggacgacgacaagaggacggtgttgaagtgtgtcaacagcggcgcgtgcgactacctggtgaagcccctgcggcacgaggaactgaagaacatatggcagcatgtgtacaggaggaagctgcgcagcggtggtcgtcgcgctgcagctgcaggaaacagcagcaagggggagatcaagaagaggtttaggtggcctaaggagctgcacgagaggtttgtcagcgtcgtccttcagctcggagttgataaggctactccaaaccagatactaccacttctgaatcgggaagatttaactcgggatcagagattcagaatagctctaactaaatcaaaagccctgccaagctgctccacaataccgataggggaaactgttcatgggataccgcttgctcttcaagctattggaacaggaaacaatcaacatctcattgtccctttcaatcggataacttttgtgagaccccgaggagttgaaattggtcaaaatggagtggtgggaggactggttacgggtaataataatgttgttgtgcccacagctacaagtattatagccagagcatttgggcgagagatagttaatggtgctgatctttttgatcacgggaccctgattagagattcatcttccacaagtcatgatggggcgcaaaatgaacttggcgaaactaatcttgcatttgaactaatggcgaaaaagggaagcgatgtggagccaagaattggtggctag

SEQ ID NO: 11808 - DNA, 1524 bp, Oryza sativa
  Clone ID: TFbOSC400151j.C1.o40.fg
atggcttcttcgtcttctgacctaaccctagacgaccaccaccatctgacggcggtggctgcggcgtcggggcaggcgacgcagaagcttcaggagttcttgtcacgtctcgaggaagagaggctcaagatcgacgccttcaagcgtgagctccctctctgcatgcagcttctcaatcatgctatggaggcgtacaggcagcagctggaggcgtaccagatggggagccagcatagcgccgcggcggcggcggcggcgagggcgccgctggtgctcgaggagttcataccggtgaagaacatcgggatcgacgtcgtggcggcggacaaggcggcggcggcggggggcaacagcgtgtcgtcggagaaggcgagctggatggtgtcggcgcagctgtggaacgcgccggcgtcggcgtcggcggcggacacggcggcgaaggggccccagacgcccaaggagcactcggagcaccacccgctcgacacgagccccaagctgatcaccgcgctcgacggcggcggcggcggcggcggcgcgttcctgcccttctccaaggacaacgccatgggtgacggatcagccgccgccgccgccgcgctgccggagctcgcgctcgcgcccgcggagaaggcggcggacgcgatcaccatcgccgccggcgaggtcgacaagaagccgtacgcccacgacaacggcgtcgtggcgagatcgagagaagcccagaacggcgggaagccgccgtcgacgccatcggacgggcaggccgtcccgccgccgccacagccccaccggaaggcgcgccgttgctggtcgccggagctgcaccgccgcttcgtcaatgctcttcagatcctcggcggcgcccaagtggcgaccccgaagcagattcgcgagctgatgaaggttgatggattgaccaatgatgaggtgaaaagccatctccagaagtacaggttgcacacaagacggccgatgccgtcgccggcgccgccgacggcagcgacgccgcagctggtggtgctgggaggcatctgggtgccgccggagtacgcgacgcaggcggcggggccggccatctacggcgcgcacccggcgacgcagccgcactacacggcggcggtggcggcgcaggagtactaccaccaccaccaccaccacctgcagcaccaccccgccgccgccgccctggtgcaccaccgcgccgtagccccgcccccgccgctgccgcctcagcagcagctggcccctccctacagcgccaagtcgtcggcgtcggcgaggctcgggtccccggactccgacggccgtggcagcggcggcggcggcggcgccgccgcctccggagccggaagggacatgtccgagagcatcgaggaggaaggcgagggcgaggagcgggaggacgacgacgacgacgacgagatggcggcgaccaacaacgcccacgccgtcgacggcgacgacgacaacgacgagatcaacaccaccaccaccacgagcgcgggagcgattaactactaa

SEQ ID NO: 11809 - DNA, 1929 bp, Oryza sativa
  Clone ID: TFbOSC101746j.C1.o5.fg
atgagggcggcggaggagaggaagggtgtggtgccggcggcgaggaggagggaccagttccccgtcggtatgcgtgtcctcgccgtcgacgacgacccggtgtgtctcaaggtgctcgagaccctgctgctgcgctgccagtatcatgtgacgacaacaaatcaggctgctatcgcgctgaaaatgctgcgggaaaacagggacatgtttgatctagttatcagcgacgtccatatgccagacatggacggctttaagcttcttgagcttgtggggcttgaaatggacctccctgtcatcatgttatctgtgaatggagagaccaaaactgtattgaaggggataacccatggtgcctgcgactatctcctaaaacctgttcgaatcgaagagctcaggaatatctggcagcatgttatcaggaggaaattcagtactcgcgaccgtgctaatctcgatttctatgaagagtgcaacaagccaccaaatgcggattcagaccatgtgcatggccatgttacatgtggatcacctgatcaaagtgggaggcccagcaagaagaggaaggagtactgtagtgaagaggaggatgagggtgaggtcaatactcaagatattgatgatccctcggctccaaagaagccgagagttgtttggtcagttgaactacaccggaaatttgtcgctgctgtcaaccagcttggaattgacaaggctgtgccaaaaaggatacttgagctcatgaatgttgagaaactcacaagggaaaatgttgcaagtcacctacaggcaaggaactcatttcactatcttctatttattagcatgtactgtcctagaaacaatccagcagctcttggaactcagggggtacctgcttcaaaatcgattcagactatgagcggaagccatacattgagccattccattaatgatgcaaataagtaccaccttagcttaccaggaaaccagaaaggaaacttgggacaaggtttggcaacatcgcttgggcagacccaaatgcaacagaagtggatccatgaagaaaccgatgatctgtccaccatcctttctgggaatggcctatctaatggtatgtctggcacactccaaagtgtcacaagcagtcctttgctgcctcaagaactagccgagtgcacacaagccaaaattgtcagtcagccatcaattcgaacttcctctgtaagttcagaacatattgaaggcgccgttggagtttcatctggtctgcttgaatctcgtgtatcccagcagagtactattcctttatcaggattttccgccaacgggttgctaatccatggttcgtttaacaatacctgtgcaaacaaattgggtggtacatcttcatcgtgtgcacctgctcgctcttcaaatgaccttatggtagcaagagacacaaaaggtggagctagctcttttggtggcgcgatgcttttacctccagatacagagcaaaagtacttgaattttggaggtggaaacggtttgaaacagaagttcgatgataggactgcagacagtctgtttgatctcaagttcgtatggagttctgtaccgagctctcaattggcaagcaacattggggctcatcatgctatgagccaaagatggaacaatagcagtagtaacagtagcaatattggtgccagaatgattgggcaagcaacctcaagtggttcaacagttatcccacaaatgaagacagatttcctcgtttcgggagatatggcgatgccgaagaacgcctccgatttgagcatcccgaaacttcagagcgaacttagctctagcagctgcagcttcgacggccttctcaattccatagtcaaagtggagaaggatgatgttaccttcagcgacgacctggggtgcggcgatttctactcccttggagcttgcatatga

SEQ ID NO: 11810 - DNA, 6408 bp, Oryza sativa
  Clone ID: TFbOSC400505j.C1.o2.fg
atggcgccgccgcgggagctggacctctccgacgaggtcgagggcgaggaggacggcaccaccgacttcgtcttccgcctcgccggcgaccccatccccctcctccctaccacctcctcgccgctcccgctcttcgacctccagtcgcctccctcgcgcccgctcgccgtctccaaccgccgggccgcggtcttccttgcccaccccaacgggtttatggctgcgacgaccaaggcgttgatcgaggccagcaaggaggcgcgcgagaagggcaagtcgaccacccgctgcgcacgggactgctgcgtcgcggacatccctctccccggggtctctctcctcgaactctcccgtgatgaatcggtgcttgctgcctgcgcaggcagtgtgatccacttcttctcggcttcttccctgctcacagacaaggatgtggaaccactgtcatcatgtaccttggaaggatccagcactgtgaaagatttcaagtggctaaatcatgcttccaaagcctttattgtactctcgaaagacgggttgctgtctcaaggaagtctgggggaaggtctgaaggacataatggaaaatgttgatgctgttgactgctgcaaggaagggactcacattgttctttcaaaaaagaatacacttaacatattatcatcagattttaaggaaatatgttgcatgcccctcttgttccagctatggtctgatgatagtgattcagatgatgctagcatcaaagtggattcgattgggtgggtgcgcgatgacagtattgttgttggttctgtaagattgaatgaagaaggcaatgaagagggttatcttgtccaagtaataagaagcggcggaaatacattttttgagaattcaagcaagtcagttgttttcacctatgtggattttttccgaggcatcatggatgatgttttaccatctggagttggacctaatctgctgctgggctatttgcatcgctgggatctaatggtgacttccaacaaaaagagcattgatgaacacatttctctcttgaagtggtcatctgcaactgatgacaaaaaaactgtagtatatcttgagatgttggaggataaatatagtcctaggattgacctacaagagaatggtgatgacaatgtcatattggggtttggtgtcgagaatgtgtcattatttcagaagatcacagtaacagttggtcctgaacaaaaggaggttgctcctcaacatattctactttatctgactggtgaagggaaactgaatatatattatcttgccaggatttctgatccttctgaattacctcaaacaaagctatctgctattgaagatagcgatgtgatgaaagaaatttcacctgtaactgtatctggaaaagagtttactccaagtgctaccagctcattggacaagagtattcgcccagatggggctgagctttctagtgtacaaccagatagagacctgcatggatcaacagatatgaaaaacagttctccagtttcaaaagccaaggaaatagtggcttcctcacctgcacctgcctctttcttagcaccagcaagcaacttgaaacctggaatatctttcagcttttctactgctaatagcgtcagtttgagtccagctggaagcaacacatctagtgaattaggttcttcctggcaacaaagcagcagtagcaatttcgtaaataaccaacttggtaaaggaagcataccttccactcagccggtgggagcatttggaggatctcagaactcaaagaaagatggtaaccttagctttaataaatcatcagtgttcacttctgatggatctaccctggttaagcctggagaaaggaatgaacctggttttggaagtcacccgctgcaaagcagctacactaccgataagaaagttcctagttcagttggcttaagttccaagtcatcaccatcaatttctccaataaaaccttcctcagctggaccttcatccactggctttcgcacaggaaatcttgaggcatttcctacctcccgtggatcacctctaccacaggaaagcattgacaaaccacatgacagaacacatgcagtagtggaccattctaaaaatttcaagttaggcgcaatgttcgatactgaacaggacctgtctaaaaaattttacagtattaatgatatgaccaaggagttagatacactcctatcatacatagagaaggatggtggtttcagagatgcttgcataaccttccaggaacggcctctttctatgtttgagggtgatttgcaaaattttctggaactgttgcagatcttcaagaacaagatagcagaacagtgttcaagagttgaagacctgcggaataagatgtttcaaggcacgtctactactcgtgtctctgctaggcaagcttacatgaaaggaatcgtcgaccaatcttcagatacccaatactgggatatatggaaccgtcagaaattgagtccagaattcgaagcgaagaggcagaatattctcaaggctaaccagaatttgacaaaccagctggtagagctggagaggcatttcaataatctggagatgaacaaatttggagaaacaggaagagttgcttctagtcgcagagctatttattctagtaaggcacgatccagtcagacacaaatatccagtgtttacaatgcgcttaattcacaattagcagcagctgaacaactgtcagactgcctctcaaaacaaatatctgcactaaatataagttctccttctacaaagcgagggtcagtggccaaagagttgtttgaatcgattggtctagatcacacgatggatgcagccaaattttcaggtggtactccttccaagtcagttaagagatatccatcaacgagagaacacataactagcatatcagggccttccaagactgctgagcctgagactgcaaggaggaggagagagtcactggataggagcctggctagtttggagcctcagaaaactactgttaaaagaatagcgcaacaacagcgcctcaagatcagcagtgacctgccattcaggtcaaataagaaaatatttgattctcagatggcagctatgtcccaggagaagtccagcagtagccccacttcctccatagtagaatcatatgcaaacaagctgcattatccaagtgaagtgctgcacgagaaaacaaagccgtcaggaccccagcacaacacactgttcaaatgggtaaaggaatcggctggaccatctcaaggccctcagcataagtatcctgaattaccagggcagctgaaaagttctgaccagacaccaaagttgggctcatcttcaccgttgtcattcagttattcacataaggatgtctgggataatatcagctcatccaatgttccatcctctggaacaactcataccatgccaaagtcaagtactttgacatttaaaaccactgtcattccaaaaactaataccagtacactcccagatttgtcgcctttgatgacgggctcaaaattctctctgagtccattgaccgtgaaaactttatctggggattctggaggtgcgtcatccattattacaaagaacaaacaaggtggacaggcaatgccatatttgggaaccacaaaaggactggatgtttctccacagaatatgggtggtgcatttagagatcttaacaaaccgtctttgtctcctgaacctcccaagtctgctctgttacaagggaagactgtgcaacttggtaagattactgaaacagtgcagagcccagtgaaagctaaacctgaggtggcattccaacctcctgcatttccaccaacacctgttgcacaatcttctccatgctctattaagccaactgttccctcttcagctacatcatcctcgtcaactatgcaagaatcagctgcaaaaacatcagatgttttgtctccaacaggtccttccattcttccatcaaaggaatcaatgacaaaaccttcatcaccattacctgatggtaccatatctagttccctactatctattccaatgcctgttaaggagtcatcaactggcttgaataaaattgtatctaagcctgaagtggttacatcagaggtaactggaacaaccgtttctgcaagtactagctcaagcgtaccaatcactgaaggcaaaccttcatcgattccagcaaccagtggaagcttaccttcaattcctgtctctgcacctaaagtggtgccagtgtctgcagaatctgttgttgtcacttccaccggaaaagatgtaggaccgagcaatccctcatcagatgaagatgatatggaagaggaagttccttctgcaagttcggatctcaacttgggagcccttggtgggtttggtcttgggtctgtgccttcttcaagtcccccaaaatccaatccctttgggaactcatttactacctctgacaataagagttcaggttcgtcatttaccctgacaaccagtccaggacagcttttccgtccggcgtcactgagtattccctcatctcagccagcacagtcatctcaatcaactagctcaagtacattttctagtgcattctcaagtgggcttagtggattcggacagtctgcacagattggatcagcgcagcagtcagggtttgggcagccttcacaaattggagctgggcagcaggcaggatttggtcagccagcacaaattcagtcaggatttggccaaccagcacaagttggagttgcgcaacagtcaggatttgggcagcctgcacaaattgggacagcacagcagtcaggatttgggcagcctgcacaatttggtgctcagcaagcacttggatctgtcctgggttcttttggacaatcacgccaattgggaagtttcggtgctgggggatttggtggattcgctagtgcctctgcttccgggggcttttctagcaattctggatttgctggtggtgcaacaggcggtggcttttctgcagctgctgctcctgctggcggaggatttgctgctgctgctactggtggagggtttgctgctcttgcctccaaaggtgggggttttgcggctgcggcttcatctggtggcggctttggaggtgcagcccagggaagtggcttcagcagtgtggcccttatgcatgcaccaaaaattgttcttcgtgcattagctgtagctattgtggaactcccagcacctggtatagataccatatcacaggagcactttgcttatcttagtacaagtgatatccgtacctgggttagccaccaagattcccttaccaacttagatgaaattgtatcgaaccaccctactacaagcagacagacatttcagtgcatgactggaactgaacagatgatgtatcatcagcaacaggttcagagtgatagccagcacctgtcttcaaggccgggtttgcctccggagaagcaatttctcctgcaaggcggagcagattcatcatcagggcttgtcctctcgaccgacgctaaacctcggttaaaatggacatcagagttgcatgagcgttttgtggaagcagtaaatcagctgggagggccggacaaggcgacgccgaaaacaatcatgaggctcatgggaattcctggattaaccctttaccatcttaagagtcatcttcagaaataccgacttagcaagaatcttcaatctcaagccaatgcttcccgtgcacaaggtgtcttaggttgtagtacgacagagatagataaaccatgtgaaggaaatggatcaccggctagtcacttggacctagagactcagacaaacagcagttctatgcacataaatgaagccctccagatgcaaattgaggtgcagagacggctgcatgaacaactagaggtacaaagacacctgcagcttcggattgaagcccaaggaaagtacctgcagtcagtgctggagaaggcgcaggaggcactcggcaccatcgccgtagcagaaactgctgcaactgcaaacgcctcctcatcgaaacgcctccaaaacgagcacacccagcttcaccatcaccagcagcagcagcaggtcggcgatggatcggtggacagctgcctgaccgcctgcgactgcgagggctcgcatcactcgcgctctcatggccacagaggagagcaggacatcctgtccatcggcttgccgccatttgagccggcagcagcaagatcaggcaaggagcaccactacctgctgttccccaacgagccgagcaggcgacgatcgtgttcggatgaacggcgccgcgagatgagcacgctgcaggcgtcggagctggacctcagcatcaatggcaggtcgtcgtcccactctcacaggcgcgaaaacatcgatctgaatggtgcaggctggagctga

SEQ ID NO: 11811 - DNA, 1254 bp, Oryza sativa
  Clone ID: TFbOSC400832j.C1.o2.gm
atgttcccgcctgggctgatccaccaccggccggacggcggcgaggcggggcgtgcggcggggggagggcccagcctggtgctgaccgccgatcccaagccccgcctccggtggacggccgacctccacgagcgcttcgtcgacgccgtcgcccagctcggcggccccgagagaatagacccttttcgcgacaccaatgtcattggcgccgtgggggacggtgccaatgtcattggcgccatcatgttggactacagcgtcaatgatgttggcaccgcaaaaagggtctattcctggaaagcaacacctaaaactatcttgaggacaatgggtgtgaaggggctcactcttttccacttgaagagtcatcttcagaaatatagactggggaaacaatctggaaaagaggcatcggagcaatctaaagatgcatcctatcttctagatgcccaaggtggaatgagtgtgtcgcctagagtttctactcaagatgttaaagaaaatcaagaggtcaaggaagcattgcgagctcagatggaaatgcaacgaagactgcatgaacaagtggaggtccagaagcatgtgcagatcagaatggaagcctaccagaagtacatcgacactttactagagaaggcatgcaagatcgtctccgagcagcttgcctcaagcggcttcagcatctcggacaatgatctcccggagctctctggtggtgtcatgtgcggctccgctgacacattgagctcctccatcttccaccagctctctgtcagcccaatcaacctgcatagtcctgagggcaagccgacgccctcgggcatcgaaggccaaatgatcctccagaagtcacctgagcttaagcgcaacctagcgctgccgtcgccgccgtttgtccaaccgtgcgtcgcccccgctccggtcgtcatcgtcgctcagggaagccgccgtcgtgatcgtcaagtcgtcgccgacctcgtccgcccctccgtcgtcgccttaggtcaccggagcaccgccgtcgtcgtcaagccgaaggtcgccgccgcttcttcctcgccgccgtcgccgtccgttgatcttccgccgccgttttggtcaccggtgagttcgccgcgtcgcccgcaacccgtaggtgctgtccgttcgcgccgccgcgccgtcgttcgccggcgagcatgcgccgcccgagccgtcgtcggtgatgacgtcaccgctgacgtcatcgtcgccgtgtcccgtggaccgccgtga

SEQ ID NO: 11812 - DNA, 1254 bp, Oryza sativa
  Clone ID: TFbOSC405556j.C1.o2.gm
atgttcccgcctgggctgatccaccaccggccggacggcggcaaggcggggcgtcgggcggggggagggcccaacctggtgctgaccgccgatcccaagccccgcctccggtggacggccgacctccacgagcgcttcgtcgacgccgtcgcccagctcgggggccccgagagaatagacccttttcgcgacaccaatgtcattggcgccgtgggggacggtgccaatgtcattggcgccatcatgttggactacagcgtcaatgatgttggcaccgcaaaaagggtctattcctggaaagcaacacctaaaactatcttgaggacaatgggtgtgaaggggctcactcttttccacttgaagagtcatcttcagaaatatagactggggaaacaatctggaaaagaggcatcggagcaatctaaagatgcatcctatcttctagatgcccaaggtggaatgagtgtgtcgcctagagtttctactcaagatgttaaagaaaatcaagaggtcaaggaagcattgcgagctcagatggaaatgcaacgaagactgcatgaacaagtggaggtccagaagcatgtgcagatcagaatggaagcctaccagaagtacatcgacactttactagagaaggcatgcaagatcgtctccgagcagcttgcctcaagcggcttcagcatctcggacaatgatctcccggagctctctggtggtgtcatgtgcggctccgctgacacattgagctcctccatcttccaccagctctctgtcagcccaatcaacctgcatagtcctgagggcaagccgacgccctcgggcatcgaaggccaaatgatcctccagaagtcacctgagcttaagcgcaacctagcgctgccgtcgccgccgtttgtccaaccgtgcgtcgcccccgctccggtcgtcatcgtcgctcagggaagccgccgtcgtgatcgtcaagtcgtcgccgacctcgtccgcccctccgtcgtcgccttaggtcaccggagcaccgccgtcgtcgtcaagccgaaggtcgccgccgcttcttcctcgccgccgtcgccgtccgttgatcttccgccgccgttttggtcaccggtgagttcgccgcgtcgcccgcaacccgtaggtgctgtccgttcgcgccgccgcgccgtcgttcgccggcgagcatgcgccgcccgagccgtcgtcggtgatgacgtcaccgctgacgtcatcgtcgccgtgtcccgtggaccgccgtga

SEQ ID NO: 11813 - DNA, 894 bp, Oryza sativa
  Clone ID: TFbOSC900052j.C1.o9.fg
atgtcgtcgcagcagcagcacgccggtgaggcccccgcctccgccgccgccgctgcccgggcgcggctcaggtggaccgggcagctgcacgagcggttcgtcctcgccgtggcggagctcggcggcgcggacagggcgacgcccaagtccgtgctgagggccatggccgtgccggggctcaccttgtaccacctcaagagccacctccagaagtaccggcaggcggtgagccgcggcggcaatggaggcggcggaggcagcggcagcctgaacgaccggtcatcctcgtcggagcgccaaccagccgaccacgacggcgatagcgccgccgatgagccgcgcaccattgcttacgacggcgacagcgatggcgatgctaaagaaggtctccgtgattcatccaggagcatggtgcagatgcagagggaagtccagaggaagctccaggagcagattgaggtcaagaggcatctgcaactgaggatggaggcacaggggaggtacctgcagtcagtgctacgcagggcgcagcaagtcctggccgaccatagcctggcaagctcgccggaggccgccacggcggagctctcggagctcgcctccgccgtggacatcgagtgcatgtcctcctcctccccgccgcggcaccaccgccaatccgccgcaaccgacagctgcgtgactacgacgtcgtcgtcggaggccgagagcaaggccgccgggtccaagcggctccacaccagcgattgcaccgtcgagcagccggtgcagggcaagagggccttcaacttcctgcaaaggcacaaccaggcagatcaagaagaagaacaagaagaagaatatgcaggagcagaggatggaagctcatcagagattgatctgaacagtggatga

SEQ ID NO: 11814 - DNA, 1200 bp, Oryza sativa
  Clone ID: TFbOSC17597j.C1.o2.fg
atgaaggagaaggaagtgctagttgagattgttgaggatgatgagctgaagagatcgattggtagaaatcagctggacctcaacgaggaagttatggatgtcgagagcgaggagggagaagtcggcgatgatgaagatgacgaagatgaggaggatgacgacgacgacgatgatggtggtagcaccaccgatgttgccggaagcaggagctccagcaacaacagcagcaccaataacgtttcagagagcaaattgaagggcgacaaggatagcggtggcggcaggttggaggggatcaacggcggagagcagagggtgccatcggtgcggcagtacaaccggtcgaagctgcctcggctccggtggacaccggacctccacatggcctttgtccatgccgttgagaggctcggtggccaagagagagcaactcctaagttggtgcttcagatgatgaatgttagggggctcagcattgctcatgtaaaaagccacttgcagatgtatagaagcaagaagttggatcacgagggtcgccagatcagaggagccatcgcctcagtgttctctccaatggatttccatctgatgagaggcgatcgacgcttccacgacatgctcctccagcgagccgccgcgctctcctcctccaggcaggagcacggcggtttcttctcctcgagaagcggcggcggcggcggcggcctaccgccggaggccagccggctgtacggactcctccaacaccggcagtctccggcgatagcgacgatgcaaacattagacttcaagaacagcagtttcaggaaccaagagtggtcgttcagcttcaaccaccagcggaaggagacgatgaatccgtcgtcgtcgtcgtcgaccaccgcggcgatcaggcggtggccttcagccgccggcgcggtcgccgtcgtcgccggcgagcgacaaagactagcggagagattcggctactacaccgggaacggtggcgcgtcgtcgacgtctctgccgctcatcacgagggccgccatggcggcgccgccgccgatgtttgcggcggccgtggcgccgccgggacgtgatcaccatcgtcttccgtttggatggcacgccggcggcggcggcggcggcggcggtaataagaacaggtcgtcgtcggatcccgtggtgatcgatgaagccctagattcccgccgcctcgag

SEQ ID NO: 11815 - DNA, 1632 bp, Oryza sativa
  Clone ID: TFbOSC400452j.C1.o14.fg
atgggggaggtgaaggagaatgaggtggtagagatttttgagcatgatcatgacaacaagatcagatctcctgaaaactctgtgccaccagccatggtgctggacctcaacgagggcttcggcgagggcagcgaggaagggggagttggcgaagacggagatgaagaagacgatgatgaggacgacgacgacgacgacgatgacgatggcggtagcacaagcgaagttgccggaggagggaggagctccagcaacaacagcagcaccaaccacaattccgggagcgacaaggaccatgacatgaacagcagcagcagcaaggccgacggcggcggcgacagggtgccgacggtgcggcagtacaaccggtctaagctcccccggctccggtggacgcccgacctccacatggcgttcgtccacgccgtcgagaggttgggcggccaagaaagagcaacaccaaagcttgtgcttcagatgatgaatgtgagggggctcagcattgctcatgtcaaaagccatttgcagatgtacagaagcaaaaagctagaccacgagtctggccacgagagaggagccatctcatcagtgttttcgcccatggagttccacatgaggagaggggaccatcgtttccaccaccacgacatgttcttccagcgagccgccgccgctggcgtctcgccgttctcctccaggatgctgcacgagaacggcggcgggttcttcgcttcgaggaatcccggcttgccggagtccagccggctctacggtctcttccaacgccggcagcaagctcccatgcaaaaattcgacttcaagaactgcaatagcttcagtaggaaccaggagtgggcgttcaaccagcagcacgcggcggcgagggccgccggcgccgtcaacggccacggcccggcgaaagggctcatccacgagatgatcttccggaaggaaggaaagccgacgtcgcatctgttcgacgtgagggacgccatcgcctccacccgggtgacctcggcgaccacggccgccgccgccgaccaccggctagacggcgccgggaaggccggcaactttgattggatcgggagcagctcctcccggccgctcacgaggacaatgtcagcggcggcggcggctaccatgggcgaccaccaccatcttcggtggcgaggcggcgccgccggcagcgggaacacgacggcgtcgtcggatccggtggtcgcaagcgaagctgccctaggttccctgctcgagagggcaaagacgaaagcgaccgaggcgatgcgcctcgagacgccggtgaagatgacggcggcggcggtggcggcggaggagatcaacggcaggacgccggacttgcagctgagtttgagcccgaacgcgggagatcacagatcagccggcgagaagaggaagttcttgagtgagcaggaggtggacagtgacaagcagcagctgccactcacgctttccctgtcgctccggggtggtggcgacaatggcggcggcggcggcgcagaagccgccgggaggttagaggaagagatgacaggtagcagcagtagcaagaaggccgctctggggctgagtactttggatctgaccatgtcgatcaaggcattggagtga

SEQ ID NO: 11816 - DNA, 3591 bp, Oryza sativa
  Clone ID: TFbOSC400657j.C1.o5.fg
atgagctcccagagtgttgttgcagtgaagcagattactgctccggacaaaatagtggaaacctgtccatccacaaaacattctgcacataagctgttcgatgttaaaccggattttcaagggttgatagatgacaatttgtcatcctccagtcagtcctcaagcatcaagattgagctgatcagatcatcaagcttgccaaatatactgccgtttcagaaaagaagctctgaacctgaacctgaaagtccactgtctcatgtttcacatcccaatgtttcagagccagtttactcaaattcttcaaccttctgcacaagtttgttttcgtcgtcgtcgatggagacggagccgtgccggcaattgggcactctaccattcctgcctcaccctcctaagtgtgagcagcaggtttcagcagggcactcatcaagctcctccctgctagtacctggtggtgatggtgatattggcaatgctcatgatgaacctgaacagtcagatgatctgaaggatttcctcaatctctctggaggagatgcttctgatggcagcttccatggagaaaacaatgccatggcttttgctgagcagatggagttccagttcttgtctgagcagctagggattgccatcactgacaatgaggagagccctcggttagatgacatatacggcacgccgccgcaactttcatcacttccagtatcatcttgctccaaccagagtgtacagaaagcaggatctcctgtgaaagttcagcttagctcgcctcggtcatcttcgggatccgcgacaactaacaaggcgaggttgaggtggacactggagctccatgagcgttttgtagaggctgtgaacaagctagatggacctgaaaaggcaactcctaaaggtgtgctgaaacttatgaaagtagaaggcctgactatctaccatgtaaagagtcatttgcagaagtatcgcctcgcaaaatatctcccagagactaaggaagacaagaaggcatcctcagaggataagaaatctcagtcaggtagcagtggaaatgattcagtcaaaaagaagaacttacaagtggcagaagctctacgaatgcaaatggaggttcagaaacagcttcatgaacagttagaggtgcaaaggcaactgcagctgcgaatcgaagaacacgcaagatacctgcagagaatactggaagagcagcacaaggtcagcatcagcagcaactccctctcactgaaacccccagccgaatcgcaaccggaatcgccaaaaccaacatcagaaaagaaggaggccgaatccgaagcaggcgccgccacttcagctcagccatcatccgaggataaatcaccagacgcagaatgcaagtcgtcgccgccggtttgcactacccaagatactcagagaaggaggcttgaaaaggaaaagcatggcaaaactgtcgataaggaaacacagaaggtgagctgtaattactgtgggaaggtggttaggacatacaaccgtctggagcaccacttagcgggcatcaggggcaatgtttatccttgcagcttagtacctgacagtgtcaggcaaagcataaagagttcactagaggctcgcaagaaagattggatagcccgaaaaataggaaaacataaatcttctgagcttcctccagtaagaaatctatccctcacatctgctcatgcctgccgacctcttttgcagccaattacatccggtacggatcaagaaggctctgttagttggcaccgctgctttgttcacttcacaaataatttggtgcagcccggggaaactacacaagtaaatgcccatgatgtttcttgcaatgcaagttcatctcagaagggaggccagactatagaagtaactaggcctccatatcaaaatccgtgtatgatgaataagccaccggaaatatcttcagggcagagaattgatccattgagtttctctatggagaattcttcatcacagatgcaagattcggaatcctcaaaggagccaactaatgattacttgaattctcaggcaagaaagtcaataggcaagctcatctttgaagctggacttgagcctggtattctccacttgccatctttcaaggacatggttgatgtgcttgcctgggcccaggtggcaatccctacttatgaatcgattatggaggagcaactaagagaaattcaatgccatgcaagggatctcaagaaacactgggaaatgaatggctgcagtgtaattttggatacctgggagagtcgatgtggtaaaagcttcattagtgttttggtgcattgcagtaaaggcatgttgttcatcaaatcaatggatgtctctgatatcattgatgacgtggatgagctagcagtaatgcttttccgtgtggtggaagaggttggtgtcctcaacattgttcaggttatcacaaatgatgagtcaccttatatgcaagcagcagagcatgccgtgctaaagagatatggctactcgttcttcttcacactatgtgctgaccattgcatcaaccttctgcttgagaacatagcagcacttgatcatgtcaatgaggtcctaatcaaggcaagagaaattaccaggttcatttatagccatgcagtgccaatggaactgaaagggaagtatattcagggcggcgagattctgagcagttctaatttaaaatttgtggcaatgttcatcacattagggaagttagtatctgagagaataaatttggtggagatgtttagctcgcctgaatgggcttcctctgatttggcttctagaagttcattcaggcatgtctatgaagtagtaaaaactgataatgcattttggagtgctgctgctgatattttgaagcttacggatccacttatcactgtgttgtacaaactggaagctgataattgcccaataggtatcttgtatgatgctatggattgcgcaaaagaagacataaagtgcaatcttcgagacaaacatggtgattattggcctatggttgatgagatatgggatcattacttgcataccccagtccatgctgccggttatattctgaatccaaggatcttttacacagaaagattcagttatgatactgaaatcaaaagtgggaccaatgcctgtgtaacccgtctggccaaaaaccattatgatcctaagaaagtggccatacaaatggataggtatcgacgcaaatcagctccttttgattcagactcagcaattcagcaaacaatggaaataccacaagttcgttggtggtcggcacatgggactgacacccctgagctgcaaacgtttgcgatcaggatcttgagccaaacatgcttcggtgcttccatatacaacattgaccggagcatatccgagcagctgcatgttgtgaagaggacatatcctgagcaagagaggttcagaacgatggagtatctacactacaatcttcgcctcgcccattgtgagccatgcgtacgcggtgcttctggggctcaacagcatagtaggctcactagtcaactgggtgactggatctcatcagggcagaccacctcctattacaagtga

SEQ ID NO: 11817 - DNA, 1020 bp, Oryza sativa
  Clone ID: TFbOSC405552j.C1.o1.fg
atggggctggatttgagcctggacctgaagatgttcgcggcgaggagcgccgtgaggatggcggcggcggcggccaaggaggcgacgggggtggaggcgtgcatcaggagcctcgaggaggagcgccgcaagatcgagatgttcaggcgcgagctcccgctctgcgcccgcctcctcgccgacgtgatcgagctgatgaaggaggaggccgggaagaggaggaaggacggcgacgacgcggaggcgaaggcggaggacggcgacaagacgaaatggatgagcaccgcgcagctctgggtggacagccgcggcagcgacgccgattccgagaatgaccgacggagcgggagcacctcgccggcgtcgaggttgctcggcggcgcggaggagtcgtcgtcgagggccgtcgcgccgccgccgtactttaggagggaggaaagggtggttctacgacccgctatgccgttgctgcctccggcttcccacaggtcgcctcctccggcggcggcggcggctgccaccgccgccggcgatgaccaccggcacgttgtcgcgtcaagctttgccaccgccgtgccgtcacccgtcccggcggcgcttagcttgcaggctcaggcgcagcagcagcagcagcaggcgaggaagtcgaggcggtgctggtcgccggagcttcaccggcagttcgtcgccgccttgcagcagctcggtggcccccaagttgctactccaaagcaaatcagggaggtgatgaaggttgatgggctcaccaacgacgaagtgaaaagccatctccagaagtatcggctgcacaaccggaaatcaccaggcacagcttcagcgagccattcgattgtacttgttggtgatctctgggcttctcaggaagtaagctgctctcaatccggatcacctcaaggtccccttcagctctccggctcaggggtggccgtctcggcggccaccgccggcgacagctgctgcgaggatgatgacaagtcggaaggctatgtccgaaaatga

SEQ ID NO: 11818 - DNA, 1632 bp, Oryza sativa
  Clone ID: TFbOSC401760j.C1.o4.fg
atggcgaccgccgccgccacgcagtcgcagccggtgcgcgtcgtgctgcgggtgcgcccgcacctcccgtccgaggcgaactccgcggaggcgccgtgcgtcgggcttctcgggagccaccccggcggcgaggtcaccgtccagctcaaggaccagtacaccagccggaacgagtgctataagctggacgctttcttcggccaagagagccgtgtctgcgagatattcgatcaggaggtcagcgccgtgatcccgggaatcttcgaggggaccaacgcgacggtcttcgcctatggcgctaccggcagcggcaagacctacacgatgcagggcactgaggatttgccggggctcatccccttggcggtttcgaccgtgttggcgctatgtactggcacatggtgctctgttgagatctcatactatgaggtatacatggagcggtgctatgacttgctagagcccaaggcaagagagatcatggtgctggatgacaaagatggcaacttacagctaaagggcttggcctgggtgcctgtgcgatctctggaggaattccacgagatatactctataggagtgcagaggagaaaagttgcccacacaggcctgaacgatgtttcaagtaggagccatgctgtgctatcgatcaggattactactgatgttgttaaagggaagcttaacctcatcgacttggctggtaatgaggacaaccggagaacttgcaatgaggggatccggctacaagagagcgccaagatcaaccagtcgctgtttgcgttgtctaatgtcatatcggctctcaacaagaaagagccacggataccatacagagagagtaaattgacccgcatactgcaagattctcttggaggcaatagccatgctgtcatgatagcatgccttaatcccgtggaataccaggaggcagtccacacagtaagcttggctgctcgttcgcgccatgttacgaaccacatgagttcagcaagcaagcaagagactcctaaagataaggttgacatggaagccaaattgcgagcttggttggaatccaaggggaaaacgaagagcatacaaagaatggatggacttctctccccaaatgcaatcaagactcctctatccatgagccataagaagcaatcagcatctggcagggtttctggtagagtggtgctcccttcattaactccatgcaaagaggacaaaactggatcatctcttaggaaggcactttcccccatttcttcaaacatggatcctcaaaagcaacggacagctgatgatagcaattgcttgatgttgttggagctgagaactccaatgggatcatgcaacatagtagggaaggtcacaggtgctacaccccttgataaatttattgcacttggctctaacctgaaggaatctcttattcagcaataccttgatttcttaaatgttgcaaacaaggaagaactacagaagttgaaaggcattggtgaaaggagggcagagtacattcttgagcttcgagaagattcgcccagaccatttaaatctctttcagatttgggaaatattggtctatcatcaaaacagatacaagatattttgtgcaagacagcgactggaatcttcaaatga

SEQ ID NO: 11819 - DNA, 2937 bp, Oryza sativa
  Clone ID: TFbOSC410608j.C1.o11.fg
atggcccggatcaaggtgcacgagctccgggggaagaacaaggcggagctgcaggcccagctcaaggacctcaaggcggagctctccctcctccgcgtcgccaaggtcaccggcggcgcccccaacaagctctccaagatcaaggtggtgcgcacctcgatcgcgcgcgtgctgacggtgatctcgcagaagcagaaggcggcgctgagggaggcgtacaagaagaagagcctgctcccgctcgacctccgccccaagaagacccgcgccatccgcaggcgcctcaccaagcaccagctctctttgaagaccgagagggagaagaagcgtgagaagtatttccccatgaggaagctggccggcagtgggaaggaggttgaggatgatgttgtacgacacggcgttgaggtggacgcctcgcttcggggcgagcgggagcatgtccttggtggcatccgcgcgaccattggaaacgagggcgttgaggaacaaatggaatgtggcggcagagtgggagtagaaggctgggacggcgcggaagacgacgactgcagcgtcggggcgagaagcggcgccgaggtggttgatgacaggggcaaacacggtgggccggagtgggccgccgtgggagtgcaatgcggcgaggagcgggggcacgagtgggaagaggcgcgcgcgggcgaggcggtacaacacgcaggcggtgaaggggtggtcgtggagatcgatctccacaaccccaaaaacaaaagaaaaaacaaaattctgggaatggagcagcagcagaagcaggaacccggcggcggcggcggcggcgtcagagtcgtcgcgaggatctgcccctgcgcaccaccgccaccaccacccgacgccgccctcaacttccaggtcgccgccctcaatgaccccgccctaatctccttcatcccccgtcgcccaaccgcatccgccgccaccgccgcggcctctggccgaggagatggccccaaggataagcagcagcagcagcagcagaagtacagggtcgatggctgctacctcagagacgatcccaaccaccgcgtcttccacaacgaggtcaagccgctcattgatggcagaggtggaggaggaggaggacgcggcggcgccaaagcctgcgtcgtcgcctgtggtgatgcggctgccaaacgtcacctcttcatggggtctcctgatcaacctggcttgttcaccatggcaatggcgcaactcctcgactcctccaaagccattggtgccgctgtcactgtctcatcctatcaggtgctccaagatactcacatcctcgacctcttggagcccaagaaccatgaggttctcatactagaggatgccgacggacagactcacctcaagggcctctccagggttggtgtcaactcaatcgaggagttttcgcagctttgttgttgcgctaccaaccagcagaggcaccatcccgctaaagattccacccagttacaggattggggacaccaagggctgattatctacgtctctagctttgatcagcaaggcaaagaatgtgctctagctaagataaacttcctcaacctggcaggctatgtggatcccaagcagaagaagaatgaaggtcttgctctactaaccggtaacaagtctatgcatgccttgatgaatgttgtccaagcactgaacagcaaccagagatttgtaccatatagacaaagcaaagtaactcgtattctgcaagattctttatgcaagagcaagacgagcggtagcgtcctgatagcctgtttgggctgcaccaaagaaaatagttatcaaactagtttgactcttacccatgctgaagattgctgccaagattcagtttctactcttgccttggcttctcgctcgagccaagtggtcaatgaacaatactacagcttatccttgagtgctaaaaaatcatcaaagtcaaatatgaacttacctaccgatgccaaaaccttgtcaaggacgtttattcacaaaacaatgtcgatgcaagagaagaatgcccgacctggattcaataatagtggtgtaaaaggcggacaaactcctactgctaatagaaggactcagccaatcattagttcaacgaaaaaatctggaagctcaatctgtacttcaattaagatgaaggaaaattatgctaaacctaaaataagtggaaggaaattattttgtccaagcaacaattcattgaaggaggagaatgctacggatgttgcttctacagtggtaacagaaactaagtcagcaacagaagtacaaccattagtaggcatggaaattcgagctgcattactaaatgaggactatgccttgtcaaatatggaaccggagaattcatgtactgacatgggattgacctgctcttctatcactgataaccttgttgagaagactcctgccagcagtaccctatcctccccaaagttgagtgaccgactgagagagatttcaaactcattgaagcttcttagcactcggccagtgagcgtgagggcagaaaagtgggacatagaatgtgcccggagaatcaacacgattgcaccagagccaaaaactcctgaagtgcatttgaaatttgagcaagcagaagatcccaaggataaacttacggcccgcagcactgggattaagaaatctctagctcaagagtgcttgacttttctcaacagtgctaataaggagcaattaaaaagcttaaagggaatcggagataaaagggcaaactacatacttgagcttcgtgaggagtcaccagagctatttaaagagataagtgatctgagagacatcatcggaatgaattcaaaagagttgcttctcaagagcgaatgctttggtcaggagttggcattctgtgagagaatcagtgctttgcagtggtttgctgctattatgtgttctttgtaa

SEQ ID NO: 11820 - DNA, 1020 bp, Oryza sativa
  Clone ID: TFbOSC400896j.C1.o31.fg
atggatgggcagtgggaggagccgcagcacgcggggcggcggcggcggcagccggagcccgggaagaacctcatcaagatcccttcctaccaggaggtgttcgggagtggcgcctcatcctccgccgcgccgccctcctacaaccctccacccaccaccgccgcctcctcctcctcctcctcgtcgtcgttttcgcaggccttctccttcctcaaatccaccgagttctactccccgccaccgccgccaccacagacgaccaccccaagtctccggtaccatcttctacaccctgactacttgtattatcggataagagagttgcagaagaatttcaagctccgcgtcattttgtgccatattgatgttgaagatgtcgtcaaacctttacatgaagttacaagaacatcactgctacatgactgcaccctcttgtgtggatggagcctggaggagtgtggtcggtacttggagaccattaaagtgtacgaaaacaagtcagctgacagcattcgtgaacatatggataatgactatttatcaaggttgacgcatgctcttacatccattcggcatgttaacaagacagatgttgtgacgcttggctcatcttttgggtcactttcacaagttatgaatgcttctatggaagaactagctcgatgcccaggaattggtgagcggaaggtaaaacgacttcatgacactttccacgagccattcaaacgggtttccagccgcccaaacattgtagtgcctgacactcctgacagagagaaggcgtcaggccaaccttcatcgacaaatgatggtgcacaggatgctgtggagaagccagacgcatccgtgaacaagaagagttctaatgtaagatcagcccttactgaagcctttgccaagtattcagaaaagatacgcaaccagaatcgtgattcaacaaatgtggctggtgaagatcagacgagaagggctatctctttactagaatccgatatgatagaaggagcagctctagcttaa

SEQ ID NO: 11821 - DNA, 375 bp, Oryza sativa
  Clone ID: TFbOSC34362j.C1.o1.fg
atgtcgacgtcggcggcggcgtcggcggcggcggagcagcagcaggaggagggggagcacgggccgttccccatcgagcagctgcaggcatctggaattgctgctctggatgtgaaaaagctcaaggattctggtctgtacacagtggagtctgtggcctatactccaaggaaagaccttttgcaaatcaaaggaattagtgaagccaaagttgacaagatagttgaagcaggcaaaaatgtactgcttgtgatcattgagcaattctattttgaccaaacaggggggatagaaactggctctatcacagagatttatggtgaattccgatcagggaagactcagctgtgccacacgctgtgtgtcacatgtcag

SEQ ID NO: 11822 - DNA, 1059 bp, Oryza sativa
  Clone ID: TFbOSC401508j.C1.o12.fg
atggcctcttccgcgccgtccgcggcggcgggggcgaccccgccggaccccctccgccgcgaccgcatcctctccagcaagctctacctcgacgtcccgggctccaaggctccggtggtgtactcgccggcgtacgacatcgccttcctcgggatcgagaagctgcacccgttcgattcctccaaatggggccgcatatgcaagttcctcaccaaggaagggcacctggagaagaaccgagtggtggagccattggaagcgaccaaggacgatttgctggtggtgcactcggagtcgtacttgaacagcctcaagagcagcctgaaggttgcgtccattgtagagcttcctcctgtggcattcattcctaattggcttgtgcagcaaaagctactgtaccctttcaggaaacaggtgggtgggtcgattctatcggccaagcttgcacttgagagaggatgggccattaatgttggcggagggtttcaccattgttcggcagagcaagggggcgggttttgtgcatatgctgatatttctctctgcattcagtttgcttttgtccgtctaaatatttcaagagtgatgatcatagatctggatgcccaccaaggaaatggccatgaaaaggatttcgctaatgatggaagagtttacactttggatatgtacaatgctggaatatatccctatgatcatgttgctaagcggtatattgatcaaaaagtcgagctagttagtgggacaaagacagaagactacttggatcaacttgacaaggctcttaaggttgcagaaagtagatttcagcctcagttgattgtttacaatgctgggacagatatcctggatggcgatccattgggaagattgaagataagccctcagggcgtggtgatcagagatgagaaggtgttcaggtttgcaaaggatcaaagcatcccactactcatgttaacatcaggaggatacatgaagtcgagcgcccgagtgatcgccgactcgataatcaatctctcgaataaaaacttgatagagcttggtagccagcttggctga

SEQ ID NO: 11823 - DNA, 1062 bp, Oryza sativa
  Clone ID: TFbOSC28316j.C1.o2.fg
atgctggagaaagacaggatagcctacttctacgatgacaatcttggagaagactgcccagtctttgataatctgtttgagttttgccaaatatatgctggaggaactctagatgcggctcgcagattgaatcataaaacatgtgatattgctatcaattgggctggtggattgcatcatgcaaagaagtgcgaggcatcagggttctgctacattaatgatctggttttgggaattctggagcttctcaagtaccatgccagggttctctatattgatatcgatgttcatcacggggatggagttgaagaagccttttatttcactgacagggtaatgactgtaagtttccacaagtatggtgattttttcttccctggcacaggtgatattaaggatataggagaaagagaaggaaaatattatgccattaacattccacttaaagatgggatagatgactccggctttactcgcctttttaaaacagttattgccaaagttgttgagacatatctgccaggtgctattgttcttcaatgcggggctgattccttggcacgggaccgtctggggtgcttcaatctgtccattgaaggccatgctgaatgtgtgaagtttgtcaagaaattcaatatccctctactggtgactgggggtggtggatacacaaaagagaatgtagcacgctgttgggctgttgaaactggtgttcttctagatacggagctcccaaatgaaattccagacaatgaatacatcaaatactttgctccagattatacattgaaagtatcgaatgtgaacatggacaacttgaatagcaagtcatatctaagttcaatcaaagtgcaagtcatggagagtttgcgggccatacaacatgcgcctggtgttcagatgcaagaggttccaccagatttttatatcccagatattgatgaagatgagctggatcctgatgaacgtgtagatcagcatacccaagacaagcagattcatcgcgatgacgagtactatgaaggtgacaacgacaatgatcatgaggacggggcccgttga

SEQ ID NO: 11824 - DNA, 1872 bp, Oryza sativa
  Clone ID: TFbOSC400432j.C1.o32.fg
atggcgtctgatatgaggtcactcaacagccaaaagggacagagttgtggagtttcagaccaagcttgccacagcaaaagcaaaagcggcaatgatggaaaaccatcacatgctaaagcaaatggagtttcctcgttgagcgggagtcataatgatgagaaaattttgaaagagaactctggagcatgcaatttaaattccgaccatgccaatcctttatcagtagatgggaccaaagtttctacagcaaggtcggaacttattgacagttcaggccatgatggttgtctgcatgtcaagaatgaaagctgtatggcttgtgatgatctgcttcaagagtctgacaaagaacagcctgggggtacactggaggatctattttcctttaatgatgaagaggatgatgacagtgactgggaaccctctgctcgccttgctttgagcaggtggttttgcttgaactgtacagtgccaaacatggaggggtttacacattgtcagaattgcgatgagcttaagggatctgtggtagttggatatgatgctttcaaagctcatcttgcacaggcagctttgttatctgctgacgcagcgctgccatcagtatctacagctgtcggttttgatgaaagaatgttgctccatagtgagatagagattaaaccaaatccacatccagaaaggcctgaccgccttcgtgcaatcgctgccagtcttgctgctgcaggtatcttcccttcaaaatgtgtcatggtacctcctcgagaaatcactaaggaagaactcctaagggtccatacttcagatcacattgacagtgttgagcagacaaagaacatgctttacagttacttcacttcagatacctatgcaaatggacactcagcatgtgctgccaaacttgcagcagggatatgtgctgatcttgctaacttgatagtatctgggcgtgttcgcaatggatttgcaatggtgagacctcctggccatcatgcaggggtgaaacaagccatgggtttttgtcttcacaataatgcagcagtggctgcattagctgcacaaagagctggtgccaagaaagtcttaatagttgactgggatgtccaccatggcaatggaacacaggagatatttgatggggacaattctgtcttgtacatatcattacatcggcatgaggatggaagcttctaccctggaactggggcagcaaatgaggtgggagttatggatggccaaggattctcagtcaatataccttggagccgtggtggtgttggagacaatgactacatatttgcttttaagcatgtggtgcttccgatagctgcagaatttgctccagacatcaccatcatatctgcaggatttgatgcagcgaggggtgaccctctgggttgttgtgatgtcacacctgctggatattctaggatggcgtccatgctaactgcttgttcacagggaaaattgttggttatacttgagggaggatacaatcttcggtctatatcctcatcagctactgaagttgttaaggtcctacttggggatagtcctgtttatgatacagatgcaactgaaccatcagaggagggcatacagactgtcttacaagtcctgagtatccagcagcaattttggccagttttagttccatcctttgcatcagttctggcactgcagcggtcggttttttccagatataccactgaagtaaacaagatgaaaaggaagcatgcaggaggggcaggacccttctggtggaaatgggggagtaaaaggctactgtacgaagtgctatttgagggccgctgtctgaggaaaaccaaggatacaggcaaagaaaaattgaatgatgaagcagagccctaa

SEQ ID NO: 11825 - DNA, 1155 bp, Oryza sativa
  Clone ID: TFbOSC400156j.C1.o3.fg
atggcggcgtccggcgagggggcgtcgctggcgtcggcggcgggaggggaggacgggcggcggcggcgggtgagctacttctacgagccgtcgatcggggactactactacgggcaggggcacccgatgaagccccatcgcatccgcatggcgcactcgctggtggtccactacggcctccaccgcctcctcgagctctcccgcccctacccggcctccgacgccgacatccgccgcttccactccgacgactacgtcgccttcctcgcctccgccaccgggaaccccgccctgctcgacgcccgcgccgtcaagcgcttcaacgtcggcgaggactgcccggtcttcgacggcctcttccccttctgccaggcctccgcggggggcagcatcggcgccgccgtcaagctcaaccgcggcgacgccgacatcaccgtcaactgggcggggggcctccaccacgccaagaagggcgaggcctccggcttctgctacgtcaacgacatcgtcctcgccatcctcgagctcctcaagttccacaggcgtgtgctatatgtagacattgatgtccaccatggagatggcgtggaggaagctttcttcactacgaatcgagtcatgacttgttcctttcacaagtatggggactttttccctggtactgggcatatcactgatgttggagcaggcgaaggaaaacattatgctttaaatgtgcccctgagtgatggcattgatgatgatacctttcgtgatctgttccagtgcatcatcaaaaagactgcagttgctgttggagttgaacctgataacaagttaccttataatgactactatgagtactttggtcctgattataatctccatattcaacccagaagtgtggagaacctgaattcgactaaagacctggagaacataaagagcatgatattggatcatctctcaaaaattgagcatgttccgagcactcagttccatgacagaccatcagatcctgaagctccagagcaggaagaggaggacatggacaagagaccacctcagcgcagtaggttatggagtggaggagcttatgaatctgatacagaggatcctgacaacatgaaaactgagaccaatgacttatctgccagctctgtcatgaaggtttga

SEQ ID NO: 11826 - DNA, 1116 bp, Oryza sativa
  Clone ID: TFbOSC10062j.C1.o2.fg
atgggtcataacaaggaagcgcatccagaaactaacaaaagagttcctgcaatagttgatgctctcgaaaaactggagcttacttcgaagcatcgtggttcacaggttcttgaaattcaagatttccaacctgcttcacttgatgatattgcactagttcattcaagatcatacataactggacttgaaaaggctatgagtagggcttcagatgaaggtttgatattcattgaaggaactggacctacatatgctacccagactgtaatgatctatgcacattccctcttgtttttattcccccaatgcttttctcgttggaagactttccaagaatgtctcctttctgctggtgctggaattacattggttgattcagtggttgcagcatcaaagttgggcccgaagccaccgctcggctttgccttagtaaggccaccaggacatcatgctgttcctgaaggtcccatgggcttctgtgtctttgggaacattgcagtggcagctcggtatgctcagaatcaacatggtttaaagcgggtcatgataatagattttgatgttcaccacggtaacggcacatgtgacgccttttatgaggatccggacatattcttcctctcaactcatcagcttggaagctatcctggcaccggtaagatccaccaagttggccagggcaacggcgagggcacgacgctcaacctgccactacccggtggctcaggcgattacgcgatgaggtgcgcgtttgatgaggttattgccccagctgcccagcggttcaaacctgacatcatcctcgtttcagccgggtacgacgcgcacgcgctggacccgctggcggggctgcagttcacgacggggacgttctacatgctggcggcgaggatccgggaggtggcggcggagctgtgcggcgggcggtgcgtcttcttcctggagggcggctacaacctggagtcgctgtccagctcagtggccgacaccttccgtgcgttcctcggcgagcccagcctcgccgcgcggttcgacgacccggcgatgctctacgaggagcccacgcggaagatcagggaggccatcgacaaggccaagcacctccactcgctctaa

SEQ ID NO: 11827 - DNA, 1620 bp, Oryza sativa
  Clone ID: TFbOSC421577j.C1.o6.fg
atggacccctcgtcggcgggcgccggcggcaactcgctggcgtcggcgtcgtgcggcgacgcgcagaagcggcgggtgtgctacttctacgatccggaggtgggcaactactactacgggcagggtcacccgatgaagccccaccgcgtgaggatgacccacgcgctgctcgcccactacggcctcctcgccccggccaagatgcaggtgctccgcccgctccccgcccgcgaccgcgacctctgccgcttccactccgacgactacgtcgccttcctccgcgccgtcaccccggagacccagttcgaccagatccgctccctccgccgcttcaacgtcggcgaggactgccccgtcttcgacggcctctacgcctactgccagacctacgcgggggcctccgtcggcgccgccgtcaagctcaaccacggcacccacgacatcgccatcaactggtccggcgggttgcaccacgccaagaagtccgaggcctccggcttctgctacgtcaacgacatcgtcctcgccatcctcgagctcctcaagctccatgagcgagttctgtatattgatattgatatccatcatggagatggagttgaggaggcattctacacaacaaacagggttatgacagtctcatttcacaagtttggggattatttcccgggaacaggggacatccgcgatattgggtattcagaagggaagtattactgcctgaatgtcccgctggatgatggaattgatgatgacagctaccagtccatcttcaagccgatcatcagcaaagtcatggagatgtatcgtcctggtgcagtcgtgcttcagtgcggcgctgattcgttgtccggtgataggttgggctgtttcaatctctcaggcaaaggtcatgctgaatgtgttaagttcatgaggtctttcaatgttccgttgcttcttcttggtggtggtggatataccataagaaatgttgcacgctgctggtgttacgagacaggagttgcacttggtgaagagctacgggagaagttgccttataacgagtattatgaatattttggtccagaatacagtctttacgttgcagcaagtaacatggagaacagaaatacaaacaagcaattggaggaaataaaatgcaacattctggacaatctctcaaaacttcaacatgctcctagtgtccaatttgaagagcgaattcctgaaacaaagctacctgagccagatgaagatcaagatgatccagatgaaaggcacgaccctgactctgatatgctgttggatgatcacaaacctatgggacactcagcaagaagccttattcacaacatcggagttaagagagaaattactgaaacagagaccaaagatcagcatggtaagagattaacaactgaacataaagtaccagaaccgatggcagacgatcttggttcctccaagcaagttcctgccaccagctcttatgccacggattcctgcatgctattagttacttactccgaggtgttgtatgactgtttcttctgtaggagtttacaaattacaactgtttcttttgttgaagaattccaaagtgtccaggcaatactggacgtggagacattagtctga

SEQ ID NO: 11828 - DNA, 1908 bp, Oryza sativa
  Clone ID: TFbOSC17824j.C1.o4.gm
atggacgcctccgccggaggcggggggaactcgctgccgacggcgggggccgacggggccaagcggcgggtgtgctacttctacgacgcggaggtggggaactactactacgggcaggggcacccgatgaagccgcaccgcatccggatgacccacgcgctgctcgcccactacggcctcctcgaccagatgcaggtgctcaagccccacccggcgcgcgaccgcgacctctgccgcttccacgccgacgactacgtcgccttcctccgctccgtcacgccggagacccagcaggaccagatccgggcgctcaagcgcttcaacgtcggcgaggactgccccgtcttcgacggcctctacagcttctgccagacctacgccgggggatccgtcggcggcgccgtcaagctcaaccacggccacgacatcgccatcaactgggccggcggcctccaccacgccaagaagtgcgaggcctcgggattctgctacgtcaacgacatcgtcctcgccatcctcgagctcctcaaataccaccagcgtgttctctatgtggatatcgatatccaccatggggatggtgtggaggaggcgttctacacgacggacagggtgatgacggtctcgttccacaagtttggggattatttcccggggaccggggacattcgcgatattgggcactcaaaggggaagtattactctctgaatgtcccgttggacgacggtatcgacgacgagagctaccagtcgttgttcaagccgatcatggggaaggtgatggaggtttttcgccctggcgcggtggtgctccagtgcggtgcggactctctgtcgggtgataggttgggttgcttcaacctgtcaatcaggggccacgcggaatgcgtgagattcatgaggtccttcaatgtcccgctgttgctgcttggtggtggtgggtataccataagaaatgttgcgcggtgttggtgctatgagacaggagttgcacttggtcatgagctcactgacaagatgcctccaaatgagtattttgagtactttggtccagattatacacttcatgttgcaccaagtaacatggagaacaaaaacacacgccagcagttggatgatataagatcaagacttcttgataatctttcaaaacttcgacatgctcctagcgtccaatttcaagagcgaccccctgaggctgagctacctgagcaagatgaagaccaagaggatcctgatgaaaggcaccatgctgattctgatgtggaaatggatgatgtcaaacctttggatgactcaggaaggaggagcagtattcagaatgtgagagttaagagagagtctgctgaaacagatgccgcagatcaggatggtaatagggtcgctgcagagaacaccaagggcacagaacctgcggctgatggagttgcacgacggcaacgacggggcaacgacggttcgacggatttgatggtcgtcctcgtccaccaccaagcctactggtccaatctacccaacgaggatgccatggtgttgcaagatggatctacaaacacgaagcatgtcaaaaccgatctaatcggatgcataggagacggctgcagccacgccgatgtcttcctgccgtcctgcgtcgtgctgatggacaccaacgccgcccgcgactgcgacctccgcctcctccgctccgacgactacgtcgcctccctccccgccgtcctcccggagttgtggatctgttccctctgccgcttcaacgtcgacgaggattgcccgattttccatggcttctacatctactgccagacctgcgcaggggactgtgcccgcgccatcatcgatcgctaccatggcgcacaaaacgtcgtcatcaacaaggctttggatggcaacatggccgacaaatga

SEQ ID NO: 11829 - DNA, 1587 bp, Oryza sativa
  Clone ID: TFbOSC900126j.C1.o11.fg
atggacgcctccgccggaggcggggggaactcgctgccgacggcgggggccgacggggccaagcggcgggtgtgctacttctacgacgcggaggtggggaactactactacgggcaggggcacccgatgaagccgcaccgcatccggatgacccacgcgctgctcgcccactacggcctcctcgaccagatgcaggtgctcaagccccacccggcgcgcgaccgcgacctctgccgcttccacgccgacgactacgtcgccttcctccgctccgtcacgccggagacccagcaggaccagatccgggcgctcaagcgcttcaacgtcggcgaggactgccccgtcttcgacggcctctacagcttctgccagacctacgccgggggatccgtcggcggcgccgtcaagctcaaccacggccacgacatcgccatcaactgggccggcggcctccaccacgccaagaagtgcgaggcctcgggattctgctacgtcaacgacatcgtcctcgccatcctcgagctcctcaaataccaccagcgtgttctctatgtggatatcgatatccaccatggggatggtgtggaggaggcgttctacacgacggacagggtgatgacggtctcgttccacaagtttggggattatttcccggggaccggggacattcgcgatattgggcactcaaaggggaagtattactctctgaatgtcccgttggacgacggtatcgacgacgagagctaccagtcgttgttcaagccgatcatggggaaggtgatggaggtttttcgccctggcgcggtggtgctccagtgcggtgcggactctctgtcgggtgataggttgggttgcttcaacctgtcaatcaggggccacgcggaatgcgtgagattcatgaggtccttcaatgtcccgctgttgctgcttggtggtggtgggtataccataagaaatgttgcgcggtgttggtgctatgagacaggagttgcacttggtcatgagctcactgacaagatgcctccaaatgagtattttgagtactttggtccagattatacacttcatgttgcaccaagtaacatggagaacaaaaacacacgccagcagttggatgatataagatcaagacttcttgataatctttcaaaacttcgacatgctcctagcgtccaatttcaagagcgaccccctgaggctgagctacctgagcaagatgaagaccaagaggatcctgatgaaaggcaccatgctgattctgatgtggaaatggatgatgtcaaacctttggatgactcaggaaggaggagcagtattcagaatgtgagagttaagagagagtctgctgaaacagatgccgcagatcagttgttatggttaatgtgtgctcaaaggtgtgatggtaatagggtcgctgcagagaacaccaagggcacagaacctgcggctgatggagttggttcctcgaaacaaactgttcctaccgatgcaagtgcgatggccatagacgaaccaggctccctgaaagtcgagccagataactcaaacaaattgcaagatcaaccatcggtgcaccagaagacataa

SEQ ID NO: 11830 - DNA, 1059 bp, Oryza sativa
  Clone ID: TFbOSC9612j.C1.o1.fg
atggcgagggcggcggcggcgggtgctccgcctccgggcgctggtcgagtcggctggcggctagggctcgcgtgccttgcctaccttgctctttggcgaatgggtggtgtatttatccatggcggcgggggaaggagcggaggccactggcgagggtggcgtagactagccgacgttagggggaggaggccagtggggcgcgggtcccgcgccaccgcccgccacgtgctccgtgaggtgggccgcgacgacgtcgtcgtcgtcgacggccgcgccgtctctgcccagttcgccatggctggcgtagacccgggcactgcgacggtggcaggaaggcgagtgtatgtgaggaggccggtggggcgaggcgggaccggcgtcaacggggcgaagcggcggcccgtcttcgacggcctctacagcttctgccagacctacgccggcggctccatcgacggtgccatcaagctcaaccacggccacgacatcgccatcaacaccctcgagctcgcctgcgcggcgacaccctccccttctccaacggcgctgcccccgccgacgccgacgtcctcctctttctcccacctcctgggcctctctgaccctaagacggtggggcaggggagagggcgagaaccgcggcgacggcctcccgcgcccaccctcacccgccgccacccagctcctctcctggtaaccatgccgcccgcgccaagctccatgtcgccggctgcgcactactctgcccccgatggccgcaccctgctcctcccccgacggtcgcgctcagctcctcccccggcgacggtggcggcgtgggaggacggcagtgagaggccgtgcggcaccggcaatcggtgtccaacggtctcgccgagggcttctgcctcatcgccctcctcgagttcctctactaggaggcccccgacgccatgcgcagcctcacctccgcctacgccgccctcgccgatggcctcggctgcttcttcgccggtggcctacgccgcccttgctggtggcctccgctccttccccctccgtcctgagaagatagagtga

SEQ ID NO: 11831 - DNA, 1371 bp, Oryza sativa
  Clone ID: TFbOSC28291j.C1.o2.fg
atggccaccggcgggaactcgctgccgtcgccgtcgtgcgccgatgacaagaagcggcgggtgtgctactactacgaccccggcatcgcccacatcaaattcagcgacgaccatgtcatggtgcccgcccgcgtcgccatggcgcacagcctcgtcggcgtctacggcatgctcggcgacatgcgccgcctccgcacgagacccgccacggaggcggagatccgccgcttccactcgccggagtacgtcgacctcctccgcgacctcaccccggagagctacttcaacgacgccgcgcttcggcagaaggcggaggatgaccacggcatcggcggcgacgacgattgccccgccttcgaccgcctctggaagtactgccgcggctaccccggcgggtcgttcgccgcggcgcgcgcgcttgtcgacggcgcctccgacatcgccatcaactggtccggcggcatgcaccacgcgtccgcctgcaaggccaccggcttctgctacgtcaacgacatcgtgctcgccatcaacgagctcctcggcaccttcaggcgagtcatctacgtcgacatcgacgcgcaccacggcgacggcgtgcagaacgccttcttggactccaaccgggtcatgacgctgtcgttccaccggtacggcaaaatcacgccccacaaggacttcttcccgggctccggcgccatcaacgaaatcggcgacggcgccggcgagcactacagcgtgaacgtgcccctggacgccggcgtccgcgacgacgtgtaccacacgctgttcaagccgatcgtgggcaaggccatggaggtgttccagccggaggccatcgtgctgcagtgcggcgccgactcgctctccggcgaccgcctcggcggcatggagctgtcggtgcggggccacgcggagtgcgtcagcttcctccgcgggttcaacctgccgctgctcctcgtcggcggcggcggctacaccatcaaccacgtcgcctccgcgtggtgctacgagacggcggtcgccgtcggcaaggagaggaagctccccgacgacatagagatacccagccacggctacgagctcatgtacaagaaccaggggaacaagctccattacaagacgtcgacagcgacggcggcgagaaaaaggtcgagcagcacggaggtcaccaaggggaaggtgctcgagcacctgtcgcaggtcaagcgcgcgccgagcgtgcagttccaggagcgacgcggcggcgacaatgccgccggagttgggctctactacgagcgccctccgagcctggaagacgacgaacccgcgcagaggctgcaccgcctctgcttccctggcctgacgaagcgtatcaggctcaatgactga

SEQ ID NO: 11832 - DNA, 1029 bp, Oryza sativa
  Clone ID: TFbOSC24451j.C1.o3.fg
atgaagccccatcgcatccgcatggcgcactcgctggtggtccactacggcctccaccgcctcctcgagctctcccgcccctacccggcctccgacgccgacatccgccgcttccactccgacgactacgtcgccttcctcgcctccgccaccgggaaccccgccctgctcgacgcccgcgccgtcaagcgcttcaacgtcggcgaggactgcccggtcttcgacggcctcttccccttctgccaggcctccgcggggggcagcatcggcgccgccgtcaagctcaaccgcggcgacgccgacatcaccgtcaactgggcggggggcctccaccacgccaagaagggcgaggcctccggcttctgctacgtcaacgacatcgtcctcgccatcctcgagctcctcaagttccacaggcgtgtgctatatgtagacattgatgtccaccatggagatggcgtggaggaagctttcttcactacgaatcgagtcatgacttgttcctttcacaagtatggggactttttccctggtactgggcatatcactgatgttggagcaggcgaaggaaaacattatgctttaaatgtgcccctgagtgatggcattgatgatgatacctttcgtgatctgttccagtgcatcatcaaaaagactgcagttgctgttggagttgaacctgataacaagttaccttataatgactactatgagtactttggtcctgattataatctccatattcaacccagaagtgtggagaacctgaattcgactaaagacctggagaacataaagagcatgatattggatcatctctcaaaaattgagcatgttccgagcactcagttccatgacagaccatcagatcctgaagctccagagcaggaagaggaggacatggacaagagaccacctcagcgcagtaggttatggagtggaggagcttatgaatctgatacagaggatcctgacaacatgaaaactgagaccaatgacttatctgccagctctgtcatgaaggtttga

SEQ ID NO: 11833 - DNA, 1533 bp, Oryza sativa
  Clone ID: TFbOSC421577j.C1.o3.fg
atggacccctcgtcggcgggcgcgggcggcaactcgctggcgtcggcgtcgtgcggcgacgcgcagaagcggcgggtgtgctacttctacgacccggaggtgggcaactactactacggtcagggccacccgatgaagccccaccgggtgaggatgacccacgcgctgctcgcccactacggcctcctcgccccggccaagatggaggtgctccgcccgctccccgcccgcggcatcgacctctgccgcttccactccgacgactacgtcgccttcctccgcgccgtcaccccggagacccagctcggccaggtccgcgccctccgccgcttcaacatcggcccggactgccccgtcttcgacggcctctacgcctactgccagacctacgcgggggcctccgtcggcgccgccgtcaagctcaaccacggcacccacgacatcgccatcaactggtccggcgggttgcaccacgccaagaagtccgaggcctccggcttctgctacgtcaacgacatcgtcctcgccatcctcgagctcctcaagctccatgagcgagttctgtatattgatattgatatccatcatggagatggagttgaggaggcattctacacaacaaacagggttatgacagtctcatttcacaagtttggggattatttcccgggaacaggggatatccgcgacattgggtattcagaagggaagtattactgcctgaatgtcccgctggatgatggaattgatgatgacagctaccagtccatcttcaagccgatcatcagcaaagtcatggagatgtatcgtcctggtgcagtcgtgcttcagtgcggcgctgattcgttgtccggtgataggttgggctgtttcaatctctcagggaaaggtcatgctgaatgtgttaagttcatgaggtctttcaatgttccgttgcttcttcttggtggtggtggatataccataagaaatgttgcacgctgctggtgttacgagacaggagttgcacttggtgaagagctacaggagaagttgccttacaatgagtattatgaatattttggtccagaatacagtctttacgttgcagcaagtaacatggagaacagaaatacaaacaagcaactggaggaaataaaatgcaatattctggacaatctttcaaaacttcaacatgcacctagcgtccaatttcaagagcgaattcctgaaacaaagctacctgagccagatgaagatcaagaggatccagatgaaaggcacgaccctgactctgatatggtgttggatgatcacaaacctacgggacactcagcaagaagccttattcacaacatcggagtaaagagagaaattactgaaacagagaccaaagatcagcatggtaagagattaacaaccgaacataaaggaccagaaccgatggcagaggatcttggttcctccaagcaagctcctgagtttaccattgtttcttttgttgaagaagtccataatgttcaggcaatactggacgtggaggcattagtctga

SEQ ID NO: 11834 - DNA, 501 bp, Oryza sativa
  Clone ID: TFbOSC401324j.C1.o28.gm
atgctggagaaagacaggatagcctacttctacgatggccatgctgaatgtgtgaagtttgtcaagaaattcaatatccctctactggtgactgggggtggtggatacacaaaagagaatgtagcacgctgttgggctgttgaaactggtgttcttctagatacggagctcccaaatgaaattccagacaatgaatacatcaaatactttgctccagattatacattgaaagtatcgaatgtgaacatggacaacttgaatagcaagtcatatctaagttcaatcaaagtgcaagtcatggagagtttgcgggccatacaacatgcgcctggtgttcagatgcaagaggttccaccagatttttatatcccagatattgatgaagatgagctggatcctgatgaacgtgtagatcagcatacccaagacaagcagattcatcgcgatgacgagtactatgaaggtgacaacgacaatgatcatgaggacggggcccgttga

SEQ ID NO: 11835 - DNA, 396 bp, Oryza sativa
  Clone ID: TFbOSC401369j.C1.o85.fg
atggtgcccgcccgcgtcgccattgcgcacagcctcgtcagcgtctacggcatgctcggcgacatgcgccgcctccgcacgagacccaccacggaggcggagatccgccgcttccacttgccggagtacgtcaacctcatccgcaacctcaccccgaagagctacaccaatgacgtcgtgcttcggcagaaggcggaggatgaccacggcatcggtttactcggcgacgacaatgattgccccgccttcgaccgcctttggaagtactgccgcggctacgccggtgggtcgcttgccgcggcgcgcacgctcgtcaacggcgcctccggatctcaccgccgccgcatcgtgatgttcctgttcccgttccgcagccacatcgccccgatgctctag

SEQ ID NO: 11836 - DNA, 555 bp, Oryza sativa
  Clone ID: TFbOSC33840j.C1.o1.fg
atggacccctcgtcggcgggcgcgggcggcaactcgctggcgtcggcgtcgtgcggcgacgcgcagaagcggcgggtgtgctacttctacgacccggaggtgggcaactactactacggtcagggccacccgatgaagccccaccgggtgaggatgacccacgcgctgctcgcccactacggcctcctcgccccggccaagatggaggtgctccgcccgctccccgcccgcggcatcgacctctgccgcttccactcggacgactacgtcgccttcctccgcgccgtcaccccggagacccagctcggccaggtccgcgccctccgccgcttcaacatcggcccggactgccccgtcttcgacggcctctacgcctactgccagacctacgcgggggcctccgtcggcgccgccgtcaagctcaaccacggcacccacgacatcgccatcaactggtccggcgggttgcaccacgccaagaagtccgaggcctccggcttctgctacgtcaacgacatcgtcctcgccatcctcgagctcctcaagctccatgag

SEQ ID NO: 11837 - DNA, 1446 bp, Oryza sativa
  Clone ID: TFbOSC10030j.C1.o2.fg
atggccggcggcggcggcaattcgctgccttcgccgtcgtgcggcgacgacaagaagcggcgggtgtgctactactacgacccggggatctccaccgtcgactacggcgagggccacgtcatggtgccgcaccgcgtcaccatggcgcacaacctcgtcgccgcctacggcatgctcggcgacatgcgccgcctccgcacggcgcccgccacggcggcggagctcgccgacttccacgacgagggctacctcgccctcctccaggacctcaccccggacggctgcggaggcgacgacggggtcggcgacatggcgcgcgccaggggcatctacgccgtcgagggcaagggcggcggccgcggcgtcgacaacccggtgttcgaccgcctctgggattactgcctccgctactccggcgggtcgctcgccgcggcgcgcacccttgggagcggcaccgccgacatcgccatcaactggtcgggcgggatgcaccacgcgtgccgcggcggcgcgaggggcttctgctacgtgaacgacatcgtgctcgccatccgcgagctgctcgcccacttccgccgcgtgctctacgtggacatcgacgtccaccacggcgacggcgtccaggccgccttcgaggcgtcgaaccgggtgatgacggtgtcgttccaccagcacggcggcggcttcttcccgggctccggcgccgtcgccgacgtcggcaagaagggccccggccgctactgcgcgctgaacgtgccggtgagcgtgggcatcggcgacgaggagtaccaccggctgttcgagccgatcatggcgagggtgatggaggtgttccagccggaggccgtcgtgctgcagtgcggcgccgactccctcgccggcgaccggctcggcgagctgaacctgaccacgcgcggccacgcccagtgcgtcagcttcatccgcagcttcaacctgccgctcctcctcctcggcggcggcggctacaccatcaaccacgtcgcctcctgctggtgcaatgagacggcggtggccatcggcaaggagatccccaacgacatacccaagcatggtttcgacgtgttctacaagaaccaggagtacaagctccactacaagttggagacgaagcacctgcaccgcaaccgcaacacggcgaactccatagacggcatcaggatggcggccatggagaacctctccaaactgaagctggaggcggcggcgagcgtgcagttcgaggagcgccgccaccggagcatcaacgtcggcgacctctactacgacccacgcgagcaggaagaggaagaggagagccccacggcgaggctgcaccggaagctctacttcgagcccaccggagatcaggagagcccctacactaagcacaggtgcaacgtgcagccaggggagtcgagtagtagaaagcagcgtaagctaaagtga

SEQ ID NO: 11838 - DNA, 237 bp, Oryza sativa
  Clone ID: TFbOSC33846j.C1.o1.fg
atggagatgtatcgtcctggtgcagtcgtgcttcagtgcggcgctgattcgttgtccggtgataggttgggctgtttcaatctctcaggcaaaggtcatgctgaatgtgttaagttcatgaggtctttcaatgttccgttgcttcttcttggtggtggtggatataccatagaaatgttgcacgctgctggtgttacgaggaacacctgttgctacagctatggttttatcctctga

SEQ ID NO: 11839 - DNA, 372 bp, Oryza sativa
  Clone ID: TFbOSC418633j.C1.o11.fg
atggacgccgttggtggcgggaaggtgaagaaggcggcgggcgggaggaaggccggcgggccgaggaagaaggcggtgacacgctccgtcaaggccgggctccagttccccgtcggccgtatcgggcgctacctcaagaaccgtcggccggtcgatctcatctccgccgctccttccccgttagccgccccgaccctcttccccaccacgtcggtgacgccgtcgaccctctttcccatcgcgtcggtgacgccgccgccgccaccgcattgggccctcctctctgcgtcagtgatgatggccgcagccgcgtgtcgccgtcgccgaccgcacgagggggacggggaggccggcgagctcacaccgccttga

SEQ ID NO: 11840 - DNA, 3351 bp, Oryza sativa
  Clone ID: TFbOSC400014j.C1.o15.gm
atgacgatggccgacggtgcggggcgtgatcgctccggcctcgggccggggaagaggaaggagagggtgcgcccggagtccacgtcacgcgtcctcgctcgtgccggctcctccgacacaacaggcctccagtgtccatacgggcagtatgaggccccgaactgtgcagtcgcggtcagctgtcggctgtcgagcgggcaccgcgcggggagaactacaacaaggttttcacccgccagctataacagaaaaaagggatggctcgacaacgtcctcaagaaggaagatgatactcgaagtgccgtcgttgtcgtccgggcggtggccggcccggagctcggcggggcgaggcaagagagactgcgcgagctcaagacgtggttctccggaccactccacgcggagtcggcgccgggctgcgggcggagcgcggcgggcgagagcggcgatgggcgggcggcgggcaagctccaggtcgctccgtgcgagtcacgtcaccgggggcgcggcgactggtgggtgtgggcggccgccctcctccgactttgccccctactcctcgcacatcacctcctgccggaggcaggcaggcgcggactgggcggcgatgacgacgactcgccctcctcatctccccgtctcccgccggcctcctctcccacttctcccgccggtgaagaaggcgacaggcgggaggaaggccggcgggcgaggaagaaggcggtgacgcgctccgtcaaggccgggctccaattccccgtcggccgtatcgggcgctacctcaagaaaagccggccggtcgatctcctctccgccgctccttccccatcggccgcgccgaccctcttccccaccgcgtcggtcacgccgccgaccctctttcccaccgcgtcggtgacgccgccgaccctctttcccacacacgcacctcaagatattcctctctacccatcctcagcagacatggcgagaaaggagggggaagggctggatctggtagcgatggaagaagagctggatctgtattcttgggaacccgtggtgacgcttgccatatctttgctggacagagccatatcctacttgggtgaggacactagctgggcggaggggcggaacaagaacagatttggtggtttcagcagtcaaatgttttattatctccaacctgccagaggaaggtttcaagacttccgtctgcgtctgattaattggccaaagtcgtactgttgtggctatgaggaaatctggaagttcaggattgcggttgagctattggaggatttgatcgaggagatcgaacaccgccggctggaggaagatggtcgcattcctgccttgttcatgaatgctaaggcaaagatcgccttcaagtttgcgacaaatgattatttcagggaggagtgggacaggctgttccaggagttcacaaccttcaggctagaggacttgatcacggatatcgaacaccttagactggaagagagtggaaaaaagatctccaacaagaagtttgcgagatctcctgatcagtataaacaacaggctaggctatttttcctgctagagagaggtgtatcacgtttacgcgaccaattaccagcggtggtcgaacatgtggttagccaagatagggagctggttgaccttgagaaggaggagttgcatgcagagctggttggccgagatagggagaagaagcagatagtgcagtgcctcatcatcagcacagcaggcgcagaaatcaagcgtgtagcgagcgcaggccacatccaggagtatctttcagtccggatctcgaggcactgtcacaatggtaaaacccccgtcatcgccaacgagcctggctccgcgggggcggacaccgccgccggcgccgcggcgagcattgcccgcgcggaacttccgctccccgaacccgagcgcgtctccgatcccgcggttcccctccctccgcctgccctcgtctcggagccgccacctaccaccgctactgtcgccaaagtggaagatgaggagaagcccacggccgtcgcccaccaggaggcggcgcccagggattacgcgttccagcgagcgctcaagaccgcggagaacaagagcgacccgtgcggcggccggtacatctacgtgcacgagctgccgccgcggttcaacgacgacatgctccgggagtgcgagaggctcagcctctggaccaatatgtgcaagttcatgagcaacgaagggcttggtccgccgttgggcaacgaggaaggggtgttctccaacaccggctggtacgcgacgaaccagtttatggtggatgtcatcttcaggaaccggatgaagcagtacgagtgcctgaccaaggactcgtccatcgctgccgcggtgtttgtgccgttctacgccgggtttgatgtggcgaggtatctttgggggcacaacatttcgacgagggatgccgcgtcgctggatttgatagattggctgaggaagaggcctgaatggaatgtgatgggcgggcgtgaccatttcttagttggcggcaggattgcgtgggatttcaggcgcttgacggacgaagagtcggattggggcaacaagctgcttttcatgccggctgcgaagaatatgtcgatgttggtggtggagtcaagcccatggaatgccaatgattttgcgataccatatcctacttacttccaccctgccaaggatgctgatgttttgctttggcaggatagaatgaggagcctggaacgaccatggttgttctcgtttgctggggctcctcgtcctgatgatcccaagtctatcagaagtcagcttattgatcaatgcaggacatcaagtgtctgtaaattgctggagtgtgatcttggggagagcaagtgccattcccctagcgcaatcatgaatatgttccagaactctttgttctgcttgcagccccaagatggcgtccgtaagggaaatgtcagcattgaggacaggcttaaaagtatccatccagatatggtcaagaagatgagggaagaggtcattagtctcatcccaagggtgatatatgctgatccaaggtcaaagctggagaccctgaaggatgcattcgatgtttctgtagaggcaataattaacaaggtgacacagttgagaagagatatcatcgaagatcatgaagataaagattttgttgaagagaatagctggaagtatgatctgttggaagaagggcagaggacaattgggcctcatgaatgggacccgttcttctctaagcccaaggacaagggtggagattctactaatccatctactaatgctgccaagaactcctggaaaaacgaacaaagaggtcagaactaa

SEQ ID NO: 11841 - DNA, 462 bp, Oryza sativa
  Clone ID: TFbOSC33599j.C1.o1.fg
atggcgcccaaggcggagaagaagccggccgcgaagaagcccgcggaggaggagcccgcggcggagaaggccgagaaggccccggcggggaagaagcccaaggcggagaagcgtctccccgccggcaagggcgagaagggcagcggcgaggggaagaaggcggggcggaagaaggggaagaagagcgtcgagacctacaagatctacatcttcaaggtgctcaagcaggtccaccccgacatcggcatctcctccaaggccatgtccatcatgaactccttcatcaacgacatcttcgagaagctcgccggagagtccgccaagctcgcgcgctacaacaagaagcccaccatcacctcccgggagatccagaccgccgtccgcctcgtcctccccggcgagctcgccaagcacgccgtctccgagggcaccaaggctgttaccaagttcacttccgcttag

SEQ ID NO: 11842 - DNA, 453 bp, Oryza sativa
  Clone ID: TFbOSC414554j.C1.o2.fg
atggcccgtaccaagcagaccgctcgtaagtccacaggaggaaaggctcccaggaagcagcttgccaccaagagtgatttcgacagatggtcttacatcaccatctctgtgcaggctgctcgtaagtctgctcccaccactggaggagttaagaagccccaccgttaccgccctggaactgttgccctccgtgagattcgcaagtaccagaagagtactgagcttttgatcaggaagctgcccttccagaggcttgttagggaaattgcacaggacttcaagaccgatctgcgtttccagagccatgctgtccttgccctccaggaggctgcggaggcataccttgttggtctcttcgaggacaccaacctgtgcgccattcatgccaagcgtgtgaccatcatgcctaaggacattcagctggctaggaggattcgtggtgagagggcttaa

SEQ ID NO: 11843 - DNA, 698 bp, Oryza sativa
  Clone ID: TFbOSC100615j.C1.o3.np
cagacccgcacgaagcagacggcgtgcaagtcagggactcgaggaagcagctggcgaccaaggcaacgtgcaagtcagctccggccaccggcggcgtgaagaagccgcaccgcttcaggccaggcaccgtcgcgctccgtgagatccgcaagtaccagaagagcacggagctgctcatccgcaagctccccttccagcgcctcgtccgcgagatcgcccaggacttcaagaccgacctccgcttccagagctccgccgtcgccgcgctgcaggaggccgccgaggcgtacctcgtcgggctgttcgaggacaccaacctgtgcgccatccacgccaagcgcgtcaccatcatgcccaaggacgcggcgcgcaagtcggccccggccaccggcggcgtgaagaagccccaccgcttcaggcccggcaccgtcgcgctccgtgagatccgcaagtaccagaagagcacggagctgctcatccgcaagctccccttccagcgcctcgtccgcgagatcgcccaggacttcaagaccgacctccgcttccagagctccgccgtcgccgcgctgcaggaggccgccgaggcgtacctcgtcgggctgttcgaggacaccaacctgtgtgccatccacgccaagcgcgtcaccatcatgcccaaggacatccagctcgcgcgccggatccgcggcgagcgcgct

SEQ ID NO: 11844 - DNA, 462 bp, Oryza sativa
  Clone ID: TFbOSC21552j.C1.o3.fg
atggcgcccaaggcggagaagaagccggcggcgaagaagcccgcggaggaggagcccgcggcggagaaggccgagaaggccccggcggggaagaagcccaaggcggagaagcgcctccccgccggcaagggcgagaagggcagcggcgaggggaagaaggcggggcggaagaaggcgaagaagagcgtcgagacctacaagatctacatcttcaaggtgctcaagcaggtccaccccgacatcggcatctcctccaaggccatgtccatcatgaactccttcatcaatgatatcttcgagaagctcgccggagagtccgccaagctcgcgcgctacaacaagaagcccaccatcacctcccgggagatccagaccgccgtccgcctcgtcctccccggcgagctcgccaagcacgccgtctccgagggcaccaaggccgttaccaagttcacttcctcctag

SEQ ID NO: 11845 - DNA, 125 bp, Oryza sativa
  Clone ID: TFbOSC401577j.C1.o1.hg
ccgccgaggcctacctcgtcggcctcttcgaggacaccaacctctgcgccatccacgccaagcgcgtcaccatcatgcccaaggacatccagctcgcccgccgcatcaggggcgagagggcttga

SEQ ID NO: 11846 - DNA, 357 bp, Oryza sativa
  Clone ID: TFbOSC420432j.C1.o1.fg
atgtcgcaacgcatccacttcctctctcgttgccaattcgagtcttctcaacctctcgatccgggcgtgatggtgccgaaggcggagaagaagccggcagagaagaagccagcagaggagaaggtgcatccagacataggaatctcctccaaggccatgtccatcatgaattccttcgtcaacgacattttcgagaagctcgagcaggaggccgcgaggcttgccaggtacaacaagaagcccacaatcacctcccgcgagatccagacctctgttcgtctcgtcctccccggcgagcttgccaagcacgccgtctccgagggcaccaaggccgtcaccaagttcacctcctcctaa

SEQ ID NO: 11847 - DNA, 411 bp, Oryza sativa
  Clone ID: TFbOSC400405j.C1.o21.fg
atggcgcgcacgaagcagacggcgaggaagtcgaccggcgggaaggcgcctcggaagcagctggcgacgaaggcggcgcggaagtcggcgccggcgaccggcggcgtgaagaagccgcaccgcttccggccgggcacggtggcactccgggagatccgcaagtaccagaagagcacggagctgctgatccggaagctcccgttccagcggctggtgcgggagatcgcgcaggacttcaagacggacctccggttccagtcgtccgccgtcgccgcgctgcaggaggccgccgaggcctacctcgtcggcctcttcgaggacaccaacctctgcgccatccacgccaagcgcgtcaccatcatgcccaaggacatccagctcgcccgccgcatcaggggcgagagggcttga

SEQ ID NO: 11848 - DNA, 617 bp, Oryza sativa
  Clone ID: TFbOSC400405j.C1.o24.gp
tttgccaagaacagattgtattccatcaatgcgaacccaattcaagcgagtgattacaggataacacagatccatgggttaattaacacttctagatctaacaagccatgaactcgaacaataacggcatcaagccctctcgcccctgatgcggcgggcgagctggatgtccttgggcatgatggtgacgcgcttggcgtggatggcgcagaggttggtgtcctcgaagaggccgacgaggtaggcctcggcggcctcctgcagcgcggcgacggcggacgactggaaccggaggtccgtcttgaagtcctgcgcgatctcccgcaccagccgctggaacgggagcttccggatcagcagctccgtgctcttctggtacttgcggatctcccggagtgccaccgtgcccggccggaagcggtgcggcttcttcacgccgccggtcgccggcgccgacttccgcgccgccttcgtcgccagctgcttccgaggcgccttcccgccggtcgacttcctcgccgtctgcttcgtgcgcgccatggatgatggattgatggatctctctctcgatctctttgctgcgaaattcgaatggattttttgaattgaggcgtggg

SEQ ID NO: 11849 - DNA, 468 bp, Oryza sativa
  Clone ID: TFbOSC401685j.C1.o36.fg
atggcgcccaaggcggagaagaagccggccgcgaagaagcccgcggaggaggagcccgcggcggagaaggccgagaaggccccggccgggaagaagcccaaggcggagaagcggctccccgccggcaagggcgagaagggctccggcgaggggaagaaggaccgcgctgggaggaagaaggcgaagaagagcgtcgagacctacaagatctacatcttcaaggtgctcaagcaggtccaccccgacatcggcatctcctccaaggccatgtccatcatgaactccttcatcaacgacatcttcgagaagctcgccgccgaggccgccaagctcgcccgctacaacaagaagcccaccatcacctcccgcgagatccagacctccgtccgcctcgtcctccccggcgagcttgccaagcacgccgtctccgagggcaccaaggctgtgaccaagttcacctccgcttag

SEQ ID NO: 11850 - DNA, 408 bp, Oryza sativa
  Clone ID: TFbOSC13637j.C1.o1.gm
atggtggaccccaccgagacctacaacgtctgcctcttcaaggtttcaaaaggagtgtcgagatctactgaatctacatcttccaggaagagtgtcgagacttacaagatcatcttcaaggtgctaaagcagacactgacggataccggggtcttgtctaaagctatgcccaccatgaactccttctttatcaacatcttcgagaagctcatccaaaacacaataaaatctatctttggcaatatgagcgcgctcgagtgggcaagggttatagttattgagaccggactagtccaaccgtcggtatggttcggtcttaataactatggcgggggtgccctgaggattcgaggtgacccaagcacggtggctagtcgaacacaagttttcaatcccttggggacctga

SEQ ID NO: 11851 - DNA, 1254 bp, Oryza sativa
  Clone ID: TFbOSC401232j.C1.o26.fg
atggcgcccaaggcagagaagaagccggcggagaagaagcccgcagccggcgaggagaagtcggcggagaaggcgccggcggggaagaagcccaaggcggagaagcggctgccggcgtcgaaggcgtcgtccaaggagggcggcgccggcgacaagaaggggaggaagaaggcgaagaagagcgtcgagacctacaagatctacatcttcaaggtcctgaagcaggtgcacccggacatcggaatctcctccaaggccatgtcgatcatgaactccttcatcaacgacatcttcgagaagctcgcgcaggaggccgcccgcctcgcccgctacaacaagaagcccaccatcacctcccgcgagatccagacctccgtccgcctcgtcctccccggcgagctcgccaagcacgccgtctccgagggcaccaaggcgggctatcattttacacaacagaggaagaacttaaaaatgtcttctcaccatttggcgctgttgaggaaggtgattggcgacggcggtgacgcggtgattggcgatggcggcggcggcttgcaacggttacctcgacgacggccatggagcagaggtggaggccgcgcggcccccgaatccaccccgccggccaaatacgcgcggggccggaggccgcgcagaggcagtggaggtcacgccccccaccctgaatccggcggcggtggaggcggcggaggcggcgctagggagtggcgcgacgttgggacgacgatgcggggaggcggcggacgcggacgcggcaaatcggcgcaggcagcggaccgctgttgccgacgcatgccgatggacggcggccccccaacgccgacgctcgccgaggtgctctccctctccccgccaactactccccgtagtcgagcgccgtcgagctccagacggcgaaggatggcggcccagaccttggcgacgacagcagctggcggccagacggcggcggaggtcgcgcggccccctgattccacgccgccggccgaatccggcgaggaaggaggcgtaggagtccacacgggggaagaaggcaaagcggctgccgccggagagggatccgaccccttcttccccatcatcgctgctccctcgttgccgtcgccaacacagcctcccttgctcctgcctcgtcatcgcggagctctcttggtgacggaggaaatcggacggcgacgacggtgcaggtgggaggcggcgacagcgcgggacggcgatggcgcggataggtaa

SEQ ID NO: 11852 - DNA, 300 bp, Oryza sativa
  Clone ID: TFbOSC3090j.C1.o1.fg
atgaggaggagaggcggtgcattggagtatggcgggtacaagaggtacgtgtggcgcgtgctgaagcaggtgcaccctgacttgggcgcctccgcccaaaccatggacgttctcgacatgatgatggccgacatgttcgagcgcctcgccgacgaggcctctcgcctcttcaagctctccggccgccttaccctcaccttccgtgaggttcagtccgccgtccgcctcgtcctccccgccgacctcgccaaccacgccatctccgagggcaccaaggccatctctaactacctttcctaa

SEQ ID NO: 11853 - DNA, 441 bp, Oryza sativa
  Clone ID: TFbOSC402805j.C1.o30.fg
atggctcgcacgaagcacccggcggtgaggaagtcgaaggcggagcccaagaagaagctccagttcgaacgctcccctcggccgtcgaaggcgcagcgcgctggtgggacgcctaggcagcaaacgaagcagaggaagccacaccgcttccgtccaggcacagtggcactgcgggagatcaggaaatttcagaaaaccaccgaactgctgatcccgtttgcaccattttctcggctggtcagggagatcactgatttctattcaaaggatgtgtcacggtggacccttgaagctctccttgcattgcaagaggcagcagaataccacttagtggacatatttgaagtgtcaaatctctgcgccatccatgctaagcgtgttaccatcatgcaaaaggacatgcaacttgccaggcgtatcggtgggcggaggccatggtga

SEQ ID NO: 11854 - DNA, 462 bp, Oryza sativa
  Clone ID: TFbOSC401685j.C1.o34.fg
atggcgcccaaggcggagaagaagccggccgcgaagaagcccgcggaggaggagcccgcggcggagaaggccgagaaggccccggcggggaagaagcccaaggcggagaagcgtctccccgccggcaagggcgagaagggcagcggcgaggggaagaaggcggggcggaagaaggggaagaagagcgtcgagacctacaagatctacatcttcaaggtgctcaagcaggtccaccccgacatcggcatctcctccaaggccatgtccatcatgaactccttcatcaacgacatcttcgagaagctcgccgccgaggccgccaagctcgcccgctacaacaagaagcccaccatcacctcccgggagatccagaccgccgtccgcctcgtcctccccggcgagcttgccaagcacgccgtctccgagggcaccaaggccgtcaccaagttcacttcctcttag

SEQ ID NO: 11855 - DNA, 375 bp, Oryza sativa
  Clone ID: TFbOSC400544j.C1.o6.gm
atggtggaccccaccgagacctacaacgtctgcctcttcaaggtttcaaaaggagtgtcgagatctactgaatctacatcttccaggaagagtgtcgagacttacaagatcatcttcaaggtgctaaagcagacactgacggataccggtgtcttgtctaaagctatgcccaccatgaactccttcttcatcaacatcttcgagaagctcatccaaaacaacaataaaatctatctttggcaatatgagcgcgctcgagtccaaccgtcggtatggttcggtcttaataactatggcgggggtgccctgaggattcgaggtgacccaagcacggtggctagtcgaacacaagttttcaatcccttggggacctga

SEQ ID NO: 11856 - DNA, 963 bp, Oryza sativa
  Clone ID: TFbOSC419721j.C1.o9.fg
atgtccgtgcagggccttgatctgaaaaccgacttgagcttgtgggtttttggccatacctctgtattcagatgttgcaagcctgaacagtcggcggcggccattgttagcttttctctcttcaggaattgcggcggcgacatcgagcctggaccttggagggcttatgaagttaaaaaacgtatgggttcttggattgtgaatgatagtcagcagataagattctgggaggataaatggctaggtgttacatgttatatgactgcaaatcttttagctactgctcatgttttgggggaactgaagattaggttcgtaattttagaaactggtgtgggagtgccggtaatgcttttcttcactgctagagatggcaatggggaatcactgcagttggtatattttagtatttggaaaagctatcgtagtcctatgattgttactggtaaaccaaagttctttttccgatggctcgtactaagcaaactgctcgcaagtcaactggaggaaaggctcccaggaagcaacttgccaccaaggtatgtttttcgacatgataccctgcacatatcaattgccaaggtgttaatactgttgaactgtgctaaacttactgctagcgttttgattatgtcagctgctcgtaagtctgctcccacaactggaggagtgaagaagcctcaccgttacccgccctggaactgttgctcttcgtaccagaagagcactgagctgctcataaggaagcttccattccagaggcttgttagggagattgcccaggattttaagactgatcttcgtttccagagccatgcggtgcttgcccttcaggaagctgccgaggcgtacctggtgggtctcttcgaggacaccaacctgtgcgccatccatgccaagcgtgtgaccatcatgcccaaggacattcagctggctaggaggatccgtggtgagagggcttag

SEQ ID NO: 11857 - DNA, 1182 bp, Oryza sativa
  Clone ID: TFbOSC400542j.C1.o17.fg
atggcgggaaaaggaggtaagggcttgctcgccgcgaagacgacggccgccaagtcggcggagaaggacaaggggaagaaggcccccgtctcccgctcgtcccgcgctggtctccaggaaggtggtagtatgccagtggcaccaactgtggtggtttcagctaccatggaagccaaccatgataggactctgttccctgttggccgtatccatcgccagttgaagcaaaggactcaggcaaatggacgtgttggtgctactgccgcagtttactctgctgctattctggagtacttaacagctgaggttctggaactggctgggaacgctagcaaggatctgaaggtcaagcgtatcacccctcgccatctgcagcttgccatccgtggagatgaggagctcgacactctcatcaagggtaccatcgctggtggagtggtcaagagctttgttttctttgtcacttttcattattttacactccaggctgactggatccagcatagatatacggtacgtggaggatggtctactactcaaatccgagctaaagctactaaccctaatgaaaggttatcattctgttccaagtcaattcttgcatcaataaccaatacaagttgcccccctgctgtttatccccagaaacttacttaccctttactttcacccttggctgtcattcagtggtgtgactgtgaaggtggcggagcctgcatggaagggctgacgagcgagcagatggtggcgttccaggaggcgttcttgctcttcgacaagaacggcgatggatgcatcaccttggaagagctggctgcggtgactcgttctcttggccttgagccgaccgatcaggagctcaacgacatgatgagggaagttgatacagatggcaatgggatcatagattttcaggagttcctgagcctcattgccaggaagatgaaggatggggatggcgacgaagagctgaaagaagctttcgaggtcctagacaaggatcagaatggttttatctccccaactgagctgaggacagtgatgaccaatcttggggagaagatgacagacgaggaggttgagcagatgataagggaggcggataccgatggcgacgggcaggtgaactacgatgaatttgtgataatgatgaaaaacgctgaacggaagatatctgggtga

SEQ ID NO: 11858 - DNA, 447 bp, Oryza sativa
  Clone ID: TFbOSC415633j.C1.o2.fg
atggacgtcggcgtcggcggcaaggcggcgaagaaggcggtggggcggaagctgggcgggccgaagaagaagccggtgtcgcgctccgtcaaggccgggctccagttccccgtcggccgcatcggccgctacctcaagaagggccgctacgcccagcgcgtcggcaccggcgcccccgtctacctcgccgccgtgctggagctcgccgggaacgcggcgcgggacaacaagaagaaccggatcatcccgaggcacgtgctgctggcgatccgcaacgacgaggagctcgggaagctgctcgccggggtcaccatcgcgcacggcggcgtgctgccgaacatcaacccggtgctgctcccgaagaagaccgcggagaaggccgacaagccggccaaggcgtccaaggacaaagccgccaagtcccccaagaagcaggcgcgctcctag

SEQ ID NO: 11859 - DNA, 462 bp, Oryza sativa
  Clone ID: TFbOSC21547j.C1.o2.fg
atggcgcccaaggcggagaagaagccggccgcgaagaagcccgcggaggaggagcccgcggcagagaaggccgagaaggcccccgcggggaagaagcccaaggcggagaagcgtctccccgccggcaaggccgagaagagcagcggcgaggggaagaaggcggggcggaagaaggcgaagaagagcgtcgagacctacaagatctacatcttcaaggtgctcaagcaggtccaccccgacatcggcatctcctccaaggccatgtccatcatgaactccttcatcaacgacatcttcgagaagctcgccggggagtccgccaagctcgcgcgctacaacaagaagcccaccatcacctcacgggagatccagacctccgtccgcctcgtcctccccggcgagctcgccaagcacgccgtctccgagggcaccaaggctgtgaccaagttcacctccgcttag

SEQ ID NO: 11860 - DNA, 462 bp, Oryza sativa
  Clone ID: TFbOSC21552j.C1.o8.fg
atggcgcccaaggcggagaagaagccggcggcgaagaagcccgcggaggaggagcccgcggcggagaaggccgagaaggccctggcggggaagaagcccaaggcggagaagcgtctccccgccggcaaggccgagaagagcagcggcgaggggaagaaggcggggcggaagaaggcgaagaagagcgtcgagacctacaagatctacatcttcaaggtgctcaagcaggtccaccccgacatcggcatctcctccaaggccatgtccatcatgaactccttcatcaacgacatcttcgagaagctcgccggggagtccgccaagctcgcgcgctacaacaagaagcccaccatcacctcacgggagatccagacctccgtccgcctcgtcctccccggcgagctcgccaagcacgccgtctccgagggcaccaaggctgtgaccaagttcacctccgcttag

SEQ ID NO: 11861 - DNA, 453 bp, Oryza sativa
  Clone ID: TFbOSC413661j.C1.o12.fg
atggcgcccaaggccgagaagaagcccgcggagaagaagccggcggaggagaaggccggcgagaaggcgcccgcggccgggaagaagcccaaggccgagaagcggctgccggcgtccaagggggagaagggcggcgagggcaagaaggagcgcggcaggaagaaggccaagaagagcgtcgagacctacaagatatacatcttcaaggtgctcaagcaggtgcacccggacatcgggatctcctccaaggccatgtcaatcatgaactcgttcatcaacgacatcttcgagaagctcgccggcgaggccgccaagctcgccaggtacaacaagaagcccaccatcacctccagggagatccagacctccgtccgcctcgtcctccccggcgagctcgccaagcacgccgtctccgagggcaccaaggccgtcaccaagttcaccagctcttag

SEQ ID NO: 11862 - DNA, 411 bp, Oryza sativa
  Clone ID: TFbOSC900046j.C1.o14.fg
atggcccgcacaaagcagacggcgaagaagtccaccgccagcaatgtgccgaggaagctgctggtgatgaaggtggcacgcaagtcagcaccgacgatggcagggctgaagaagccacaccgcttcaagccagggaccgtcgcactccgagagatccgcacataccagaagagcacagagctgctaatccgcaagctccccttccagcggctggtgcaggagatcgcgcaggacgttaggtcctatgttcgcttccagagctctgccgtggttgcgctgcaggaggctgccgagacctaccttgtggggctcttcaaggacaccaacctctgtgttatccatgccaaacgcgtcaccatcatgcccaaggacatccagctcgcgcgccgcatcaggggcgagaaggcctag

SEQ ID NO: 11863 - DNA, 507 bp, Oryza sativa
  Clone ID: TFbOSC900015j.C1.o22.fg
atggcccgcacgaagcagacggctcggaagtcgaccggcgggaaggcgccgaggaagcagctggcgacgaaggcggcgcggaagtcggcgccggccaccggcggcgtgaagaagccgcaccggttccggccgggcaccgtcgcgctccgggagatccgcaagtaccagaagagcacggagctgctgatccgcaagctccccttccagcggctcgtccgggagatcgcgcaggacttcaagacggacctccggttccagagctccgccgtcgccgcgctccaggaggccgccgaggcctacctcgtcgggctcttcgaggacaccaacctctgcgccatccacgccaagcgcgtcaccatcatgcccaaggacatccagctcgcccgccgcatccgcggtctccatccatgtcttgagcagaagatgtcacttgccacctgtcttataagtctggctcccaactgcagtcttcttcgatttacttccaacttctgcaaagatgcctag

SEQ ID NO: 11864 - DNA, 392 bp, Oryza sativa
  Clone ID: TFbOSC100615j.C1.o8.gp
gcgcgctcaccgcggatccggcgcgcgagctggatgtccttgggcatgatggtgacgcgcttggcgtggatggcgcacaggttggtgtcctcgaacagcccgacgaggtacgcctcggcggcctcctgcagcgcggcgacggcggagctctggaagcggaggtcggtcttgaagtcctgggcgatctcgcggacgaggcgctggaaggggagcttgcggatgagcagctccgtgctcttctggtacttgcggatctcacggagcgcgacggtgcctggcctgaagcggtgcggcttcttcacgccgccggtggccggagctgacttgcacgttgccttggtcgccagctgcttcctcgagtccctgacttgcacgccgtctgcttcgtgcgg

SEQ ID NO: 11865 - DNA, 672 bp, Oryza sativa
  Clone ID: TFbOSC401217j.C1.o40.hg
atgaggggactaggaaaccgtgcgcgcctaccggaaccacgaaattttcaatctctccccacaccgcaaaacgcgaaattttccacggcccccgcgcgcgggctccactccaccgaaaacccagccaaacgcgccagatccgcgcctcctccactcacacgcggatcgctccccgatccaacggcaggcgctgcccccccgcaccactcacgcggatcgctccccgatccgacggctgcccactcccctcccaactctatatatatccacccctcccaaaccaaaaatcctccacatccaaatctcgccaccaaaaaaatccccaattccgccgtcgtcttcgtcgccgtcgccgcgaggatgtctgggcgcgggaagggagggaagggcctgggcaagggaggcgcgaagcgccaccggaaggtgctccgcgacaacatccaggggatcacgaagccggcgatccggaggctggcgaggaggggcggggtgaagcgcatctcggggctcatctacgaggagacccgcggggtgctcaagatcttcctcgagaacgtcatccgcgacgccgtcacctacaccgagcacgcccgccgcaagaccgtcaccgccatggacgtcgtctacgcgctcaagcgccagggccgcaccctctacggcttcggcggctag

SEQ ID NO: 11866 - DNA, 831 bp, Oryza sativa
  Clone ID: TFbOSC420396j.C1.o17.hg
atgcctcaggtcctccccggggggtcccttttatatcgcagtcttgtccgagtaagactcttcccatccgtagacttcgtgaaggatttccttagtgtacgcgggaagtatccatatgcgcgtggtgaaaaaaatctctcaaaggccaaacgccaagtccctactcccatagtcccatggccgcgccgcaggccaaatttggcggcgcctgcaggtcaaaattttgagctggccgcctctcagaccacgaaaattcccactatcccgccaaatcaccgatccgcgcctcacgccacgtcaacgatccgctcctccccccgcgatccagatcctcaccgtccattccctcccccatccaacggcagccgcctccccactccatcctctcgtccccttttaaaaccccctcccctttcttccccaaatcccactccaatcaccaccacctcttctccaattccactcgcttttctctctctctcgtgcgtcgagccaccggaatcgtcgtcgtcggcggccatgtcggggcgcggcaagggaggcaaggggctcggcaagggcggcgccaagcgtcaccggaaggtgctccgcgacaacatccaggggatcaccaagccggcgatccggaggctggcaaggaggggcggcgtgaagcgcatctccgggctgatctacgaggagacccgcggcgtgctcaagatcttcctcgagaacgtcatccgcgacgccgtcacctacaccgagcacgcccgccgcaagaccgtcaccgccatggacgtcgtctacgcgctcaagcgccagggccgcaccctctacggcttcggcggctga

SEQ ID NO: 11867 - DNA, 462 bp, Oryza sativa
  Clone ID: TFbOSC27706j.C1.o2.fg
atggcgcccaaggcagagaagaagccggccgcgaagaagcccgcggaggaggagcccgcggcggagaaggccgagaaggcccccgcggggaagaagcccaaggcggagaagcgtctccccgccggcaaggccgagaagggcagcggcgaggggaagaaggcggggaggaagaaggcgaagaagagcgtcgagacctacaagatctacatcttcaaggtgctcaagcaggttcaccccgacatcggcatctcctccaaggccatgtccatcatgaactccttcatcaatgacatcttcgagaagctcgccggagagtccgccaagctcgcccgctacaacaagaagcccaccatcacctcccgggagatccagacctccgtccgcctcgtcctccccggcgagctcgccaagcacgccgtctctgagggcaccaaggccgtcactaaattcacctccgcttag

SEQ ID NO: 11868 - DNA, 462 bp, Oryza sativa
  Clone ID: TFbOSC21545j.C1.o1.fg
atggcgcccaaggcagagaagaagccggccgcgaagaagcccgcggaggaggagcccgcggcggagaaggccgagaaggcccccgcggggaagaagcccaaggcggagaagcgtctccccgccggcaaggccgagaagggcagcggcgaggggaggaaggcggggcggaagaaggcgaagaagagcgtcgagacctacaagatctacatcttcaaggtgctcaagcaggtccaccccgatatcggcatctcctccaaggccatgtccatcatgaactccttcatcaatgacatcttcgagaagctcgccggggagtccgccaagctcgcccgctacaacaagaagcccaccatcacctcccgggagatccagacctccgtccgcctcgtcctccccggcgagctcgccaagcacgccgtctctgagggcaccaaggccgtcactaaattcacctccgcttag

SEQ ID NO: 11869 - DNA, 783 bp, Oryza sativa
  Clone ID: TFbOSC900138j.C1.o3.gm
atgaacattaaaaagattaacatcaagaagacgatggcagccgacatccttctccacccttgccatcgttgcaacatggtgagggcgcagccgccgtcgccaaggtgcaccgtctcccctcccgctggagctggcggaggggagaaggggagggcacaaccactgccgctgccatcaccgtggtccgccgcttcccctcccaccgaatctggtggaggggagggcacggctgccgccaccgtcatcaccagaggccgccgtcgcctcccatcccgctacccccctcaagctggatctggcgaaggggagggaggaggtaaaacctcagaatcatcattggttgtcaaatcaattgcatcattgtgtgccaaggcaccagcagtaggagaagtgtcctgcgtagctgccgtagcatggcttggaggtgctgggagttgcaaaactggagatgatgcagtggtacttgcagctgcacttgcactacttgcactaccagactccatcaccaatctagacacaaaggagatccgaaagtatcagaagaacacagagctgctgataaggaagctgccgttccagaggctcgtcagggagatcgcacagctcttcaagcacgacatgaggttccagagccacgcggtgctggcactgcaggaggcggcggaggcgtacctggtgggtctgttcgaggacaccaacctctgcgccatccactccaagcgcgtcaccatcatgtccaaggacgttcagcttgccaggaggattcgtggcgagaggctctaa

SEQ ID NO: 11870 - DNA, 312 bp, Oryza sativa
  Clone ID: TFbOSC400999j.C1.o2.fg
atggcgcctcgttcggtagccatttctgggcgcggtacaagtggtgctaggcgccatcggattgtctttcgcggctacatccaaggcatcgccaagccggtgatccgacgccttgcaaggaagggtggcgtgaagcgcatctcagggttgatctacaaagagactcgtggcgtgctcgagatcttcctcaagaatgtcatctgcgatgccattacctacaccgagcatgctcaccgcaagactgtcatggccatggatgtcgtatatgcgctcaagcttcagggccgcaccatctatgacttcggcggttga

SEQ ID NO: 11871 - DNA, 411 bp, Oryza sativa
  Clone ID: TFbOSC400785j.C1.o27.fg
atggcccgtacgaagcagaccgcccgcaagtccaccggcggcaaggccccgaggaagcagctcgccaccaaggcggcgaggaagtctgctccgaccaccggcggcgtgaagaagccccaccgctacaggccggggacggtggcgctccgcgagatccgcaagtaccagaagagcacggagctcctgatccgcaagctccccttccagcgcctcgtccgcgagatcgcgcaggacttcaagaccgacctccgcttccagagccacgcggtgctcgccctccaggaggccgccgaggcctacctcgtcggtctcttcgaggacaccaacctctgcgccatccacgccaagcgcgtcaccatcatgcccaaggacatccagctcgcccgccgcatccgcggcgagcgcgcgtaa

SEQ ID NO: 11872 - DNA, 1953 bp, Oryza sativa
  Clone ID: TFbOSC21550j.C1.o1.fg
atggcggctctgacggaggacatcctcctccagatcttctcccgcgtgggcagcatcaaggacctcttcaagttcgccgtgacatgccggcggtggctgcgccgcttcaccgacccggccttcctccgcgggctgtgcctggacagcggcgagggccaccgcgcgcgcctcctcggcttcttcttccagcagacgagattctatcgctgcgaaaagatgatcaagatgcgggtgacgcagcagagctcggtctgtccgcccaccttcctgccggcgccgtggtcgccgctcggcctcacggatcgcaccctcacctccttcctcgccgccgacgacgacaccttcaactacgccgagcccctcgcagcgcgctgcggcattgtcctgatgcggcttgtcccccgcaccgcgctgatgatagcgtgcagccacctcctcggcgtctgcaacccgatcaccggggaatgccacgttctcccgcctctgaatctctccggcctccatcgctacttgaccagctacgccatcatcacgtccaccgacagcgacctagatgggaagcagccgccatcatcatcatcgtcagggcgctccacgttctcgcagctgtacctcgtcgtccaacacaagaaagactgtaacgagtacttctactcctactctgctgctacgtgcagctggagcgctcccaccatgtgcgtggacggccgccgcttctccctggtgggtgagagatccgccgtcgttcacaagggcgcggcgcactggctgtttattgatcgtgtatctagcgcaacccaagatgacatactgtacaaactcaccgcggcggtggacacctcagaaatctccttgacaaggctcccctttgtgctggaggctcaccgctcctctgcgataccattggcggtgccttacccagactattcccatatatgtcagccccgcgagaagtggtttaacttcaacaggggatcaatgctcgtgctgtacaggagcaacggcgtcttcatcctcgacctcgagaagaaggtgatggaaaagctattgtctagacatggaaaagctactgctgaaaggccttcgagttctgaaggatacatatggaaattgagtttgttggtgatcacagttacaggtctgactccatggcaaaaagcccaaaacctgaacccaaagaaagaacagcccaccaccacagcgctccaaaaacggggcccactgcacatttttctttgcaacgtcagcgatccgcacggaaacgcatcgcagccgtctaaccgaaaaggcaccggacgtcacacattcatccacgtcatcgatccgcgggacaagcctctccaccaatcagcgcccacttttacccactataaactcaccgcacccgtgtcctccttccacaccgcaatctcgcaacacatcagcacacaccgctccaaagcaaaacccacggacccgcttcccctccccgagaagaagagagaagcatccatggcgcccaaggcggagaagaagccggccgcgaagaagcccgcggaggaggagcccgcggcagagaaggccgagaaggcccccgcggggaagaagcccaaggcggagaagcgtctccccgccggcaagggcgagaagggcagcggcgaggggaagaaggcggggcggaagaaggggaagaagagcgtcgagacctacaagatctacatcttcaaggtgctcaagcaggttcaccccgacatcggcatctcctccaaggccatgtccatcatgaactccttcatcaacgacatcttcgagaagctcgccggggagtccgccaagctcgcccgctacaacaagaagcccaccatcacctcccgggagattcagacctccgtccgcctcgtcctccccggcgagctcgccaagcacgccgtctccgagggcacgaaggccgtcaccaagtttacttccgcttag

SEQ ID NO: 11873 - DNA, 2109 bp, Oryza sativa
  Clone ID: TFbOSC21552j.C1.o1.fg
atggcggctctgacggaggacatcctcctccagatcttctcccgcgtgggcagcatcaaggacctcttcaagttcgccgtgacatgccggcggtggctgcgccgcttcaccgacccggccttcctccgcgggctgtgcctggacagcggcgagggccaccgcgcgcgcctcctcggcttcttcttccagcagacgagattctatcgctgcgaaaagatgatcaagatgcgggtgacgcagcagagctcggtctgtccgcccaccttcctgccggcgccgtggtcgccgctcggcctcacggatcgcaccctcacctccttcctcgccgccgacgacgacaccttcaactacgccgagcccctcgcagcgcgctgcggcattgtcctgatgcggcttgtcccccgcaccgcgctgatgatagcgtgcagccacctcctcggcgtctgcaacccgatcaccggggaatgccacgttctcccgcctctgaatctctccggcctccatcgctacttgaccagctacgccatcatcacgtccaccgacagcgacctagatgggaagcagccgccatcatcatcatcgtcagggcgctccacgttctcgcagctgtacctcgtcgtccaacacaagaaagactgtaacgagtacttctactcctactctgctgctacgtgcagctggagcgctcccaccatgtgcgtggacggccgccgcttctccctggtgggtgagagatccgccgtcgttcacaagggcgcggcgcactggctgtttattgatcgtgtatctagcgcaacccaagatgacatactgtacaaactcaccgcggcggtggacacctcagaaatctccttgacaaggctcccctttggtgctggaggctcaccgctcctctgcgtcagtggagacggcaaactttcggtcgcttgcgtgtttcccatccacatgagagtttggactcagcaagatgacacccctgcaacgtggctccgcactgtgatcaggataccattggcggtgccttacccagactattcccatatatgtcagccccgcgagaagtggtttaacttcaacaggggatcaatgctcgtgctgtacaggagcaacggcgtcttcatcctcgacctcgagaagaaggtgatggaaaaggtcatggactgcttactgcccctattcagtgataaactgaacaggacggctgtggcgtatgagatggacttggttgagttctttgtgctccagctcagtggatacatatggaaattgagtttgttggtgatcacagttacaggtctgactccatggcaaaaagcccaaaacctgaacccaaagaaagaacagcccaccaccacagcgctccaaaaacggggcccactgcacatttttctttgcaacgtcagcgatccgcacggaaacgcatcgcagccgtctaaccgaaaaggcaccggacgtcacacattcatccacgtcatcgatccgcgggacaagcctctccaccaatcagcgcccacttttacccactataaactcaccgcacccgtgtcctccttccacaccgcaatctcgcaacacatcagcacacaccgctccaaagcaaaacccacggacccgcttcccctccccgagaagaagagagaagcatccatggcgcccaaggcggagaagaagccggccgcgaagaagcccgcggaggaggagcccgcggcagagaaggccgagaaggcccccgcggggaagaagcccaaggcggagaagcgtctccccgccggcaagggcgagaagggcagcggcgaggggaagaaggcggggcggaagaaggggaagaagagcgtcgagacctacaagatctacatcttcaaggtgctcaagcaggttcaccccgacatcggcatctcctccaaggccatgtccatcatgaactccttcatcaacgacatcttcgagaagctcgccggggagtccgccaagctcgcccgctacaacaagaagcccaccatcacctcccgggagattcagacctccgtccgcctcgtcctccccggcgagctcgccaagcacgccgtctccgagggcacgaaggccgtcaccaagtttacttccgcttag

SEQ ID NO: 11874 - DNA, 1317 bp, Oryza sativa
  Clone ID: TFbOSC413661j.C1.o14.gm
atggctcgtggcctcgccgttgcgtcgctgctgctggtcgccctcgccgtggtagcacggccgccgctcgccctggcagtgaaggattacccggccgacgcgtcggcggtggctaagaaatctccagccagtaaggctgacacgcctaccacgggtaaagaatccgtcgctggcaagaccgacgtggtcacggtggctaagaaatctccagctggtaaggcagacacgtctgccacatataaggaatacgccgctgcaaaggccgacgcggtcacggtgactaagaaatccccagccgccaaggctgacacgcctaccacgagtaaggaatctgccgctggcaaggccaacgcggccacggtggctaagaaatctccagctggtaaggcagacacgtctgccactgccacaggtaaggaatacgccgctgccaaggccgacgcgatcacggtgactaagaaatcaccagctgccaaggctgacatgcctgccacgggtaaggaatccattgccaaggtcgacgcggccacggtggctaaggaatccaccgccggcaagaccggcaagaaggctgcggcaaaggaattcacgatgtccggcaagaccaacactgaggccgacgcggccacggtggctaagaaatccctagccggtaaggctggcacacctgccacgggtaaggaatacgccgttaccaaggctgacgcagccacggtggctaagaaatctccagccgataagacgggtaaggaatctgtcgttgccaaggccgacacggctacggtgacaaagaaatccacagctggcaagaccggcaagaaggttgcggcaaaggaatcccccgcatcccacaagaccagcatggaggccgcaacaaagaaatccactgctaacaagaccggcacggagaccgcagcaaaggaatccacggtatccggcaagaccgacacagaaaccgcggcaaaagaatctacagcgcccggcaagaccgacacgacggccgcggtcaaggaatctacagccggcaaaggcgatgcacccgccatggctgagaaatccgcggcaggtccaaaggttgataagatgcggacgtgccagactggcgagcgacgtgacgtggtcacccaccacgaggagatcgacggcatgtttgagaagcttgtcggtgaggccgccaagctcgcccggtacaacaagaagcccaccatcacctccagggagatccagacctctgtccgcctcgtcctcctcggcgagctcgccaagcatgccgtctccgagggtgctaaggccgtcaccaagttcactagctcttag

SEQ ID NO: 11875 - DNA, 309 bp, Oryza sativa
  Clone ID: TFbOSC420440j.C1.o11.fg
atggcgcccaaggcagagaagaagccggtggagaagaagcccaaggcggagaagcggctgtcggagtcgaaggcgtcgtccaaggagggcggcgccggcgacaagaaggggaggaagaaggcgaagaagagcgtcgagatctacatcttcaaggtcctgaagcaggtgcacccggacatcggcatctcctccaaggccatgtcgatcatgaactccttcatcaacgacatcttcgagaagctcgcgcaggaggccgcccacctcgcccgctacaacaagaagcccatcgccacctcccgcgagatctag

SEQ ID NO: 11876 - DNA, 2721 bp, Oryza sativa
  Clone ID: TFbOSC401115j.C1.o25.gm
atggagatggaaacattgcagctgcgtgctgggacaggctgcttatgggtttgcctcctcctctgtgttgcgccgtcgctcgtggactactccatcccgctcgccagcgtgcaccggcgatcgggagagcaggtctccggaacctctgccttcgacgtcctgcaccgggagaaggcggcaataaggtttttgggaagcgcttcgtgcgactgctccctgttcaaccgcgacggttcgccttcctctccgctcgcgtgctgcacgccttcgtcgacgctcgcaaccgcaagtagttcatgccgagcaaccggtctttccgccacctcgatcagggtcaatctgtggctgacagctatgaaatgcttctgggtaagtactggcaagcctatgggcgttcttaatgctgatcagcagaaagaattcgatgaggccactactctttttgtgggatgcattcttagcgtgcttggcgatcgtctggtcgaggtgtatatgcatatgaccgacgctacggagttgtgggatgcactgaatactaaatttggtgctactgatgctagtaatgatctgtatatcatggagcagtttcatgtctacaagatggctgacaaccgttctgtagtcgaacaggctcataagatacaaaccatggctaaggaactcaaactccttaagtgtgtcttacctgacaaatttgtggccgggtgcattattgcgaaactatctccatcttggagaggtttcggtactgcactcaaacacaagagacaggaatacttcgttgaggggttgatagcgtctcttgatgttgaggagaaagctcgggaaaaagatgtcgcgtctaagggcgatggtgggcagtccagtaccaatgttgtgcacaaggcccaaaacaagagcaaggggaaatacaaagctcagcagaccaccaacttcaataagaagaagaaaaacaacaatcctaatcaggatgagaggacttgctttgtgtgtggtcaacctggccatctggccaggaagtgtccacaacgcaaggggatgaaggcacctgcaggacagacctctaagtctgctaatgtgaccattggcaacactggagatggaagcgggtatggtcgcacggggttccaccgtcctaatggggaatgggtcacatgcttctgttcatggtgttggcacggtagatctgaagtttacttcgggaaagatcgtgcagctgaagaacgtgtagcatactactggaaggaggatgtccgtagtgaaatggattccattatcgctaacgggacttgggaggtgacagagcgaccctatgggtgtaaacctgtggggtgcaagtgggtgttcaagaagaagctcaggcctgacgcctcacatggtcttctcattcatcaaatggacgttaagacaacttttcttaatgaagagctggatgaggagatctatatggatcaacctgatgggtttgtagttgaaggctttgcagtcaatgaggcagataaatatgtgtactatcgccatggtgggggtgagggagttattctgtgcttggtttgcctcctcctctgtgttgcgtcgtcgctcgtggactactccatcccgctcgccagcgtgcaccggcgatcgggagagcaggtctctggaatctctgccttcgacgtcctgcactgggagaaagcggcaataaggtttttgggaagcgcttcgtgcgactgttccctgttcaaccgcgacgagggtgatgctgcagatagggcgagcaacttgacagatgccactgttgacagcttgattgagtctatcatcattaaagatggggtgaaagccaagtttttctttaacattatgtctcttgctaactctgcaggagagaagttgcttgccttcagtcaatatatacttcccatgaaatttttggaaaggttgttggttaagaggctgggctggcatgtagggaaggagattttcatgatatctggtgatactagtgcagacgacagagaagtggcgatggatcagtttaacaactctgccgatgcaaaagttttgtttggttccatcaaggcctgtggagagggaatctcccttgttggtgcatctcgagtcatcattctagatgttcatttgaacccatctgtcacccgtcaagcaatcggacgtgcattcaggcccggacagcagaagaaagtgtttgtgtacaggcttgttgctgctgattctccagaggtgaagttccatgaaactgcattcaagaaagaagttatcccaaagctatggtttgaatggagtgagctctgcactactgaagacttcaaactgaatcaagttgatattgatgactctgaagatgaactattggaggctaatgctattcgccaggatatcaaggctttgtatagaagggttggcaagggcctgtcggcggcagcggcggcgtcgaagcggagatggacgttggcgttggcagcgaagaaggtagtggggcggaagctgggtgggccgaagaagccggtgccacgctccgtcaaggccgggctccagttcctcgtaagccgctacctcgagaacggccggcacgcgcaacgcgtcggcactggcacccccgtctacctcgctgccgtcctcggcgtagctgtggcggccgcggcgaggaggagggaggggagtagcagcagcgcggggacacccatggctgtcgcggcgacggcggcgaggtggtag

SEQ ID NO: 11877 - DNA, 843 bp, Oryza sativa
  Clone ID: TFbOSC4904j.C1.o4.gm
atgcctagcctcacctacgccgtccgattggcctcaggccgatctgtaccgtcggtcccgtggaccggcggtggaccactcatgtggtcccggtccacggtggaccggccacctcgagccgctgagatgtggggcccgcttaccggcgccgccccctcccttgatgacctcgaccctttcctaggcaccggtggtgagggtgggcatgatggagttgggtcagccggggtgtccagttgtccagctgccggattcaccgcggcgcaagaggggaccgcccactgcccgttgggggtgcgggcgccggcgccggcggatggagttgaggtcggaaccggccacggcggctccggcggcagggaagaagcagcggctccggcagcggggatgcggcgacagtctacgcggggaagaaacaccggctccggcgatggggaagaatcagcggcgccggcggcggggatgcggcgacaatccacgcggggaagaagcactggctccggcgacggggaagaatcagaggctctggcggcggcagtccacgcggggaagatctccagagaggatgcagcggcgcggcgggagatccgaaagtatcagaaaaacacggagctgctgataaggaagctgccgttccagaggctcgtcagggagatcgcacagcacttcaagcacgacatgaggttccagagccacgcggtgctggcgctgcaggaggcggcggaggcgtacctggtgggtctgttcgaggacaccaacctctgcgccatccactccaagcgcgtcaccatcatgtccaaagacgttcagctcgccaggaggatccgtggcgagaggctctga

SEQ ID NO: 11878 - DNA, 801 bp, Oryza sativa
  Clone ID: TFbOSC414180j.C1.o16.gm
atggacgacgttggcggcgggaaggtgaagaaggcggcgggcgggaggaaggccggcaggccaaggaagaaggcggtgacgcgctccgtcaaggccgggctccagttgcccgtcagccgtatcgggcgctacctcaagaaaagccggccggttgatctcctctccgccgcttcttccccatcggccgcgtcgaccctcttccacgccgcgtcgatgatgccaccgaccctcttccgcaccgcgtgcctccggaactccgtccgcttgagaacttgcacgggtaggcgggcgatcaagtttttgggtagtgcttcaagcgcgactgctcttgttcttcgcggctactgctgctgcatcggcgccttcaccaagatgtcaacggagattggagacaagaagatgaacgacatcaacggaggcaatactgccttaaaatccagcgcgccgtcgcagccgccgaaaaagggcatgaaggggtatgggtcggcgacggctgcacgccctcttcctcgcctccacctcaccaacctcgccgccgcggctgctcccgatttgcggtgcccctcgcgcgccgcccgttgtccaaggccatcacgggcatcgacgacggcgtctcgctcctcgccgacgcgccgtccgccgccaccgggaggcccgtcgccactcccgccgcctacgggaggtccgccccgcccccgcctgagggcgcgccgctacgacgtcgtcgacgagtccggcaccgacaacggcgaggagtacgacgccaccgacgacggcgagtgcgacccaaagacccaatag

SEQ ID NO: 11879 - DNA, 348 bp, Oryza sativa
  Clone ID: TFbOSC4904j.C1.o5.fg
atgcaggccgccgctcgtaagtctgctccgtgcattggaggagttaagaagccacaccgataccgtcctgggaccgtagcccttagggagatccgaaagtatcagaagaacacagagctgctgataaggaagctgccgttccagaggctcgtcagggagatcgcacagctcttcaagcacgacatgaggttccagagccacgcggtgctggcactgcaggaggcggcggaggcgtacctggtgggtctgttcgaggacaccaacctctgcgccatccactccaagcgcgtcaccatcatgtccaaggacgttcagcttgccaggaggattcgtggcgagaggctctaa

SEQ ID NO: 11880 - DNA, 942 bp, Oryza sativa
  Clone ID: TFbOSC421349j.C1.o3.fg
atggctgcatgccagcagcagatttggcaagaagggaagcagcagcagcatctgcaccacggtggctatgatgatctttcttcagtgtacagaggcacggttgtgctgccacggcggcagggcggcctggcgccggagccgccgccgccgcggccgtcatcgtcgtcggggaggagcgcggcggctcaggcgacggcgatgacgatccacagcgaggctgagaggcggcggcgggagaggattaatgctcacctggctacactgaggaggatactccctgatgctaagcaggattctgacaggaatacaattgtaaaacagaggattacaaaacacaggaattgccgtttgattggaccacaggaaaaacgcaggaatcagatgagagagatagactcagaggaaatgttccaagagatggacaaggccaccttgctagccagcgtggtgaaccaagtgaagcacctcaagacgagagccaccgaggccaccacgccgtcgacggcggcgaccatcccaccggaggccaacgaggtgaccgtccaatgctacgccggcggcgagcacaccgcggccgcgcgcacctacgtccgcgccaccgtcagctgcgacgaccggccgggcctcctcgccgacatcgccgccacgttccgccgcctccggctgcggccgctgagcgccgacatgagctgcctcggcggccggacgcggcacgccttcgtgctctgcagggaggaggaggaggaggaggatgctgcggcggaggctaggcctctcaaggaggccgtgaggcaggcgctggccaaggtggcgttgccggagacggtgtacggcggcggcggcaggagcaagaggcagaggctgatgatggagtcgcgttactcgacggcggtcgtgcacacgcacgttgatcctcaatattgctggtacaatagtcgttag

SEQ ID NO: 11881 - DNA, 1152 bp, Oryza sativa
  Clone ID: TFbOSC400522j.C1.o16.fg
atggagcaccaccacctcctgctgcaactctcgccgccaccgccgccgccgccgctgccggcggcgcacctcatgatgagcccgagcttcttcgacgccggcgtgttcgccgatgtcggcggcgactggatggaggacctcatgcatctcggcgagctgttcggcgtcggcgtcggcggcgacgatgatgataatggcggtgtcgacggcggcgtgggcggcggtgatgatcggatgcaagagtggcagaataattgcgagggcgccggctcgccggaccaccagcctagctgcggtgatggggatggcgatggcgatggcgacgtgagccctcgtgatggggagctcggcgacggcgacggcgacaactcggcgacgaggaagaggcgggaccggtcgaagacgatcgtgtcggagcggaagcggagggtccggatgaaggagaagctctacgagctccgagctctcgtccccaacatcactaaggtacgtactcagtgcttgattgctcgcgtcggcgtcgccatggcggcgccgccatgcgccattgccaacacaagcttaatgattgcttggcagatggacaaggcgtcgatcatcgccgacgcggtggtgtacgtcaaggacctgcaggcgcacgccaggaagctcaaggaggaggtcgccgcgctcgaggaggcgcgcccgatcaggccgcctccgccgtccgccgccgcgcaacggccgcagagacagccacgccgcgtggcggcggcggctgcccagctggcgagggccgcggacgccgccgccgtgacgacagcggcggcggcgccgcacggcgcgagggtggcgcacgtcggcgcggcgcaggtcggggaggggcggttcttcgtgacggtggagtgcgagccggcggcggccgcggcgagaggaggaggaggaggcgtggcggcgccggtctgcgccgccgtggagtcgctgtcgtgcttcaccgtggagagctccaccgtcgggtgctcgccggaccgcgtcgtggcaactctcaccctcaaggttagtgaagcagaggaggatgtgtcggcgatcagcgagtgcacggtgaagctctgggtgatggcggctcttctcaaggaggggttccggccgcaaccgacggtccagatctcctga

SEQ ID NO: 11882 - DNA, 795 bp, Oryza sativa
  Clone ID: TFbOSC419674j.C1.o5.fg
atggccgggcagcagccgcagcagcagggcccaccggaggacgactttttcgaccagttcttctccctgaccagctccttccctggcgccgcgccgggcggccgcgccgccggtgaccagcccttctccctcgcgctcagcctcgacgccgccgcggcggccgaggcgtccgggagcgggaagaggctcggggtcggcgatgacgccgagggtggcggcagcaaggcggatcgggagaccgtgcagctcaccggactcttcccgccggtgttcggcggcggcggcgtgcagccgccgaacctccgccccaccccgcctacccaggtgttccacccgcagcagtcgaagcagggcggagcagccgtcgggccgcagccgccggcgccgaggccgaagctaagaagagagagaatagcagaaaggatgagggccctacaggaattggtccccaatacaaacaagacagatagggcagctatgctagatgagatccttgattatgtgaaattcctgaggctgcaagtaaaggttttaagcatgagcaggctgggtggcgcgggtgctgttgcacagctggttgctgatattccactttcagttaagggggaagcaagcgatagtgggggcaaccaacagatttgggaaaagtggtcaacggatggcacagaaagacagcctgcacaatggttgacggaatttgaacacaagatgaaatggaagatgattttgatggtgatgttcatttatctccatttttccaaagtggaggcggaggctttggtcaatggaggctga

SEQ ID NO: 11883 - DNA, 1587 bp, Oryza sativa
  Clone ID: TFbOSC400961j.C1.o12.fg
atggagctttgcctcttgttggcgccgtccttgaagccttgccaaggcctgcctctcaccaacaccgccattgaagcctcatcgagctctcttaccaacgccgatctaaagcttcacctctatcggcttcggctcagcgacggaggccacaccatggggaagagggaaagaggggacacaaagcagaaagaagatgttggtctctggatcaggccattgagggggaaagaaaaggtgcgggttttggggggaggttgttcttgcgggaggccgttgatttcgccgtgtgatcggagattttggtcttcagggagtgaaaaggagatgaatgagaaggacgccactgatttggaggagaggagtgaggccagtgagcacggccaagctctgagtttccatggtggtgccatgttcttgcaagaggctcagattgcttctcctgcagctgcaaataatgcattgacctccatggcgaatcctttccctatccctcctgggttgtggaatccaccttcacacaacatgggtttaggcgaaaccagtttttcatccttgttggggatgctgtcggccggcgcgccgccaccgtttgtggctactcccgggtttgtagattccacggcggggtttccttgctacaatggaggcaatcttggagccatgatcaatcaccctttccctggtatccaccagcctttgggtgatttccaaaacggcgtcgagccatgtagggagattgaggatattgagattgaaggatccaagaatgtgtcacaaactggtgagaagcagcaaggggatggtgagacaacgcatgccgtcgattcctcctccaaggagctaagcatgccagggcgcaatggtggcgctggccatgatgaggggactagggtgtcttgttccaagaagaggaaaagatcaggacaggatggtggggtgaagcatgcagaaggtggtgagcaattagcaactgtcggttcagcgcagaagaatgaggatgatgaaaagggtgaaccaaagaggtcttctgtggcgtccgggaaatccagtgggaagcaaataaaggataatgcaggttcaccaaaggaagactatatacatgttaggagggagaagatcagtgaaaggatgaaatatcttcaggatcttgttcctggttgtagtaaagtaactggtaaggctgttatgctggatgagataattaactatgttcaatcattacagaggcaggttgagtttttgtcgatgaagctagcaagtgtcaatccaacactggacttcaacatagaacgcattttatctaaagatatttttcaatgtcgaggcactactgcatcatctgcctttggcttcttcccagacattgttcatccccgattacacccaccaaaatatacacaagttgggatgcccagcattgtgaaccccactgatgcatttggaagagtaatccatgctccattaggaactaacagtgcattcaaagaacctaaacatcagatgcccaacaatttgaatggagagttccaggacgtcattgagatgccttttactcatgaccatcatggatcaaatgatcaaccctga

SEQ ID NO: 11884 - DNA, 208 bp, Oryza sativa
  Clone ID: TFbOSC32507j.C1.o1.fg
gtccgactgcggcggcgggcggaagccagaggccggcggcggcgagaggaagaaggagcggatgaagaagatgatgcggactctcaaggggatcatccccggcggcgacaggatggacacccccgccgtcctcgacgaggccgtccgctacctcaagtcgctcaaggtggaggtcaagaagctcggcgtgcgtggctcaagcagctag

SEQ ID NO: 11885 - DNA, 993 bp, Oryza sativa
  Clone ID: TFbOSC401478j.C1.o51.fg
atgccgggggagctcaacttccacctcctccactcgctcgacgccgccgcggcggctgcctcctccaccgccgcctcggcctcctcccagcccaccgtcgactacttcttcggcggcgccgaccagcagccgccgccgccggcggcgatgcagtacgaccagctggcggcgccgcaccaccaccagacggtggccatgctgcgcgactactacggcggccactacccgccggcggcggcggcggcggcggccaccgaggcgtacttccgcggcgggccaaggacggccgggtcgtcgtcgctcgtgttcggcccggccgacgacgagtcggccttcatggtcggacccttcgagagctccccgacgccgcggtccggcggcggcaggaagcgtagccgcgccaccgccggcttccacggcggcgggccggccaacggcgtcgagaagaaggagaagcagcgccgcctgcggctcaccgagaagtacaacgccctcatgctcctcatccccaaccgcaccaaggaggatagagcgacggtgatctcagacgcgatcgagtacatccaggagctagggaggacggtggaggagctgacgctgctggtggagaagaagcggcggcggagggagatgcagggggacgtggtggacgcggcgacgtcgtcggtggtggcggggatggatcaggcggcggagagctcggagggcgaggtgatggcggcggcggcgatgggcgcggtggcaccgccgccgcggcaggcgccgatccggagcacgtacatccagcggcggagcaaggagacgttcgtggacgtgcggatcgtggaggacgacgtgaacatcaagctcaccaagcgccgccgcgacggctgtctcgccgccgcgtcgcgcgcgctggacgacctccgcctcgacctcgtccacctctccggcggcaagatcggcgactgccacatctacatgttcaacaccaaggtcacaacaaccaactaa

SEQ ID NO: 11886 - DNA, 534 bp, Oryza sativa
  Clone ID: TFbOSC415729j.C1.o2.fg
atggccgaggaggacaacctggcgctctctgtcgtctgcgagcgctcgccggggacggccgtggaggcggcgtccgggcggccgccgaaggccggcagcgagcgcgcgcgccggcagaccatgtccaggctctacgacgagctgggcgcgctgctccccaacctccccccgcgggcgtcgacgacgcggatcgtggaggaggccatcgcgtgcgtgggggagctgcgggcgaggacggcggagctcgaggcgtacagcgcggtggcggcggcggccgggcgggccgcgcgcgacggaccagccgaggtggtcgcgtccgggaagacgtcgtgcttcgccgtccggctgcgggcggcccgcgcccggccgggggcgctgacgcgcgtgctcgaggtgttccagcgccacggcgtggccgtcctcgcggccaccgtggcgcgcgacggcgaggagacggcggtcacggtcaccacggcggcggtggcgccccgggtcctggagacgatcaaggcggagatcatctgcgccgcatga

SEQ ID NO: 11887 - DNA, 954 bp, Oryza sativa
  Clone ID: TFbOSC400284j.C1.o34.fg
atggtgaaggaggaggagatcatcacagaggcagcaggagcaagaggctacatggagatgcttgggcttggagaggaggccgccgactacctgatgtgcctgtctccttcttcctacctgtcttctcctgctgcttccaccaccacagctgtggcttctcctacctgtgcctcgtacttggctcctcacccttaccaccacctgctaagcttcagtggtcaggatcagtaccacggtgatgacgtctttgggttacagtattacggcggcgatcaagtaattccggcggtggttccgcagaagtccagcccgaccaccgagtgctcctcctccgtctcctccatgtcgtcctcgccgacggccaccgccatttccagctctaagtcaccggccttcaagaagaagggatcgagaggttgtgatcagaggaaggctactgctcctgctgctgccacaaccacaaacaagagacccagggtgaggagggagaggctcggagagaggatcatagcgctgcagcagctggtttctccgttcgggaagtctgatacggcctccgttcttcacgaggcgttgggatacatacgcttcctgcacgaccaggttcaggtcctgagctcgccgtacctgcagcgcctgcctccctctgctcgcgtcccggagcaggagagaggcacgccggcggcggaggagcaaccgccggcgctgcggccgagcgacctgaggagccgtgggctgtgcctggtgccgatctcgtgcaccgagcatgtcgccggcgccggcgccggcaccggccacggcaacggcgccgacctatggtcggtggcggcgggcatggcgaaggcgacggcgaccgtgacggccgccgtggagaggagcaaggaggcagccgccgccgccgccgccactgccgcattgctgcgtgctgatcgtccagggcagcagctggcctaa

SEQ ID NO: 11888 - DNA, 1059 bp, Oryza sativa
  Clone ID: TFbOSC400996j.C1.o33.fg
atggccgacgagtggtggagtgcgtctcagaggagccacggcacgtcggcgtgctccgcggcgccgtcgccgctcacagctgacagggtctcctgcggctggacgtcccccgccgccgctgccgccgccgagtcgacgagctccataacgttccaggaccccagcaggagcagcgccgctcatcatcagcctctgtccgatgccgcttcctctcttggcgatccccacatggtggactggacgcaggccttcctgagcgggagaagcgacgctagctttcaggccgtgctccaggacgacatggcggcatccacgagaccgttccgagcccagccgacggcggccgacgaggccgtgatgaccaatccattcagggacatgggcgtgggccaaggcctgctcctcgatcaggcgtcggcgccgttgcacggcctgtcgttcgacgccggggagccagcagtggcgccggcgacgcatagcatcacgacgtcgttcggggattaccagcactcggcaagctacgacgccgcggcggcggtgatgcagttctcgcagacgccgagggcgccctcgttgccggcggctgcccagatgcagttcttgtccggcagctaccagctgcctttcggcggtgcgccgccgctgccgtcgcagcttctcttgcaggccatgcagcccaagcctagctgcagctctaacgctaacaccctcctggcgaaggtgaggaaagagaagctaggggacagaatcactgcgctccagcaactagtctcgccttttggaaagactgataccgcatcggttcttcacgaggccatcgaatacatcaagttccttcacgaacaagttgcgtctttgagctctccgtacttgaagaatgggaacccattgcagcacttccagcagaagggttctgagagcacgaaggacgcagagcagccgaagccggatctgcgcagccgaggcctgtgccttgtgccggtggcaagcacttatacggtggcgagcgagacggtgccggagttctggcacccaacattcggaggcacgtttaggtag

SEQ ID NO: 11889 - DNA, 972 bp, Oryza sativa
  Clone ID: TFbOSC900243j.C1.o6.fg
atggcggatgagcatgagtggtggaatagcccttgctctgcgcgcaccggcgacgacgaagccgcgtgctcgacggcggacgccgatgagtcagcggttgggagtactccgatgagcttcggccatggcggccagcctgctagtttatctgacgccgccgcctcctcgtcgtcgtcatcgttccttcttgccggacaacacatggattattggacgcaggacttcatgggaggtagagcagcggcagcggccaccgcgagcttcgacacgctgctccagctccagctccaaggcggcgacgcggcgagccgccgcttgctgctcggcgaccacgccgcagcgccgccgcgtcacctcgtcgtgccaggggcgccctacggcggcggcggcggtgatgacacggcggcgccgccgcgaggcttgtcaccgacaccgtacgaggcggccgacaacctgcagcagcagcaatcgttccccggcggccaccacgtcgtctccaacacggatcgcctccatgatcatcatcaggacgccggctcgccgtcgccggcgacgagaagctctcctggctcgccggcggcagcgaagaaaccacggatcgaggcgccgtcgccgatgccgactttcaaggtgaggaaagagaagctcggggacagaatcactgcgctccagcaactcgtctcgccttttggaaagacggataccgcatcggttcttcacgaggccatcgaatacatcaagttccttcacgatcaagttgcctctctgagctcaccgtacctgaggtgtgggcgccctgtgcagctacaacaccaacagggttcccataaggtgaatggtaactgtgaggggaagcagctggacttgcgcagccgaggcttgtgccttgttccggttgcgagcacttatactgtggccagtgagactgcgacagagttttggcaccctacctttggaggcacatttcggtag

SEQ ID NO: 11890 - DNA, 264 bp, Oryza sativa
  Clone ID: TFbOSC4514j.C1.o1.fg
atgtcgagccggaggtcgtcgcgctcctccgtgtcggaggaggagatcaacgagctcatctccaagctccagtccctcctccccagctcccgccgccgcggcgccaaccaggcgtcgacgacgaagctgctgaaggagacgtgcagctacatcaagagcctgcaccgggaggtggacgacctcagcgacaggctctccgacctcatggccggcatggatcacaacagcccaggcgccgagatcatccgcagcctcctccgctag

SEQ ID NO: 11891 - DNA, 822 bp, Oryza sativa
  Clone ID: TFbOSC407994j.C1.o7.fg
atggtgcccagggacagggtgaatgccgctgccgctggtggcggcggcgaggggaggctggtccagagcggtatagtgaacaagaagtgtgataagaaggctccaaagagaatccataaatcagagagggagaaacttaagcgggacaagcagaatgacctctttaatgagctgggaaacttgctagaacctgacaggcagaacaatgggaaggcatgtgtactgggtgaaactacacgaatactaaaagatttactttcacaagtggaatctctccggaaggagaatagttcactgaagaatgaatctcattatgttgcattggagagaaatgaactgcacgacgataacagcatgcttcgtactgaaatcttggagcttcaaaacgagcttaggacgcggatggaaggcaatcctgtttggagtcatgtaaacaccagaccagctctcagggtaccttatccgacaaccggagtgttcccagtacagcacctgccacatttaccagtcaccacgacggcagcatttcctcagcagctaccggttatcatcgagcagcactatgccgccacgccaagagaacttcagctcttccctgagtctgcgaccagcgaagacagcgaaccgtcacaagaacacgggatttctgaccatgtaacacggcctcagccaagtaaggacgcttggcaaaatcggtcccgtgatgctcccacggtggccgcgcgtgaatcgtctctcaaccgtaaaattgggtataaagtcactctattcgttctcaccgttttttcggagatgggcaagtctttatactcggttttgtga

SEQ ID NO: 11892 - DNA, 1314 bp, Oryza sativa
  Clone ID: TFbOSC401215j.C1.o9.fg
atgggggatcatcagatgatgcacgcagctccggcggcgatgtacaacggcggcggtggtacgacgagctctcatggcgtgtggtggagcaacgcggtgggggtaccggcggcggcgacgtgctcgacgacgacggagctcgccgggtacaccgcctggtcgtcggctctggccgctggatacgatggcatggtagctgacaacggcggcaagcaggcgaagagcaccaccacggcgtcgtcggagtcgcccggcaacaacagctcggtgaccttccaagagccggcgagcatccccgacccggccgccgtcgccgccgtgccgcagccggggctcgccggcttcaccgactggacccagcctttcatgaacaacggtgctggtctgcatgagtttctgcaagatggccaccatgacatgagcgcgtcgagcttgatgaatcactcatcaaataacctagcactgcagcaagcaggtcaccaccacgagctgctgtccagcttcggctcagacctgctcttgtcgccgacgtcgccgtacggcggattccagtcctcgctgctgaggagcctcatggagccgacggcgaagcagcagcagcagcagccggctttggctggactccagcagtatcatcagtaccagcagcagatgggacacgcaccagcagctgctgccaagttcgcgcaggcagttggggccagggattcactccagttcaccaacgacgcgccgttctggaacccttctgccggattcggcatgccggcggctgtggcggtggcggcggcggcggcgcaagatcaagctagcgttcgctctgccaaacgctcgtcgccggcgccgccgcgtgcggcagcaacccttgcattaaagactgctatggaaggagtaggggactctagctcagtgatcaccaagaaggagacagcgttcaagaaaccgagactcgagacaccgtcgccattgccgaccttcaaggttaggaaggagaagctaggggacaggatcacagcgctccaacaactagtctctccttttggaaagacggataccgcatcggtgctccatgagaccatcgagtacatcaagttcctgcacgaccaagttggtgctcttagtgctccatacttgaagaacggtgcccatcaagtgccccacttgaagaactcaagtcctgacaagtccaagcacggcgagatatcactgaagggccgggggctttgtctggtgccgatatcgagcacgttcgccgttgccagcgaggtgcccgtcgagctgtggactccatttggtgccaactttattaggtag

SEQ ID NO: 11893 - DNA, 1593 bp, Oryza sativa
  Clone ID: TFbOSC401217j.C1.o16.gm
atgccgcggcgcgcgagggcgaggggcggcggcggcggcggcggggaggaggtgaaggtggaggatgacttcatcgactcggtcctgaatttcggtggaggtggtgggggagaggaggacggcgacgacggggaggaggagcagcagcagcagcaggcggcggcggcggcgatggggaaggagttcaagtccaagaacctggaggccgagcggcggaggagggggaggctcaacggcaacatcttcgcgctcagggcgatgagcaaggaggccaccttgtcggacgcgatcgaacacatcaagaatctccagaacgaggttcttgagctgcagcgccagctcggcgactcacccggtgaggcttgggagaagcaatgcagcgcgtcctgctctgaatccttcgtccccactgagaacgcccattatcagggtcaggtggaattgatctctcttgggtcatgcaagtataacctgaagatcttctggaccaagagggcaggcctcttcaccaaggtgctggaagcactctgcagctacaaagtgcaagtgctcagcctgaacaccatatccttctacggctacgcagagagtttcttcaccatcgaggtgaagggtgagcaggatgttgtgatggtggagctgaggagccttctctccagcattgtggagggagaatacagtggtgggctctttggacacccggtgatggatcacgcggagctgaccaccgagcaggttctcaagagggatattccatgggaatcatacatggcaaataagctgatttccgggacatgccttcagcttttgcgacgttatgaccacaaaccagaaagccaacgaggtcctttgcttgatgaggatgggccatcctatgttcgagtgttcctgaatatcttgcggaacatctccaaggaagatactgttgaatatgtgcttgccctgattgatgagatgcttgcagccgttgattatttgtccactacaagggttatgccaagacttgtagaggttgtgaaaggttcaacaaaagagaaggttgtcagggtcgttatcatgtctatccgtaacttgcttgcaaagggtgcgtttgctgcccaaatgattgatcttggactgccacacatagtacagaatttgaaagctcaagcatggactgatgaggatttattagatgcgctgaatcagctagaaataggactcaaagacaaccttaagaagttgagttcatttgagaagtacaagcaacaagttcttcttggccatcttgactggtctccaatgcacaaagacccaagtttctggcgcgagaacattaataattttgaagaaaatgatttccagattctacgtgtgcttatgacaatcatcgacacatcggccgacacgactgctcttgctgtcgcctgctatgacctctcacagttccttcagtaccacccttctgggcgcattgtggtggcagatctgaaggcgaaggaccgagtgatgaagctcatgaaccacgagaacgccgaagtgaggaagaatgccctgctctgcgtgcagaggcttttccttggtgcgaagtacgcgagcttcctgcagacctaa

SEQ ID NO: 11894 - DNA, 912 bp, Oryza sativa
  Clone ID: TFbOSC401884j.C1.o3.gm
atgccgtgggtgcgcttcctcgtccggttggtcgtcttcttccgcgtcatcgtgaggagtagcagcgagacgagcgccgccgacgcggtgatgagaagtggcgccatcgcgtactaccacacgctgaccaaggtttgccagaagaagatgcagggagaccacgggtactacggcgggagggactcgccgccgcaggggtacggctacggcggcggctacggctacggaggcgggtatggctacgacgccggtgggtactactccggcggcggcggcggctacccgtcggctggggcggcggcggcggcgtacgaggacccgatggtcgggaggaggacgcacgacttcccggcgccgatgaacgagctggagttccagccgtcggccacgtgccccaagaactacgtcatcttcgaccagacgtgcaccaagagccgggtcatgttccacccctcgctggcgcacaagttcggcggcgggtcgtcggcgtacgacaacaacgtgtacggcggcggcggagcgcacgacgccgccaagggcgcgtacagggacagcgtcggctacgacgacgacgacagctgctcggtgcggcagaaggaggacacggacgagatcgacgcgctgctgagctcggaggacggcgacgaggacgacgtggtgagcacggggcgcaccccggggtaccgggacggcagctccccggactcgacgtgctcgtccagctacggcggcgggcaggcgaggcccgggcgcaagaaggagcgcatgaagaagatggtgcggacgctcaagggcattatccccggcggcaaccagatggacacgccggccgtgctcgacgaggccgtccggtacctcaagtctctcaaggtcgaggtcaagaagcttggcgtgcgcggctccgacaactga

SEQ ID NO: 11895 - DNA, 1089 bp, Oryza sativa
  Clone ID: TFbOSC401860j.C1.o50.fg
atggatcaggagaaggcggacggcggcggcaggaggaggaggagcagggcgacgagtagcagcggcagcggcgcgagcagcacggcggcggcggcggcggcggagaggaaggagatggagcgcaggaggcggcaggacatgaagggcctctgcgtcaagctcgcctctctcatccccaaagaacactgctccatgtccaagatgcaggcggcgtctaggacccagctgggcagcctggacgaagcggcggcctacatcaagaagctcaaggaaagggtggacgagctgcaccacaagaggagcatgatgagtatcacatcatcgcgctgccgctcaggaggaggaggaggaccagctgctgctgctggccagtcgacgagcggcggcggcggcggggaagaagaagaagaagatatgacgaggacgacggcggcggcggcggtggtggaggtgcggcagcacgtgcaggaggggtcgctgatcagcttggacgtggtgctgatctgcagcgcagcgaggccggtcaagttccacgacgtcatcaccgtcctcgaggaagaaggcgccgacatcatctccgccaacttctccctcgccgcccacaatttctactacaccatctactccagggcctttagctcaagaattggcatagaggcttcgaggatttctgagagactacgggcattgtatactgctcttgcaacgtggagtaaggacacatatatagctccaacttctaagtttggtgttgggtctggagtggagttgagctctccatgggtgccggtgtggtcggatgcggcggcgggtggtggcggtggagatgcgagatccgaagaccggtggatgaatcgacggaaaaggctggttccttgcggcggcggcggcggctacatcgtcgtcggcaatcgggagaagccggctccttgcggcggcgccagttgcttcgtcgtcggcgtccgggatgtcactgtcctgatgaatcgacagaaaaagctggctccctgtggcagtgtcagtggcttcgtcatcggtgtccgggaggtcgctgccccgttcctagagacggcggcggcagcttcttga

SEQ ID NO: 11896 - DNA, 797 bp, Oryza sativa
  Clone ID: TFbOSC403865j.C1.o1.fg
atggagtcgtactacggcgcgttccacgccgacgaggccgcgttcttcttcccccaccacgtgccggcgtcgccggagctgccgttcggcctcattgcgtcgccggagccggagccggagccggagcaggcggcggcggaggcgaggcagagcgcgttccaggagtacggcggcgcggtgcacgccggagcgccggcggcggcgggggctgtcaccaccggtgggacgaacatccaccggagggtgatggacgtgctgggcaggatgggcggcggcggcggcgggggggagaagggggagggtgaggagatggaggaggaggaggaggtgccgcagcggcggcggcgcgggcagggcgccgacgtggagagcagccgcggtttccgccacatgatgcgcgagcgccagcgccgcgagaagctcagccagagctacgccgacctctacgccatggtctcctctcgctccaagcttcagaatgttcgaaatccccctttaatacctcttaaatggagtgtttaccaaaatcgggctgacaaaaaaccgttcgtgtcactgcagggggacaagaactcgatcgtgcagtcggcggcgatctacatccacgagctgaaggtcgcgagggaccagctgcagaggaggaacgaggagctgaaggcccagatcatgggccacgacgagcagcagccgtgcgtcacggtgcagttcgaggtcgacgagccgtcgtcgtcgatcgactccatgatcgccgcgctccggcggctcaagggcatgagcgtcaaggcgcgcgggatccg

SEQ ID NO: 11897 - DNA, 1080 bp, Oryza sativa
  Clone ID: TFbOSC401860j.C1.o28.fg
atggcctcctcctcttcctcctccagcctctgtgataatcatctcttgcaagatgacctgatcccatggccttccatgccctttgctcctgctcccaacacctttggattgaaccaccaatggagccagcctccaatgctaagcagcagtactgatcagttaagctcatatgagcttgaatcactccaatcagttgaaagtcagctggcagctgctgctcctccgacattaagcccccatctgcaggctcatcaactcagcacggtgctaatgatgcaggagctagggttccaatggagcagctgcgctgcgccagcagatcaacatagtattgcaagctccacgaataataatagtaatgtgatgatgaacgaggaggagctacggccacgtcctgatcaatccctaatcagcaatccaaggtcatgcagcgccaccacgcttcttcctccgccgcatctacatctggacggcgctgtgctcccgagcatcaacgtctcgcggctgcagaagctggccgccggcgatgagccgctgcagatatgttgcaagaggcaggctgctgctgctgcagtggtcggccatagcagcataagagatgagcatgtgccctgcccctatgctggccctcctgctcatctaattcaaggaccatccaacaccctgcagcttttaagggtgacatgcgtcatctttttgccccaaaaagtactgatgaagaggaatacgaatgcagcagctcaagggagaggtggccgccatgggagttcaacggagcacagatcatcaacagcgctgccgccatcgtcaaagaagccccggctcgagtcacactcctcctcaatgcttccttcattcaaggtaaggaaagagaaactaggggatagaattgccgcccttcagcaactggtctcaccctttggtaagactgataccgcatcggtactcatggaggccatcggttacatcaaatttcttcaggaccaagttgagactttgagcggtccatacctgagatcatccaagaacagcaagaaattagcctgcagggcagcacaacaacaacgggtaaaaagataa

SEQ ID NO: 11898 - DNA, 1608 bp, Oryza sativa
  Clone ID: TFbOSC400570j.C1.o4.fg
atgattgttggggctggttactttgaggattcccacgatcaaagtctcatggcaggatctttgatccatgactcaaatcaagctcctgcaagcagtgaaaacacaagcattgatttgcagaaattcaaagtgcacccgtactcaacagaagctctctcgaatacggccaatctagctgaagctgcaagagcaattaaccaccttcaacatcaactagaaattgatttggagcaagaggttcccccagtagaaactgcaaactgggatccagctatctgcactataccagatcatatcatcaaccatcagtttagcgaagatccacaaaacatattggtggagcaacagatccagcagtatgattctgcactttatccaaatggtgtttacacacctgcaccagatctccttaatcttatgcagtgcacaatggctccagcattcccggcaacgacatccgtattcggtgacacaacactgaatggtactaactatttggatcttaacggtgaacttacaggagtagcagcggttccagacagtgggagtgggttgatgtttgctagtgattcagctctccagttagggtaccatggtactcaatctcatctaataaaggatatctgccactcgttgccccaaaattatgggttgtttcccagtgaggacgaacgagatgtgattattggtgttggaagtggagatctttttcaggagatagatgacaggcagtttgatagtgtacttgaatgcaggagagggaagggtgagttcggaaagggcaagggaaaagctaattttgcaactgagagagagaggcgggagcagctaaatgtgaagttcaggaccctaagaatgctcttcccaaatcctaccaagttcatcagtatgatgttctttactgataacagtgccatgttattaagggttgttttggttttaagccaaattatgccctaccaaattgttggcattttgaaaagttatttggcaaagtttggcttgccaccaaagttggtcaagttttggcactaccaatatattgacatggtaacaaatcaaaacacccctaattgtgttcatcctaaccaaaatgacagggcctcaatagtaggtgatgccattgagtatatagatgagctcaatcgaacagtgaaggagctgaagatcctggtggaacagaagaggcatggaaataacaggagaaaggtgttaaagttggatcaagaggcagccgctgatggcgagagctcatcgatgaggccagtgagggatgatcaagacaatcagctccatggagccataaggagctcatgggttcagaggaggtcaaaggaatgccacgttgatgtccgcatagtggacgatgaagtaaacatcaagctcactgaaaagaagaaggccaactctctgcttcatgcagcaaaggttctagatgagttccagctcgagcttatccatgtagtgggtgggattataggtgatcaccatatattcatgttcaacactaaggtatcagaaggttcggcggtttatgcatgtgcagtggcaaagaagctccttcaagcagtggacgtgcaacaccaggccctcgacatattcaactaa

SEQ ID NO: 11899 - DNA, 885 bp, Oryza sativa
  Clone ID: TFbOSC401768j.C1.o7.fg
atggcgacgggattcgtcgtcgtcgtcgccatgtgtcagctcgctggcgtccggatcacccaagtgtgcgggaaccagaatctgggcatggtggctgacacggagagctcggggtcactgggtggcagctcaaatgctgcttctgacaaggctgttgatgggtctcttgacaaaagatctcaggaaaaggctccaaagaaaactcataaagctgaacgagagaaacttaagcgtgaccagttgaatgacctttttgttgagctcagcaatcctgaacgacaaaatagtggaaaggctactgtgttaggtgatgctgcacgagttctgcgggatcttgtttctcaagtagaatctctcagaaaggaacagtccgctcttctaactgagcgtcaatacgttggttcagagaataatgagctgcaagaagagaatatcatgctcagagcccaaatattagaactgcataatgagatttgtgcaaggatgggaaacaaccacctcaatcaaagcaatcttgcgatgtcacaaccagtagccaacaatggcagtaactcagcaactcaacccgttccacatcacatatggggcaatggtccgaatttagctatggtgcacccaacaaacacattatctccgttgcacaatcagcaccatcagtctgctggtgccagccaggtttatgcgtcacggcctcaggagctgcagctctttccagggacctcagtatcaacagagcgagaacgatcccgagctggaagtggaagcaccccggctacttcttcaggcctgacggattctttgccagggcagcttcgcctcagcctcccgcaatcttctcaagaagaaaacagcagcggcagcaagaaaggtcgaaaaaagggctag

SEQ ID NO: 11900 - DNA, 1296 bp, Oryza sativa
  Clone ID: TFbOSC418704j.C1.o1.fg
atggcgagtaaaaaggcgagtcctatcctctatctctctctctctttctgtgggccccacgctataggtgaaagcgagagaaactattcagctaaccaaattttcctcttaatgcagtctctgaagtttgggattgaagatctggttgctggcattgctgtttgggtttctgtggttgcctggcaattctttcaaggagaacgggcaggagtactaatggtgtggcaaccggtggctcagacgagattccgcgtgtttaaacatgagaatggaatcgctgtgagagttatagcttgcttccagccatcccaagattgccagaagatcctgtttgctggttgtttcttgatgggggagaaggttaatccctggtgccattggtctaatcccccatggaccgagagctctgcaaacaatctccacccacccgatgttagcctcgacaacacaaattcagtggcgttgccaacatatctgaacagcgatggctacatttattctggagttgctgcatctatgccgtctattgcagcatcagttactgacagacctgtttcattctcttctagatttgtcacaacattggtacccagtgtaggcttatcaacagctgagacactgagaaagagacctctggttttctttcataatgtgaataataccttcactgtaggtcctctcctgagcaaggggacattggatacagttccagagctccaaggtagcaatgagaccaatgtaactgatgttggagcacaaaatactgagtgtatgcatgagaatactgaggagattgatgcactcctgtgttccgactcagatgaagggtgcttgaaagtgcaagaactcaacaacagagtcaggaaatacccaatgcagaatgacaccatgagtgtggagtcggtagcaagcgctggtgcttcccaaccagcaaagaaaagaagactaagctctggtaccgacagatctgtggttgacacagccagctcagcaaggcctgaccactccgttgatcagaaacatctcagccatgacgacgacgcacagtcgtgttgtattggtgaagtggaaagcgatcaccagtttgctctgagggaaggtgaagaagcagaaggtgatgatggccccgatgatcggaagcggagaagagagaggatccaagagactgttgctgcactcagaaagatagttcctggaggcattgccaaagatgccacagccgttcttgatgaagcgatatgctatctcaagtatctaaagctcaaggtcaagacactgggagctgtttccctctag

SEQ ID NO: 11901 - DNA, 789 bp, Oryza sativa
  Clone ID: TFbOSC402160j.C1.o8.fg
atggtgccgtcggagaggggggacgtcgccaccgccatcagacccgccgctgccgacaagctcgtccatgggcctatctctgacaagaagtgccggaagaaggtcccgaggaaggttcacaaatctgagagggagaagcttaaacgcgggcatctcaatgatctgttcggcgagctgggtaatatgctagcatctgatcaaatacaacaaccttctgcagaagcggataggcagagtaatgggaaggcatgcatactaactgacaccacccggatcttaagagatctgctttctcaagtaaaatctctccggcaagaaaacagcaccctccagaatgaatctaattatgttacgatggaaaggaatgagttgcaggatgaaaatggtgcgctacgcagcgaaatctctgacctccaaaacgagctgaggatgcgtgcgacagggagtccaggttggggccatggcgcgactggatcacctctccccgttcctccctctccaggcacggttttcccatcgcagcagccaatgcagccatctcccatgacaacaagcacagtgttccccttgcagcagccactgccacaaccaacagtcattgagccctctgcaagacagccactggaactgaagctcttcctagaagcaccccccgccgaagaccctgaaccatcagaagaccaggaggctccgaacaatgtggcacgaccgcagccgaggtacccaacagaggcatcttcttggcctattagcctgggacttccaagaatggaagatgagcaaatgtag

SEQ ID NO: 11902 - DNA, 1404 bp, Oryza sativa
  Clone ID: TFbOSC401495j.C1.o1.fg
atgtacggcggcggcgcggcagcgggtggtgctacgacgacgacggggagccacggcggcggcggcggcgactggtggagcgccgcggtgtcgtcgtgctcggcgccggcgccggagacgatgcaagggttcggcggctggtcggccgcggtggtggccgtcgacggcggtggcaacacgtcgaggtcagctgctggtaacactgcttcgtcggagtcgcctggatcgctcgccaccggaagctccatcactttccaggagcccgccggcggcgtcgccgacccggccgccatcgccgtgcacgcgcagacggtggccggcggcggcggcggcggctggaatcagcagcctttcttggatgggagtggtttccatggctacatgagctcatcaagaaatgatcaccataccaatcatcatcatcatcagatcaacacgccgagtttgatgagcaactcatcatcaaataacggcgtgatgctgcaagagcaccaacatgaccagaattaccagttcctctccaacctcggcttcgagctgctctcgtcgccgacctcgccgtacggcggcggtggcggcttccgctcctcgctgctcagaagcctcacggagccggcggcggcagcgaagcctaatgactcgccggggtttcagcagtatcatcatcatcagccggcgatgaacctgcagccgccggccgccgccgccgggagagagccactgcagttcaccaacagcacggcggcgccgttttggaacccttcctccaggttcaccgtcgcggcggagggtacagcactaggtggtgccggagcatcgccggcgcagcctacgccggcgagccttgcagctaagagggcattagaaggagtaggagactccagctcaatcatcacgaagaaggcgaaggctgattccacgccactaaagaaatccagaaccgggacgccatcgccattgccgacgaccttcaaggcatgtgtctacatatatataatatttaatttgtcccaaatggtgattgatttccttccaataaagttccatgtgaggaaagagaagctaggggacagggtcacagcactccaacaactagtctccccttttggaaagacggacacggcatcggtgctccacgagacaatcgagtacatcaagttcctgcacgatcaagttggtgcacttagtgctccttacctaaagaacaggcaacaagtgccccacttgaagaactccaccggcgtcgacaacgatggcggcggcggcggcggcgaggcgacggcggctagcaagagagacctcaccggaagagggctgtgcctggtcccgatatcgagcaccttcgccgtcgccagcgagacgccggtcgatttctggacgccgttcggtgcagccttccggtag

SEQ ID NO: 11903 - DNA, 303 bp, Oryza sativa
  Clone ID: TFbOSC18429j.C1.o2.fg
atgtcgtcgagccggcggagccgtacatcgtcgagattggcggcggcgccgccgccgacggatgagcagatggcggagctcatctcgaagctgcaggccgtcctccccacccgcggcggcgaggccaatgccaaggcgtcaagtgccgaggtgctgcaggaggcgtgccgctacatccggaggcttcaccgggaggcggacgccctcagcgagaggctcgccgagctcctcctcctccagccgtccgatctcgccatcaacggcgcagatgtgcccgacctcatccgtagcctactcatgtaa

SEQ ID NO: 11904 - DNA, 1053 bp, Oryza sativa
  Clone ID: TFbOSC401762j.C1.o12.fg
atgtctcaagaaggagccgacctctctcaagatgtcgatgaaagcccatatcacaccgccgttgtcaccaccaataatctggtaaggtcgattaaagcagagaaatctaactctagctctagctccggcaagcctgtcgagacagacatcggtttaaaggtagcaagccctactatgtttgggttcaacacaaagatagagggaacgggaaagaacatggccgtcaagagagaggaaggagaaggtggtggtcgtcctggcgtcagcagtggtgtcagcacacgggataccaacggaaaaggcaagaacgctatggacatggagcacgcgttgcatatttggacggagagagagcggaggaagaagatgaagaacatgttcagcaccctacatggcctcctccccaagatcccaggcaaggttgcaaatgcaattgagaagttctatatatccttgatttaccaggatttgactgacaaggcctccattgttggggaggccattggctacatcaagacgttggaggacgtcgtccagaagctggagaccatcaagacggagcgcgtgcgcgcgcaccagtgggcggcggcggcggcagccgccgtggcagccaacggcggcggcgaggggtcctctcactctcactctcagccgccgcgccacgccaccgccgtcacagtcgccgtcgccgagcctgcgccggtggcggcggcggtgaacgcgcaggcgccgcagaagaaggcggcggcggcggcggcgccgacgctgcagacgtggtcggcgccgaacatcacgctgacgatggccggcgtggacgcgttcatcaacatgtgcctcccgcggcagagggcgtccttcaccacggtggcgttcgtcctggagaagcaccagatcgacgtcgtcacctccaccatctccgccgaccatgacaagagcttgttcagcgtccatgtccgcctcaacgaagcatcccttcagagcacagagggtctgacgcctgaagccaaatacaagctcgcagtgtcagagttgatggtcaggctcgccgaatga

SEQ ID NO: 11905 - DNA, 333 bp, Oryza sativa
  Clone ID: TFbOSC401615j.C1.o29.fg
atggttgcacacgccaccatcaacaatggccgttgcgacgccgcgccggcggcggcggcgaagtcgaggccggcggtgatgccgccgccggcgagtaatcatggggcggcctgcaagaactccggtagcaacaaggagaggaggaggatgaggcggtgcgtggaggtgaggaggaagatggaggcgctgaggagactcgtgccgggcggcggcggcggcgaggattccggcgaggagctcctgttccgcgccgccgactacatcgcgcggctgcaggtgcaggtgaaggtgatgcagctcatggtggacgtgctggagcaaacgaaagattga

SEQ ID NO: 11906 - DNA, 1189 bp, Oryza sativa
  Clone ID: TFbOSC401232j.C1.o30.fg
gcatcgacttcagaaacagcagttatgtagatggatacgccatgatgatctggacatgctaaccgatgagctagaaaggaaacgataccgaacattgatactcatggctgacacatttctggctaacgatttgcgtcagtttccctctgctaaacgtaaagcttctctttatacgtcaacacttgcaaacattttcatcttgatgttgaagggttctactggcattcagttattatcattattttctggttacatgaaagacgacgtgtcatcagctgttgagactcagcttgcagaatcttgtcgcctcgagagtggtgttgaaacctgcaggcttctggtttcttcagttgcagtgaaatgcgaagcgtctaattcaccttccacaactgtaggctttgacagaatgatcgccgcggactatgacctgttccatcacatgagcttctcgccgtcgcttcagaatcttcagtcaccaacgtttttcaccacgagaagttcagagagctacttgggagagagctcgatctatggcggaggcgccaggcctgcactcgcgcagttcagctattcccagccaattgctgctacttctgctgctcatttggtgagatggacggcggccggggagccgatgaccggcgacggcggtttcaggagctccaagaggctcaagacagcaactacggcgacgacacaacctccaaggcatggggtgaagtgccatgcaaagccaagaaatcaaactacgaaggcaacatgtaagaagaggagccagaaactgggcgacagaatcacagctctgcagcagttagtttcaccttacggcaagacagacaccgcatcggtgctccacgaagcagccgcctgcatacggcaactccaccaacaaatccagattctgacagcgccttaccctggaacaagctcctcctctgcatcgtcgcagcagcaggtcgtattttctgttcttgaaagttgcagccatgtcatgtccttctttactgcaattgcaacagttttgtggctgcaggatgccggaggaggaggaggcacggcgacggagcttcgccggcgaggcctgtgcgtggcggcgctgtcgccggccgtcgtgagcctcgcggcagagggcggtcgccgccgcacggacgtcgaggatcagaagaggatctggttcagtaatcagtag

SEQ ID NO: 11907 - DNA, 561 bp, Oryza sativa
  Clone ID: TFbOSC401860j.C1.o53.fg
atggagcgcaaggatgtggagaagaatcggcgcctccacatgaagggtctctgcctcaagctctcctccctcatccccgccgccgctccccgccgccatcaccaccactactccacctcctcctcctcatcgccgccctcctccaccaaggaggctgtgacgcagctggatcacctggagcaggcggcggcgtacatcaagcagctcaaggggaggatcgacgagctgaagaagaggaagcagcaggcggcggcactcaccaccagcaccagcaatggcggcggcggcgggatgccggtggtggaggtgcggtgccaggatgggacgctggacgtggtggtggtgagcgaggcgatcagggaggagagggagagggcggtgcggctgcacgaggtgatcggcgtgctggaggaagaaggcgcggaggtggtgaacgccagcttctccgtcgtcggcgacaagatcttctacactctccactcccaggcgctctgctccaggatcggcctcgacgcctccagggtctcccacaggctgcgcaacctcctcctccaatattaa

SEQ ID NO: 11908 - DNA, 3366 bp, Oryza sativa
  Clone ID: TFbOSC900050j.C1.o1.fg
atgtcccgtgattttttctctttcgccgtggatccatggctgcgtcgcctaattcggcaaaagccgcgtcggtctcgtgttgctcgcaacgcagggaacaaggcgacgacgcgcgagcacgacttcctctcgctgtacaccaccgccgctaaggatccgtctctccagctccacgacgccaagccgccgcctccttcccaaggtttcttcctgaggacgcacgacttcctgcagccgctggagaagccgacgccggcgccgacgccgcctccgacgagccagctgcagcagcagcagcagcaagcgttccccggcggcatcggaacgttcagcatcagccacgtcgccggcgcacgcccggtcgcggctgccgtcgtcaaggccgagccgacgccgttcgttctctggggccagcccgccgccgccgccgccgcgcacccggtcgccgcactagggcaccaccaccaccaccaccagtggacgctccccttcgccggcgtcgggcaggtggccgccaccgcggcgaggcagcagcaggagtggaaggggcgagtcgggggaggcgggttcatggactctggctccagatccagtggcggcgccgggttcgacgacgacgatggcgtggccgcgcggcgtgaggtctcgtcctcgctcaaaggtagtgtttgtgtagcagagaggaggagggagggtaggggggaagaagggaggaggaggtcgcgtgagctcatggagatggagatggagatgtactcgcggtgcgcgcggccatcccacatccaccagctgcatgcgcgcctcgtggtctccggccgcctccgctgcacctcgccgtcgctcgcgctcgcgctgctccgcgccgcgtgccgcgtgcgcgcgtcgccgtgcctgcgtcccctcgcccaccacctgctcgaccatatcccgcgcccgcacccgcatctgctccacgcggccgctcgcctcgcgtaccgtctgcgcctgccttccctcgcgctccgccactatgtcgccctccgcacgcaccacccggtgttcctccctcccgcagcggccatcgcggacatgctcaagtctgtccgtggccgcgccgcgcatgcccacgcgctacgcgtcaccgcccacgcaggggacactaggttcctggataacacacttgtcgcgatgtactttgcctgtggagatgtccagcgcgcacggcttgtgtttgagggaatgtgtgaccgggatgtcatctcatggacatcgctaatctcaggactagtgcaaaatggcagccccttgcaaggtatacagcagtttgcaacgatgatgcactgtgatgtacgccctgactttgtggtgctagtgaccgtcgccaaggcgttcatggagcttgataacctgccaggtgctgaatcagctcattccttagttgtcaagggcggtttccatgatgaacaagatgtgatgatcacattgacagccatgtatgccagctttgggtgcttagtagctgcgagggcgctttttgacatggtcccaccccagcaggtgaatgtgatcctgtggaatgccatgatatcaggttactccaagaatggatttgccagtgaggcagtgcatttatacaagcatatgcagctggttgctaggaacttggctcccgattctatcactttgcgatcagtaatatttgcatgtgctcagcttggctccactgagcttgcggcatggatggaggattgtgtatgccgcagtgagtacagggaggatgtgcttgtgaacacagctttgattgacatgtatgccaaatcagggagcatctctcatgcacgtgcagtctttgaacggatgcatgtggatgaccgtgatgtggtagtctggagtgctttaatcacgggttatggtgtgcaaggccttgtcaatgaggcttgcactttgtttcaggacatgaagcttgctggagtaagaccaaatgacgtgacattccttggacttctatcagcatgcaaccatgcaggtgctgttgagaaaggatggagctactttcactctatgaaacctgactatggaattgagccccagcaccagcactatgcttgcgtggtagacctgctttctcgtgctggacagcttgatagagcctaccaatttatactgaatatgcccatcaaaccagagatgactgtctggggcgctttactccatggttgcaagatgcacgggcactcaaacatggccatggctgaatgcgcagcacagcacatttttgagttggagcagtccaatgcagggcactatgttcagcttgcaaacatgtatgcatctgcagggatgtggagccaagtcgctggcatgcgagtcaccatgagagagaggggtgtcaccaaggcaacggggtttagcttcatcgaggttgatggagagatgcactcattccatgcttgggatcactcgcacccgagggccaccgagatattcgccatgctgtgccttctttctccaactccaaccggagttggaggagttgacagtgagggtggatgggaagggtgggagctgcagtggaagtggtttcagatacttagggagctgttacctcatagcgaccaaaagagagacaaagcaacatttctgttagaggttattgaatacatacgctttttgcaagagaaagtgcagaagtttgaagcttcagtccctgaatggaaccaagaaaatgcaaagatacttccatggtcaaacatatattttagatcgttctggaaaaattcacaaagtaaaggtcagaaccctggagatgatttgcctgatccttcacagttcatccggaatgggtcctcttctgggtataatttcactggcaaacctgatgataaccacaacatggtgacatcagcagctgcctcaggggcacaagaactggtggaaactgaccatgcagctagcgtgtcctacagatcagcagaaactccgacaaacattaccaacaatgttacatcccaagcccaagcccagtgggctagtccggctggtgtggatgactgtgcaatgaacagcgaaatgttaaataaccaacagttggcaattgatgaaggaacaataagcttgtcaagccaatattcccaacagctacttggtacgttgactcatgcccttgaaagctcaggtgttgatctgtcccaatccagcatatctgtgcagatcaaccttggcaagcgagctgttaagagacctggtgctgatggatcctccagttctaaggagctccccagtacatcagcgaacaacgaaaacatgggtcaccagctgacgatgttagggggtggtactgaagaacttccacacccaacgaagcgccataaatcgggcaacagctga

SEQ ID NO: 11909 - DNA, 1350 bp, Oryza sativa
  Clone ID: TFbOSC400070j.C1.o12.fg
atgcagcttttccaaggagaggagccggctcatgacttcctctcgctccgcgccggcggcggctcgtcgtcgccgccgttccagcaccgggaggagcagcattccagccattcatcgcgaggatacggtatggagatccgcagatcactgaggccactggacctggccaagcagcgcggccgcagcagcggcaatggcacggcggcggggagtgccgtcgacggcgcgtcgccggcaggttcggactcggaggagcacgtgctaccgggcggcgtcgggacgttcagcatcaggcacgcgtccggtactccgtcgagagaagaggccggtagccatggcggcgtcaggaggagtgcgttcgcatttgcacctgcgcttcatggcgccaggatggagaatgcacatgaaacaggaggaagatctgggagtagggctcaccgtgcgccgtcgacgatgtggcaagattctgccattgatcaaagatccataggccagacaccatatgaagcatttaattccaagacaatttcatataagtatatggtgcaagaaatgtgttctaaaatgcaattcttcatgctctccttcaggcttgaaatacttcgtgaactcctgccacacactgatcagaagagagacaaagcttctttcctttcggaggttattgaatacataaggtttttgcaagagaaagtccaaaagtatgaggaagccgatccagaaaggaatcacgaggattccaaatccatgccatgggcaaaagtctactatagatcatgctggagaaacacaaagaacaccagtcaagtccagggggaagatttgtcaccatccacacaggacatgaacaacgaacagtacggtcccaagcacatatcggcagcacaacctgctctcttcaacacacagagtgtaaccagtacaaccaccagttcctcccacatggcaacaggcacaccacaaaatttggaaaagaacagcacacccagcaatcagccaccatggctgagcatgtcaacaatgcgccaagagtctgaaccaggcaacaaaatgccgaacaagcatgagaaacagacccttcacgatgaaaaccatagtatttctagcgcttactctcaaggattattcaacagattgacagaagctcttaaaaagtcaggactagatccatctcaagctaatatagctgtagagatcaacctggccaaacgagcaagagataatactagtgacaactcaaagatcgtctgcttaataattattttgtacctttgtcctgacttcacatcacagatcaatgaagatgaagagcccatccaaataaccaagaggcggtgcaataaaagctag

SEQ ID NO: 11910 - DNA, 399 bp, Oryza sativa
  unsure (1)..(399): unsure at all n locations
  Clone ID: TFbOSC5610j.C1.o1.gm
gcgatggagctccttctccccaccgccgcngcntcngggcngcggccncggccggcgttcccgccgannccgcacctcgtcgncgcgcaagccgggttctcngcgtttgcttcccnttngngcctcnnnnnnngctcttttccccctcccccttcctcctcctccaagcgcaagcccgaccccgcctccaaggggaaggcggctgcgaagaaggggaagacggcggcgagcggcgaggacggtggcgacggcggcgaggacgagaagccggcgtacgtgcacgtgagggcgagaagagggcaagccaccgacagccacagcctcgccgagcgggcgagacgcgagaagatcaatgcgaggatggagcttctcaaggagctggtccccggatgcagtaag

SEQ ID NO: 11911 - DNA, 750 bp, Oryza sativa
  Clone ID: TFbOSC400099j.C1.o2.fg
atggagatgacaagctacaacgacgtcgacgccggcgacatgttcgctgctgctgattactactcggctggcgccggcggtgatctcttcgatatggtgtggcctggacgacgacgacgggaagaagacaacaccagcggctgcctccccttgtcgccgccgccgccgcctgagctcgccgtggatgatcagctactggctggaggcgatggcggcggcggcaaaccggtggcggtggcggtggcggaggacgacgactccggtgagcggtggacggaggaccaggttccgacagacgaagggatatgcgtcatggagaaacgaaggtgcaagataaacgagaacctgaagaccctgcaacagctcgttccagtttgcgacaagtccaataaccaggcctcaacgctggacaaaaccatccgctacatgaagtcactgcagcagcatgcccaggccatgtcagttggatgcagcatgaagacggcagaagcagcaggagtgacgtgccccttccttccaccgccgccaagcagcgccttgctggttatcgtggaggagggtcccaccagaccctgggatgcaactgctagatctacctctgccgctgctacctcttttgaccaccaccaccatggcgcactcattgaaaagctcctccaggtggtgcagccttacatgctgtcgcttaagacgtccgtccgcgaaaataatgctatggtgatgcagaaaccgaatttctaccattcttaa

SEQ ID NO: 11912 - DNA, 2511 bp, Oryza sativa
  Clone ID: TFbOSC411335j.C1.o13.gm
atggacgccttcgggtggagcgcgccagccgcgccgtgccagccgagctgcggccccggcggcgacgacgacgacgacgtcctcctcgccgccgtcttgggcgcgagcttcgagctccactccctcgtcgacggcggcggcaacggcgccgccggcgccgttcgctctgacgatgcctacggcctcgacgtcgacctgccgtcccaccagatgagcctcctgcgttgccaagatggtctgagtgctcttcacggcgacgcgtccccgacggcggcggcggcggcgttccttgactcggtggatgtgttgccagtgccggccatcgccggcgcgacgcacgacgacggcgggctcctcgataggttcgcgttcccgaacgttgccgagacgacgaccgtgcaagccgccgcgtcgaacaccgccttctccggatacagcagcaacaccaccggcggcggcaacatctcctccggcgagtcgaacacctacacggaggtggcgtcgacgccgtgcgccgtgtcgacgacgacgacgacgacggctctgcccccgtcgaagcggaagctaccagagaagtaccccgtcgtaggcacatcaccaacgacgaagaccacgacgacgtcggagacagccgcagagcgccggagcaccaagagaggggccgggggcagcagcagcatcacgttcggcggcggctgccacggcgccggtgcggcggcggcgctgctcggctacggccgcgggtacgagccggacacggaggcgatagcgcaggtgaaggagatgatctaccgcgcggcggcgatgcgcccggtcaccctcggcggcgccgcctccgcctccgaccccgacccgcagacggtggcggcgcggctgcggcgggagcgggtgagcgagcgcctgcgcgtgctgcagcggctggtccccggcggcagcaagatggacacggccaccatgctcgacgaggccgccagctacctcaagttcctcaagtcgcagctcgaggcgctggaaaccctagggaatggcaatggcaacggcaacctgttgcaccatggctactacactggatcaagaaatgctactgctactgctgctactgagcctgtttatgaggactctggatatgctgctcttctaggtgcacatcgtggcctaatccttcttccctaccgcctcgccgtcgccgctcgccaccggcgccggagccggccgctggatccgccaaaccaccggcgccagagcctcggcggcctcgcttcctatcttcctcctcccatggctccactggattccggcggcgtcaccgcctcatcgcccctcccccccgatccccaaagccacccgtcgaatcgagtccgaataatgcgcgcgccaaaccccacgccgccgcgcgactccgccatggctaggaggaggaaaggttcgtcctatcgccgccgccgccgccgccgccggcgggcgcccgcggcttgcggcgacaaccgcatcgacgacctgacggacgatctgctgctgatcatcctgcggaggctcgacacccgctccgcgctcgccaccgcggcgctctccaggcgctggtccggcctcgcgcgcgcgggcctcgaggctctcgatttcatggtcggcgacatcctcccgccgcgctaccaccggtgcatccagctccacgagtccgccagtggtgtgttcgatggcgccgacgagctcagaaccatcgttgctagcatcaggcggcacgagcgcctcgccatgcgaaacatggtcgcctccatcaacaacttcctcgacgccgatgatggttttgcccatggcgacggcggcggcggagctccacggaggaggatcagtaggctgcgggtggagttcatcgccacacactaccacgactgcatcaaccgcttggtcgccaaggctgttgatacttggggagttgaggatctagaggttcttggggttccaagctctcaccaagctggtcctgcaagacttgcgggactccacacccgcggcagcctacgaagcagtgtgttcagctcatgcctacagttgcaagaggtgcacctcaagtcctgcccctgcaagcgcggcagtagtgttttcgttgatgcccccaggtcaatgatcaggcagcttgttctggagtgttgtggcgtccctgggtttgagctgcacgctctgccaatgcttgagagtatagttgtcatgcagacctgggtacggtacaagcttggatccttcccgcgcctcgtgcgcctgaacctcaaacgcgatggtctcaggcataaacttaacttttgcttgcctgcgaacttggatctcaagccgcatcttggattcactccagacataactgaccagccatccaagttgcagcacaaacggctaaaggagttggtgatcattggttttgaaggaacagagagacagatttactttgttaactttgtcattgaagtgtcaatggtactggagcttgtttccttgagtatggccgtgttcaggaaatag

SEQ ID NO: 11913 - DNA, 636 bp, Oryza sativa
  Clone ID: TFbOSC412549j.C1.o7.fg
atggagttcgacatggcaatggacatgatgagccaggagcagctcatgcacatcatctcacagctagacagtgcactggcgagctcgccttctccatccacgtcgccgtcggcgtcgccgccgcgacagtcaccggcggctcatgttccagtacctccaggtctactcaacactacgatggtttctacttctcgagctcaagcggcgccgtcggcgccgttgcatccggtcgccgccacggctgcggtgcagtcgtcgtcgcggggcattatgtacacgacgacgcgccagggcgtcatcgacgcggcggaggaggaggaggcggcggcgccgcggccgcggcggcgcaacgcgcgggtgtcgagcgagccgcagagcgtggcggcgaggctgcgtcgggagcgcgtgagccagcggatgcgcgcgctgcagcggctcgtccccggcggcgcgaggctggacacggcgtccatgctggaggaggccatccgctacgtcaagttcctcaagggccacgtccagtcgctggagcgcgccgccgccgcgctgcacatgcacggcggccacgccgccgccgccggcttcgccggcgacgcgggagacgccgtctactcctgcccgtcgtactacgcctag

SEQ ID NO: 11914 - DNA, 576 bp, Oryza sativa
  Clone ID: TFbOSC400622j.C1.o23.fg
atgaagttaaggtttgtgcgaaagaataatcacaaacgacgggacaggatcaaccaaaagatgaaaacattgcagaagctcgttcccaattcaagcaagactgacaaggcgtcgatgcttgacgaggtgatcgactacctgaagcagctgcaggcgcaggtgcaggtgatgagccggatgggcagcatgatgatgcccatgggcatggccatgccacagctgcagatgtccgtcatggcccagatggcccagatggctcagatcggcctcagcatgatgaacatgggccaggccggcggatacgcgcccatgcatatgcacacgccccctttcctccccgtctcctgggacgccgccgcatcctcctcctccgccgccgccgccgaccgaccgccgcagcccaccggcgccgccacctccgacgccttctccgccttcctcgcctcccaagcggcgcagcaaaacgcacagcaaccgaacggcatggaggcgtacaaccggatgatggcaatgtaccagaagctaaaccaccagcagcagcagcagcaggaccagccaagcaactccagacaatga

SEQ ID NO: 11915 - DNA, 1017 bp, Oryza sativa
  Clone ID: TFbOSC400431j.C1.o55.fg
atggcgccaccgccaccggcgccggcaaccacggcttcacctgtggctatgctgccagcagttacgtatatggttatagctgcggttcttgggagttcgagcaaagggagcagcagttcatcagctcgcagattcagcaccatcagcatgcacctgagcatggatgatgacgatgatcagtccgcggtgtacggcgtcgccatggtggacgacctcctgacgccttcgccgtcgacgcaccacgccgtcgccgccgccgccggcagcttcccttcctcgtcatcctcctcggcctccttccgctccgcctccgtgtcgtacagcccggacacctcgtcgtcggcggcagcggcggcggcgacgggattctacccggagttgtcctcgcaggtggcgccattattaccaccaccacccttggtgcgcaacgagccccagcccggccgttacaccgccggcctgccgccgccaccgccgccgccggtgaccggtggcgcgttcaggcggtacgcgcggcacctcggcccgaggagggcgcccaagccgggggcgtgcgggcagaggatgttcaagacggccatgtcagcgctggccaagatgcacatggagacgacgtacaggcgccgccagtactactaccagcaagcggcggcggcggccgaggcggcgccgccgccgccgtccggcaacaaccagctgcagcacacgatgtcggagcggaagcggcgggagaagctcaacgacagcttcgtcgccctcaaggccgtcctccctcccggctccaagaaagacaagacgtcgatactgatcagagcaagggagtacgtgaagtctctcgagtcaaagctgtcggagctggaggagaagaaccgggagctcgaggcgcggctgtccacccgccccgacgacaccaagaacgacgaagaggaggtggcggcgccaccggaggccggcggcgaggtgaagagagaggatccggtagagatcgaggctttagataatttttttataagatga

SEQ ID NO: 11916 - DNA, 1662 bp, Oryza sativa
  Clone ID: TFbOSC102138j.C1.o7.fg
atgggaagaggagaccacctgctgatgaagaacagcaatgctgctgcagctgcagctgctgtcaatggaggtggcaccagtttggatgctgcattgaggcctctagttggttcagatggctgggattactgcatctactggaggctctctcctgatcagaggttcttggagatgacaggattctgctgcagcagtgagcttgaagcacaggtctcagcactgctggacctgccttcttcaatcccactggactcctcctccatagggatgcatgcgcaggcattgctgtcgaaccagccgatctggcagagcagcagtgaggaggaggaggctgatggcggcggtggcgccaagacgcggctgctggtccccgtcgccggcggcctcgtcgagctcttcgcgtcgagatatatggcggaggagcagcagatggcggagcttgtcatggcgcagtgcggcggcggcggcgccggggacgacggtggggggcaggcgtggccgccgccggagacgcccagcttccagtgggacggaggcgccgacgcgcagaggctgatgtacggcggctcgtcgctgaacctgttcgacgccgccgccgccgacgacgacccgttcttgggtggtggtggtggtgacgccgtgggcgacgaggcggcggcggcgggcgcgtggccgtacgcggggatggcggtgagcgagccgtcggtggcggtggcgcaggagcagatgcagcacgcggcgggcggcggcgtggcggagtccgggtcggaggggaggaagctgcatggcggtgacccggaggacgacggcgacggcgaggggcgctccggcggcgccaagaggcagcagtgcaagaacctcgaggcggagaggaagcggaggaagaagctcaatggccacctctacaagctccgctcgctcgtcccaaacatcaccaagatggatcgcgcgtcgattcttggagacgcgatcgactacatcgtggggttgcagaagcaggtgaaggagctgcaggacgagctggaagacaaccatgtccaccataagccgcccgacgtgctcatcgaccacccgccgccggcgagcctcgtcgggctcgacaacgacgacgcctcgccgcccaacagccaccaacagcagccgccgctcgccgtttccggcagcagcagcaggaggagtaacaaggacccagcaatgaccgacgacaaggtcggcggcggcggcggcggtgggcaccggatggagccgcagctggaggtgcgtcaggtgcaggggaacgagctgttcgtccaggtgctctgggagcacaagcccggcgggttcgtccgcctcatggacgccatgaacgcgctcggcctcgaggtcatcaacgtcaacgtcaccacctacaagaccctcgtcctcaacgtcttccgcgtcatggtagtgagggacagcgaggtggcggtgcaggcggacagggtgagggactcgctgctggaggtgacgcgggagacgtaccccggcgtgtggccgtcgccgcaggaggaggacgacgccaagttcgacggcggcgacggcgggcaggctgcggcggcggcggcggcggccggtggagagcactaccacgacgaagtcggcggcggataccatcagcacctgcattacctcgcgtttgattga

SEQ ID NO: 11917 - DNA, 1510 bp, Oryza sativa
  Clone ID: TFbOSC900412j.C1.o23.fg
gttacctggaagggcatttgcaaggagaggccatgtatggctcactggagcaaatgaagttgacagcaaagtattcctaagagcaattcttgccaagacagttgtgtgcattcctgttgtcgatggcgtcctggaaattggaactacggaaaaggtggaggaagatatgggcctgattcagtatgcaaggggcatcttcatggatcaacatggcatccacatgaagcctaccctctcacagcactcaacatccaacccagtcacccactgtactcatcagcatccaatccaggttcagatgcaactaggtatcaccagccaaacaaagtttgattattcagatgagctcaatgcagatgaggagaatgatgacacagaagaagagggcatgtcaggttcagacactaacaacactgacactgaaaggaattcaggccagctgcaacttcaaatgcaagaccaactgaacatggtgagcaatgaccaccagacaataccaaataatgcagtttccagtgagctaatgcagtgtgagatgtcagaagtggtaagagatggctgctcaaataatattttagaggatgaaatccaaatgctgatggattgccaaaacagtaattgtcagttaaatttgcaagggccagatgagccttgtcactcttggcattttctctgcgaggagttacaaaatgattaccagccagctactgaagatcaagtggcatcacctgaaaatacccattacccaaaaacactcatgacaatcctacattacaacacgctgcgacagcaagagatgaacatcaagaactacttgccagtttcagagaaatcatcattctccagatggactactcctgaaggaatagtcactgcagttacaggggagcagaaacacctgaatcaaggggcgggaaaggcgcaagtggatgccatccaaggtgatttcagtgccaaccatgtgctgaaagagaggagaagaagagagaagctcaatgagaagttcataattctgcgatctttggtacctttcatgacaaagatggacaaggcgtcgatactaggcgacacgatcgagtacgtgaagcagctaaggaaccgcatacaagagctcgagtcgtcgtcgtcgtcgtcacgagcagccgcccgggcgccatcggcggcggccgccgggaggcggaggaagagatccgccgccgccgccactgccacggcggcggaagggatgagcagcagcaatggccgcaatggcggcgaggcggcggaggtggtgcaggtgtccatcatcgagagcgacgcgctgctggagctccggtgcggttgcggcggcggcggcggcggtgtggtgctgctccgggtgatgcaggcgatgcaggagctccagctggaggtcaccgccgtccaggcctcgtgcgccggtggcgagctgctcgccgagctgcgcgccaaggtcgtcgttatgatcctgatctgcatgaaaatgcaaatgcaaatgcaaatgcagaattaa

SEQ ID NO: 11918 - DNA, 948 bp, Oryza sativa
  Clone ID: TFbOSC400903j.C1.o11.fg
atggacgagcagcggggacgcggggggttcgacgaactggtgctcttgcatcagcagcaggagcagcggaggcggagggagcagcagcaggaggaggaggaggaagaggaggtgcggcgccagatgttcggcgcggtggtcggtgggctagccgcgttccctgcggcggcggcggctctgggacagcagcaggtggactgcggcggggagctgggcgggttctgcgacagcgaggcgggcgggtcgtcggagccggaggcggcggcgggggcgcgcccgcgcgggggatccggcagcaagcggagccgcgccgccgaggtgcacaacctctccgagaagaggaggaggagcaagatcaacgagaagatgaaggcattgcagagcctgataccgaattccaacaagactgacaaggcatccatgcttgacgaagccatcgagtacctgaagcaactgcagctccaagtgcagatgctctcaatgagaaacggtgtttacttgaacccatcttatttatctggagcacttgagcctgcgcaagcatcacagatgtttgcagcccttggtggtaacaacgtcacagtggtgcaccccgggacagtgatgccaccagtgaaccaaagctcaggagctcatcatttgtttgatccattgaactctcctccacaaaatcaaccacaatctctaatcctaccaagtgttcctagcacagccattcctgagcctccatttcacctggagtcatcacagtcccaccttcgacaatttcagttgcctggatcctctgagtttcacaagattttgtttttacatgtacttttatctgtaaaagatggtgtttcatggagagataatgccaaagcaccacctatcatcacatcaagaaagtctgccaggaaacgagatgaactccatcaggaaagaatcatccatgttgaacaccaataa

SEQ ID NO: 11919 - DNA, 1911 bp, Oryza sativa
  Clone ID: TFbOSC400765j.C1.o26.fg
atggccggcggcgaggcgcatgcggcgctgcaggcggtggcgcagagcctccggtggacctacagcctcctctggcagctctgcccccaccaagggagctcgctggtgtggggggaggggcactacaacggcgccgtcaagacgcggaagtcgacggtgatgcagccgccgccggcggaggaggaggacgacgccgaccacgcggcgcgccaccggagccggcagctgagggagctctacgactggctgcagcaggccggggagaactccagcggcggcgtgcagacgtcgtcgacgacggcgagccggcggccgggggcggctctgtcgccggaggacctgacggagacggagtggttcttcctcatgtcggcatcctactccttccctcccggcatcgggttacctggaagggcatttgcaaggagaggccatgtatggctcactggagcaaatgaagttgacagcaaagtattcctaagagcaattcttgccaagacagttgtgtgcattcctgttgtcgatggcgtcctggaaattggaactacggaaaaggtggaggaagatatgggcctgattcagtatgcaaggggcatcttcatggatcaacatggcatccacatgaagcctaccctctcacagcactcaacatccaacccagtcacccactgtactcatcagcatccaatccaggttcagatgcaactaggtatcaccagccaaacaaagtttgattattcagatgagctcaatgcagatgaggagaatgatgacacagaagaagagggcatgtcaggttcagacactaacaacactgacactgaaaggaattcaggccagctgcaacttcaaatgcaagaccaactgaacatggtgagcaatgaccaccagacaataccaaataatgcagtttccagtgagctaatgcagtgtgagatgtcagaagtggtaagagatggctgctcaaataatattttagaggatgaaatccaaatgctgatggattgccaaaacagtaattgtcagttaaatttgcaagggccagatgagccttgtcactcttggcattttctctgcgaggagttacaaaatgattaccagccagctactgaagatcaagtggcatcacctgaaaatacccattacccaaaaacactcatgacaatcctacattacaacacgctgcgacagcaagagatgaacatcaagaactacttgccagtttcagagaaatcatcattctccagatggactactcctgaaggaagtgatgacaacaagaccatgatcagtccaggcaccacacagagaatgctcaagagcatcctgatgattgttcccagtagtcactgcagttacaggggagcagaaacacctgaatcaaggggcgggaaaggcgcaagtggatgccatccaagaagtgaatcctacccgtatccaccgatggacaaggcgtcgatactaggcgacacgatcgagtacgtgaagcagctaaggaaccgcatacaagagctcgagtcgtcgtcgtcgtcgtcacgagcagccgcccgggcgccatcggcggcggccgccgggaggcggaggaagagatccgccgccgccgccactgccacggcggcggaagggatgagcagcagcaatggccgcaatggcggcgaggcggcggaggtggtgcaggtgtccatcatcgagagcgacgcgctgctggagctccggtgcggttgcggcggcggcggcggcggtgtggtgctgctccgggtgatgcaggcgatgcaggagctccagctggaggtcaccgccgtccaggcctcgtgcgccggtggcgagctgctcgccgagctgcgcgccaaggtcgtcgttatgatcctgatctgcatgaaaatgcaaatgcaaatgcaaatgcagaattaa

SEQ ID NO: 11920 - DNA, 933 bp, Oryza sativa
  Clone ID: TFbOSC423195j.C1.o3.fg
atggagtccggaggggtgatcgcggaggcggggtggagctcgctcgacatgtcgtcgcaggccgaggagtcggagatgatggcgcagctgcttggaacctgcttcccctccaatggcgaggatgatcatcaccaagagcttccttggtcggttgacacccccagtgcctactacctccattgcaatggaggtagctcaagtgcatacagctctaccactagcagcaacagtgctagtggtagcttcactctcattgcaccaagatctgagtatgaggggtactatgtgagtgactctaatgaggcggccctcgggatcagcatccaggagcaaggtgcagctcagttcatggatgccattctcaaccggaacggcgatccgggcttcgatgatctcgctgactcgagcgttaatctgctggattccatcggcgcttctaacaagagaaagattcaggagcaaggcaggctagatgaccaaacgaaaagtaggaaatctgcgaagaaggctggctcgaagcggggaaagaaggcggcgcaatgtgaaggtgaagatggcagcattgctgtcaccaacaggcaaagcttgagctgctgcacctctgaaaatgattcgattggttctcaagaatctcctgttgctgctaagtcgaatggcaaggctcaatctggccatcggtcagcaaccgatccccagagcctctatgcaaggaaaagaagagagaggatcaatgagaggctcaagattctgcagaaccttgtaccaaatggaaccaaagtagatatcagcactatgcttgaagaggcaatgcattacgtgaagttcttgcagcttcaaatcaagctcctcagctctgatgaaatgtggatgtacgcaccgattgcttacaacgggatgaacatcgggatcgatttgaacctctctcagcattga

SEQ ID NO: 11921 - DNA, 630 bp, Oryza sativa
  Clone ID: TFbOSC401685j.C1.o98.fg
atgtcgtcctcgtcggggtcagggagaagcgcgacggaggcgagagcgttgaagatccacagcgaggctgaacggcggcggcgagagaggatcaatgctcatctgacaacactgaggagaatgatccctgatactaagcagatggacaaggccaccttgttagccagagtggtggaccaagtgaaggatctgaagaggaaagcaagtgagatcacacaaagaacacctctccctccagagaccaacgaagtctccatcgaatgcttcaccggagacgctgccaccgccgccaccactgtcgccggcaaccacaagaccttgtacatcaaggcttccatcagctgcgacgaccggccggacctcatcgccgggatcacccacgcattccatggcctgaggctgaggacggtcagagcagagatgacatcactgggaggaagggtgcagcatgtgttcatattgtgcagggaggaaggcattgcaggtggtgtgagcctcaagtctctgaaggaggctgtcaggcaggcactagccaaggttgcctctcctgaattggtatatggcagcagtcactttcagagcaagaggcagaggatcctggagtcacattgctcaattatgtccatatag

SEQ ID NO: 11922 - DNA, 588 bp, Oryza sativa
  Clone ID: TFbOSC33102j.C1.o1.fg
atggcaggcttctcacacctcccacagcagatggagcatggcctcatcaccaacaatggcttcctcttctgccatggcagccatggaggagcagcaaccaccacagctccagccatccctgaagatgcctcaatggagacctcatctgtggttcttgacacctctccacaggacaagaagaggaagcccagggaagaagacactgccagcctcaactctgctcactccaaggaggcaaaggagaatggcaggaagaggggagggaagaaacacagcagggatcagatggaggaggaggcacctcaggggttcatccatgtcagggcaaggagagggcaagcaacagatagccacagccttgcagagagggtgaggagagaaaggatcagtgagaggatgaggatgctgcaggctctggtccctggttgtgacaaggtcactggaaaggctctcattttggatgagatcatcaactatgtgcagtccttacagaaccaagttgagttcctttccatgaggattgcatctctgagccctgtgctgtatgggtttggcatagacagtgatgctttcagtgaccactctcag

SEQ ID NO: 11923 - DNA, 876 bp, Oryza sativa
  Clone ID: TFbOSC400867j.C1.o1.fg
atggcagacttctcaccacaccactctctcctcctcaaggctactgctgctggagcagccatcgccaccaccaatgaccccaacatctcaagcttcttcctctacaaccacagccatggctcccaagctccacaacctgccaatgcagcagcagcagccattgtggaggatgcctcattggagagctcagtgtctgcagttcttgacacctctccatctgtggacaggaagaggaaggcagcagaagacagtgcacactccaaggatagctgcaaggatggcaagagcaggagagggaagaaggccagcaaagaagtggaggagaagagcaccactgaagatgagcctccaaaagggtacatccatgtgagggcaaggagaggacaggcaactgatagccacagccttgcagagagggtgaggagggagaggatcagtgagaggatgaggatgctgcaagcactggtccctggttgtgacaaggttactggaaaggctctcattttggatgagatcatcaactatgtacagtcgttgcagaaccaagttgagttcctatccatgaggattgcttcaatgagcccagtgttgtatggctttggaatggacagcgatggcctccatgaccaaaagattggaggcatgttccaagaagcccttgcaatgcctaatccagtactgaaccaatcaagcccagctccatctcaagctatcatggacacaacctcaaccacatcctactcactgcaaagccagcatggagccatctctttctctcaggacaatggcagttacctgatgcaagcagtgggggagccaaggcagcaggagatgctcaatcaattggtgttcaacaacatgtgctctttccagtag

SEQ ID NO: 11924 - DNA, 849 bp, Oryza sativa
  Clone ID: TFbOSC900128j.C1.o4.fg
atggcaggcttctcacacctcccacagcagatggagcatggcctcatcaccaacaatggcttcctcttctgccatggcagccatggaggagcagcaaccaccacagctccagccatccctgaagatgcctcaatggagacctcatctgtggttcttgacacctctccacaggacaagaagaggaagcccagggaagaagacactgccagcctcaactctgctcactccaaggaggcaaaggagaatggcaggaagaggggagggaagaaacacagcagggatcagatggaggaggaggcacctcaggggttcatccatgtcagggcaaggagagggcaagcaacagatagccacagccttgcagagagggtgaggagagaaaggatcagtgagaggatgaggatgctgcaggctctggtccctggttgtgacaaggtcactggaaaggctctcattttggatgagatcatcaactatgtgcagtccttacagaaccaagttgagttcctttccatgaggattgcatctctgagccctgtgctgtatgggtttggcatagacagtgatgctttcagtgaccactctcagaagatggaaggaatgttccatgaggcagttgcaataccagcttctgtcctgaacagaggtagtagcccagctcaatctcatgccatcatggacacatcaaacacctctcctacaccctacacacttcaagtccagggaggcagcaacaacaactctctctcccaggacaatggcagctacatcatgcaaacagtaggggagccaaggcaagaactgttcaatcaagtggtgctcaataattacatgtgctctttccagtag

SEQ ID NO: 11925 - DNA, 1500 bp, Oryza sativa
  Clone ID: TFbOSC900417j.C1.o6.fg
atggctgcggcggcggcggcgggccagatctccctggacgacctccgcaacggcggcggggtcgccgccaatgccggcggcggcggcggcgtccacgacgacttcctcgaccagatgctcagcagcctgccgccctcggcgtggcccgacctcgccgccgggaaggcggccgaggacgacgccgaggggatgcatcaccaccaccaccagcagcagcagcagtttggtgggccgtacgacgagtcggcgatgctggcgtcgcggctccggcagcaccagatcagcggcggcggaggaggaggcggcggtggcgcggccgccgtgaagcagatggtgctgcagcagctcgccgatctgaggcaggggcaccacatgatgctccagggcttggggggacggtcgccggcggggggcggcggcggcggcggcgacgggggccttctcctcccgctcaccctcggcagcggcggatcgggcggcgacgtgcaggcgttgctcaaggccgccgcggccaattccgccggaggaggagacgccggcggcgtctacggcggcggattcgccggctcgctccatcaacagcagcaacatttccagccacatccacagacggcgccgacgattccgacgcagagcttcggcggcggcggcggcggaggaggaggaggaaccgcgtcaggcggcggggcggcgcagcctcaggccggcgcggctggaggaggcgcgccggcgccgccgcggcagcgggtgcgggcacggcgaggccaggccaccgacccccacagcatcgccgagcggcttcggagggagaggatcgccgagaggatgaaggcactgcaagaactggttcccaacgccaacaagttgatgcagacggacaaggcttccatgctggacgagatcatcgactacgtcaagttcctacaactccaagtcaaggcaagcacgtacactaaattactaatacatgttttgagcatgagccggttaggtggcgccgcagccgtcgcgccgctcgtggccgacatgtcctcggaggggcgaggcggcggcgcggcgaacggcggagcaccggcggcggcggggagcgatagcctgacggtgacggagcagcaggtggccaagctgatggaggaggacatgggcaccgccatgcagtacctgcaggggaagggcctctgcctcatgccgatctccctcgcgtccgccatctcctcggcgacgtgccatctccggccgccggtggtcgccgccgcgcagcagttcccggccgggctcggcgccgccgctgccgccgcgcatcaccaccaactgagcgcggcggcggcggcggcggccatgcgcggacacctgcccggcctgaacgccgacggctccgtgccggcctcgccgagcatgtcggtgctcacggcgcagtcggccatggccaacggcggcgggggcgccgccgacggcgaggggtcgcagctcaaggacgccgcctccgtctccaagccgtga

SEQ ID NO: 11926 - DNA, 819 bp, Oryza sativa
  Clone ID: TFbOSC401648j.C1.o35.fg
atggcggagaccaaccacctcctcctcctcctcctctctcctccgcgcctccgcctcctctcctggactcccacgactcctcttgcgtgtgctgcgttgagtcgagcagccaagctgtctcgtgatctcgtctcggagaagggagaacgaggcatccggtcgttcaaaaaaaatattgctgaacaacatatgcatgccagcttagggctggaccagctagcagccattggtagcctgtatcagttcataaggggaggaggtgaaggcaaggaggcagctagccaagaagaagagcagacaccaaaactcagatctgttattgcacatcttgtttccaggaagaggagaagggataggatcaatgagaagctgaaggcgctgcaagagctacttccaaattgcaccaagaccgacaaagtttcgatgctggatgaagcgatcgactacctgaaatcactccaactacaactccagatgctggtcatggggaagggaatggcaccggttgttcctcctgagctgcaacaatacatgcactatatcacagctgatccttctcaaattcctcccatacgcccctccgagccgcggccatttcagataacccacgccacccaacagagacagtctaacgtcgagtcggatttcttgagccagatgcagaatttgcacccttcagagccacctcaaaatttcctcagaccaccaaaattgcagttgtacacgccggagcagcagagaagaggtctagctagtagcagtggccacaacagcggttggatcacggagaggaattcatcgtacaacttcttggagtga

SEQ ID NO: 11927 - DNA, 765 bp, Oryza sativa
  Clone ID: TFbOSC9961j.C1.o3.fg
atggacgactcgagcctcttcttgcattgggcggtgagcacgctgcagcaccagcacccggcggccgtcgcagtcgtggccgacgacgacgccacgttcttctcgttccaggagctctgcgacaccgaggaggtggttgttgtcccggtccaggaagaagtgatcacggaagcgcatggtgcagccgaacggcggcggcggtggcggcgcgccggagatggcgtacgggtcaccgccggcggccgggggatccaccaccaggaagacctcggcgcccacggtggggcggcggcggcgtacgcgcagctggagcacgtcgtcgcggagcggaagcggcgggagaagatcaaccagcggttcatggagctctccgccgtcatccccaagctcaagaagatggacaaggcgacgatcctctccgacgcggcgagctacatcagggagctgcaagagaagctcaaggcgctagaggagcaggctgctgccagggtcaccgaggcagcaatggcgacaccgtcgccggcgagggcgatgaaccaccttccagttccgccggagatcgaggtgcggtgctcgccgacgaacaacgttgtgatggtgaggatccattgcgagaacggcgagggggtgatcgtgaggatcctcgccgaggtcgaggagatccacctcagaatcatcaacgccaatgtcatgccatttctggatcagggcgccacgatgatcataacgatcgctgcaaaggcaagttcttcattattatattaa

SEQ ID NO: 11928 - DNA, 882 bp, Oryza sativa
  Clone ID: TFbOSC400878j.C1.o3.fg
atggcggggcagcagccgccgacgggaggagccgaggacgacttcttcgaccacttcttcagcatcccctccgccgccgcggccggcgccggcggcgtcggcggattcggctcgggtgaccaccaccccttcccgctcgcgctcagcctcgacgccgagggcgccggtgccgccaggcgcctcctcgacggcggccacgacggcggcaggacggaccgggaccccgtgcagctcgccggcctcttcgccccggtgttcggcgccgccgccggagtccagccgccgcacctccgcgccccgccgcctccccaggtgttccacgcgcagccgaagcccggggagggggccatggcggcgccgcagcctcagcagccaccggcgccccggccaaaggtgcgggcgcggcgcgggcaggccaccgatccccacagtatcgctgagaggctaaggagagagagaatagccgaaaggatgagggccctgcaggacttggtccccaacacaaacaagacagacagggcagctatgctagacgaaatccttgattatgtgaagtttcttcggcttcaagtaaaggttctgagtatgagcaggctgggtggtgctggtgcagttgcgcagctggttgctgatattccaatctcagttaagggggaggcaagtgacagtgggagcaaacaacagatttgggaaaagtggtcaaccgatggcacagaaaagcaggtagcgaagctgatggaagaagacatcggagcagcaatgcaattcctccaatccaaagcactatgcatgatgccaatctctcttgcgatggcgatctatgacacacagcattcgcaggacggacactcagtgaagcctgaacccaacactccttcatag

SEQ ID NO: 11929 - DNA, 1434 bp, Oryza sativa
  Clone ID: TFbOSC407936j.C1.o27.fg
atggcgcagcagtggcgatctctcctcttcctcctcctcctcctcctcgtgcccttcgccgccgccgccgggcaggatgcgccgttcgtggtagcacagaagaaggttgcgctgtcccgcccgggtccaggcgtggagcgcctcgccgtcaccctcaacctctacaaccagggttccgcgaccgcctatgatgttagcttgaacgacgactcttggccacaggaggcttttcaacttatctctggaaccacatcaaagattgtggaaaaacttgatcctggtgctactgcttcccacaacttcatcttggagaccaaagtgcagggcaagtttcagggctctcctgccattatcacataccgtgttcccacaaaggccgcacttcaggaggcttactcaacgcccatgtttccacttgatattcttgctgagagacctccccaacagaagtttgaattggctaagagacttgtggggaaatatgggtcgctggtctccgttgtttcctttgtcgagcctcttcctgtcccaggcttccctgccggctgcagcaaccttgaagagaaggcagcagcagccatggcggcctatgagtatgagagcagcagctgcagctcccttgaccccacctcaatgccaatggtgtactcaccaatagtgctgcagccacaggagtgccctctttcctttgtctttgacaatgccgctgccgctgccggcgacaacaaatgggtgcctggcattcaaggaagttgcccttgttcattgggctcaactcaagatatggatgcaagttggggcaagagtagaaagcacaagaggagcaatgtgggcttgaagggacttgaggagaaaaaggcaagaagggtggtactacatcaacatgatgatgatgtgaagaagaaggccaaggaggcagcaggtggggagccaccagctgggtacattcatgtgagggcaaggagaggccaagcaacagacagccacagccttgctgagagggtgagaagggagaagatcagtgagaggatgaagatgctgcaaagcctggttcctggttgtgacaaggtcacagggaaagccctcatgctagatgagatcatcagctatgtgcaatctctgcagaaccaagttgagtttctgtccatgaagcttgcctcccttagccctttgatgtatgagtttggaccgggcattgatatgcacccagatgttcttcgacagcttgcaaagatgccacatgagatggtgcagtgcatgggccaaatggggagtacaggcatttcactccaaggactaggaggaggacccacaggctttgctcaggatggcagcagccacattaacatggtggtgatgcaagttggagagcaaggccagcagcagggctctcttcaccaggtcgagatgagcagccactgcttctttcattag

SEQ ID NO: 11930 - DNA, 1239 bp, Oryza sativa
  Clone ID: TFbOSC400431j.C1.o57.fg
atggatagcagcagctggatccatggctacacaaacgccaacgccaccggcgccaacagcggcttcatgtgcggctacgctgccagcccagtagagtttccgcagcagcaacagctgatcagcatgcagatgggcatggatgacgagtcggcggtgtacgacggcgcctccatggtgggcgacctcctcatggcttcctcgtcggcgcaccacgccggtgccggcagcttccagtactcctcgtcgacgacgtcctcctccgcctccttccgctccgcctccgtctcgtgcaacccggagagctcggcggcggcggcgccagagttgccggcggcaaccggcggcgcgttcagtcgctacgcgcggcacctccgcccgaggaggccacccaagccgggagcgtgcgggcagaggatgttcaagacggccatgtcggtgctcgccaacatgcacgtggcggcgacgtaccgccgccagtactactaccagcaagcggcggcggcggcggcggccgaggcggcgccggcgccgccgtccgacaaccagctgcagcacatgatctcggagcggaagcggcgggagaagctcaacgacagcttcgtcgccctcaaggccgtcctccctaccggctccaagaaagacaaggcgtcgatactgatcagggcaagagagcacataaagtctctcgagtcaaagctgtcggagctggaggagaagaaccgggagctggaggcgaggctagccagccgccccgccgccaagaacgacaaaggcgagacggcggcggcggaagccggcgacgagacgaagcgagaggacctagtagagatcgaggtgacgacgacgagcggcggcagcggagcggcggctgcggcggcgacaggaggagatcaagagacttgttgcacgctcaacgtggacttgcgcggcggcggcggcggaggcatgagcacgacggacgttgtgctccggacgctgcagtgcctgagagagcagatcggcgacggcgccagcctcgtggcgatgagcaccagcgccggctccggcggccgccctcctagtgcaaacctaacattacagctcaagagcccaacatatggcagatgctcctacaagtatgagtttactctttttcttgtcaaccgtcaaaagccaaccatcaaacatattagatatggttctagaaagatcagcatgagcttgagcatggatgatgtgacgatgatcagtccgcggtga

SEQ ID NO: 11931 - DNA, 1113 bp, Oryza sativa
  Clone ID: TFbOSC400036j.C1.o73.fg
atgagtagagtgcccactagttggggttttgtttattctagggtgaacaaggtttcggaggaaccaaacgtggtaaaccgaatcaccacggctttctgggagcttcagcttccggcatgctcagacgagccaattagctccggtaccccttcttccccatcatcgccgccgacgaaagaaactggagacgccaacaccgtggtcatcgacgacctcttcctcgcccacagcgatgcgatactaccagcaggaggagatcaaaaagaagaacatcagctaggcgacgacctcgggcaacaacaagcagccaccgccatggagatcgacgacgatgtgatctacagcctgatcaggaactgggataacgacagcagcagcagctggatcgagctcctggaccacgccattgtctctcccgcctcgtgctttgtgccttggaagagaacggagctggacaaggaggcggtggccggcggggaggcggcgcagaggttgctgaagaaagtcgtgggcggcggcggcgcatggatgaatcgtgccgctggtagctgcagcatcaagaaccatgtcatgtccgagagaaggcgccgggagaagctgaatgagatgttcctcattctcaaatcactggtcccgtccatcgacaaggtggacaaagcatccatcctttcagagacgatagcctacctcaaggagctggagaggagggtgcaagagctcgagtccgggaagaaggtgtctaggccggccaagaggaagccatgctcagagacgatcatcggtggtggcggcggcggcggcggtgctggagctgttaaagagcaccaccactgggtgctctccgagtcccaggagggcaccccaagcgacgtgcgtgtgatcgtcatggacaaggatgagctgcacctcgaggtgcagtgtcggtggaaggagctgatgatgacaagggtgttcgacgccatcaagagcctccgtcttgatgttgtctcggtgcaggcgtcggcaccggatggtcttctcggactgaagatacgagctaagtatgccagttctgccgccgtggtgcctgcgatgatcagtgaaactctccggacagccgtagcaggctactaa

SEQ ID NO: 11932 - DNA, 741 bp, Oryza sativa
  Clone ID: TFbOSC400710j.C1.o1.fg
atggagtttgacatgctgaactccaacccggaggcgcagctcgagctgatgaacacaatgctacagctggagcagctgagcgcattccctgaccaccacggcatggtggtgccgtgctctcccacttcgccatgcatgggagcgcaaggtggtcatcatcacttctcctcggtgaatcatcagccagctcacggcgtcgtgtcgtcaggtggcgccaacaccggcgacgggtaccgcgaccagtactacacccagctgcttcccgccgccgcgtacagcaacgcggcaggcggtggccgcggctcggagtaccacacgacgacgacgacgcggccggcttccggcggcggcggggacggcggcgtggggccggcggcgatgagggagatgatcttccacatcgcggcgctgcagccggtgaacatcgacccggagacggtgcggccgccgaagcgccggaacgtgcgcatctcgacggacccgcagagcgtggcggcgcggatgcggcgggagcgcatcagcgagcgcatccgcatcctgcagcggctcgtccccggcggcaccaagatggacaccgcctccatgctcgacgaggccatccactacgtcaagttcctcaagactcaggtgcagtcgctggagcgcgccgccgccgccaacggccaccgcccgccgccgcccaccgccacctccgccgccgccgccaccgtggcctaccctggcctgaacggccagtggtag

SEQ ID NO: 11933 - DNA, 75 bp, Oryza sativa
  Clone ID: TFbOSC6188j.C1.o1.gm
gaccagttccagtttgataccggtgttacctatgatccttcagtaactgatgacgacctggaactatataagtaa

SEQ ID NO: 11934 - DNA, 1086 bp, Oryza sativa
  Clone ID: TFbOSC400269j.C1.o50.fg
atggcctactccactaatcagataatgatactccaacatgcatggatgctcgtgggtgaagctaacagccagttaataattagtacagtagcacactcttggtaccagagcaacagtatagaagtggtcttatggtggttctggtccaggattgcacaaactccaactgaatatggattcttcggccaagcaatggcttgcagaactgacgaggagaatgatgatgatcctagagcgcttgagcatctggaccctctcagcatgcagcaactcgctgaatcccttgccaacgagctttttaaccagccccaagaacaacaggaagaacagcatggataccataacccatcactgagggtcctcccctttgtcggggatattaacaagcccgagggccacacaccagcagctgctgcaattcgtgacagcttcttctccctcaccaatggctcgtccagctcactcaacttctcggcgctggagcagcagcaggatagtggtcccatgacaaaattctgctcgccgctgtcagagatgaagagaggcggaaggagggcgacctcgagcatgcaagaacatgttatcgccgagagaaagaggcgagagaagatgcaccagcagtttacaactctagcatctatcgtccccgaaatcactaagacggacaaggtctccgttctcggcagcaccattgagtatgtgcaccatcttagggagagggtgaagatcctgcaggacatccaaagcatggggagcacgcaacccccaatttccgatgctcgcagccgtgccggctccggtgatgatgaggacgatgatggtaacaacaatgaggtggagataaaagttgaggcaaatttacaggggacgactgttctgctgagggttgtgtgccctgagaagaagggggtgttgatcaagctgctgaccgagctcgagaagctcggcctgtccaccatgaacactaatgttgtgccatttgcagattcatcactaaacatcaccattacagcacagattgataatgcatcttgtaccactgtagaacttgtgaagaatctaaaatcaactctcagaaatttttag

SEQ ID NO: 11935 - DNA, 2331 bp, Oryza sativa
  Clone ID: TFbOSC401665j.C1.o25.fg
atgaagcttcggttgcgatccatggaccagcgcggcggcgccggcggcgccgccgagacccaccgcgtgcagctgccggacacggccacgctctccgacgtcaaggccttcctcgccaccaagctgtccgcggcgcagcccgtgcccgccgagtcggtgcgcctcaccctcaaccgctccgaggagctcctcacccccgacccctccgctaccctcccggccctcgggctcgcgtccggtgatctcctctacttcacgctctcccccctcccgtcgccctcgcctccgccgcagccgcagccacaggcccaacccctgccccgtaaccctaaccctgatgtcccctcgatcgcgggagctgctgacccgaccaaatctcctgtggagtctggtagctcctcgtcgatgccgcaagctttgtgcacgaatcctggcttacctgtcgcatccgatccgcatcatcctccaccggatgtggtgatggcggaggccttcgccgtgatcaagagcaagtcgagtctcgtcgtcggggatacgaagagagagatggagaatgtcggtggtgcggatggaaccgtcatctgtcgccttgtcgtggcgctgcatgcggccttgctcgatgccggcttcctctatgcaaacccggtggggtcttgccttcagctgccacagaattgggcgtcaggttcttttgtccccgtatcgatgaagtacaccctgccagagcttgtagaagcgttacctgtggttgaggaggggatggtggcagtgctgaactactccttgatggggaattttatgatggtgtatgggcatgtgcctggggcaacatcgggggtgcgaaggttgtgcttggagctgccggagcttgcgcctttgttgtacttggatagtgatgaggtgagcacagcagaggagagggaaattcatgagctgtggagggtcctgaaggatgagatgtgcttgcctctgatgatatcgttgtgtcaactgaacaatttgagcttgccaccgtgcttgatggcgctgccaggtgatgtcaaggcaaaggtcctggagtttgttcctggggtggatcttgcaagggttcaatgcacgtgcaaggaattgagggatcttgctgcagatgataatctttggaagaagaagtgtgagatggagttcaatactcaagatacatgcggttgtatgatgtgtaaatgcatttactctgaccaaaggaaggatatcgtactagctgataagtatacctgtggtaattatatgcagaagcccgtcacacaacctggtaggtggcttattatattagtctaccattccctactttgccagtacatcactattgggttgagtttgctgtggtatcatttggttgatttggttcaggatgctcctgcagcaggcattcactttgactgtattattccactgccaatcaatccttaccagcttcccccatctgctggtgcctgctgctcaacaactcaagcttcagcatcagcaaaagatggtggcaatatgtattcccctccctgcagtgctgctgcaagcagccaagggcattgtttcgcggtcggagctaaccagcttgcttcgcttgaccttgccatggacttcgacgagcctatcctttttcctgtgcataatgcaagtttgcaagaggggattcagttttacaatcctaccggcgatactcagctaagtagaaacatgagcattgacaagtgtttgaagggcagtaaaaggaagggctcaggcgagggcagttcatcgctacattcccaagaggaaaccggtgaaatgcctcagagagaactcagcatggagcatgccggagagaaggcgggtgatgctgacgctagcagggaggagtacgtgcatgtccgggcaaaacgcggccaggcgaccaacagccacagccttgcagaaagatttcgaagggagaagataaacgaaaggatgaagcttctgcaggacctcgtcccaggatgcaacaagattacagggaaggccatgatgctcgacgagatcataaactacgtccagtctctgcagcgacaggtggagttcctctcgatgaagctctcgacaatcagtcctgagttgaactctgacctcgacctgcaagatatcctttgttcacaagatgctcgctccgcatttctgggatgcagcccgcaattgagcaatgcccatcctaacctttacagggcggctcagcaatgcctctcacctcctggcttgtacgggagtgtgtgtgtcccaaatcccgcagatgttcatttggcaagggccggtcacttggcttcgtttcctcaggtctacatctaa

SEQ ID NO: 11936 - DNA, 1479 bp, Oryza sativa
  Clone ID: TFbOSC400641j.C1.o23.fg
atgggccaggccggttacttcctctgttccgagatcaccgcctccaagctcctcacagtcacagccacaagggaattgaagccgccgccgcctcctcgtccttccggccgtgtgctctcacgcagggcgcggcggcggcgatcttctgtgctagcgtggcggcatcgccgttgctttggaggcctaatattacaaacttggaagaaaaaccacacaatttcggcggtgcagcagagaagccacctggagagatttgcggcgctggacgaggcgccaccgccggcaccggaggagaccgtggtcaccggcggggagatggtggactacatgctgggacagccgccgccaacgacgcccgggccgcagagccaggtgtccttcgacaagctcaccttctccgacgtgctgcagttcgccgacttcggccccaagctcgcgctcaaccagccggcggcgtcggacaacggcggcggtggtggcgacgacggcgacgacgacgacgacagctacttcctcaggttccagtcgctgccgtccctccccgccgttccccctcctcgtggcggcgccgccgccgcgcatcaggtcgttgacgagcaggagggcagcaagcagacggtcgacgccggcggcgtgtccgagagcacgacgctggtgcagcaggctgacggcggcggcggccgtgcggagaaggccggtgagcaggggaagagcgggcggcggaagcgtccccggacggtcaagacgagcgaggaggtggagagccagcggatgacgcacatcgccgtcgagcgcaaccgccgccgccagatgaacgagtaccttcgagtcctccgctcactcatgcccggctcctacgtccaaaggggagaccaagcatccatcataggtggtgcaatagagttcatacgagagctggagcagctgatccagtgcctggagtcgcagaagcggcggcgcctgtacggcggcgacgcgccagcgccacctgcacggccggtcgccgacggagcagttctgccggcgcccatgcagcagccgccgccggcgacgccgccgttcttccccccgagcatcccgttccccgcgtcgtccggcgccggtgacggtacaggcgccggcgtggccaaggtcgcactggacctcgacgcgagcggcggcggcgaggtgggcggcggggtccgggaggagatggcggagaacaagtcgtgcgtcgcggacatagaggtgagggtggtgggcgtggacgccatgatcaagatcctgtcgcggcggcggccggggcagctgatcaagacggtggcggcactggaggagatgcacatgtccatcctgcacaccaacatcaccaccatcgatcagaccgtcctctactccttcaacgtcaagatcgccggcgacgcaagattctcggcggaggacatcgccggtgccgtccaccagatccttagcttcatcgacgtcaactacacgttatga

SEQ ID NO: 11937 - DNA, 1239 bp, Oryza sativa
  Clone ID: TFbOSC401583j.C1.o44.fg
atggcgtctctactcggactcctcttctcttctcttctcttctcagagcgctgcgaggcaaggaggcgagcaagaagcggcggcgaggttgccatggacgaggcggaggcggcggcggcggcggcgaagatggacgagctggcgggaggaggaggaggaggcggcggcgactggtcgtacctcgcggcggacgcgctggcggcggcgtcgttcacggcgttcccgttccaccaccaccaccaccaccaccaccgcgacgtgctctcggcgtcgaccccgtcgtcgctgctcctcaacatggacgcggccaccgccgcggccatgttcgacttccaggcggccttcccgtcgtcctccgtcccgccgccgccgcccacgacgacggcggcgctcccgccgttccacgacttcgcctcctccaacccgttcgacgacgcgccgcccccgttcctcgcgccgccggggcagaagctcgggttcctggggccccccggcggcgcgttcggcggcgggatggggtgggacgacgacgacgagatcgagcagagcgtggacgcctcgtccatgggtgtctcggcctcgctggagaatgccgcgcccgtggcggccggaggaggcggcggcggtggcggcggcggtgggaggggcaagaagaaggggatgccggccaagaacctcatggcggagcggcggcgcaggaagaagctcaacgaccgcctctacatgctgcgctccgtggtgcccaagatcagcaagatggacagagcttctatccttggtgatgcaattgagtacttgaaggagctcctgcagaggattaacgatcttcacaatgaacttgagtctgctcctagctcttcgcttactggaccatcatcggctagcttccacccatcaacacccacattgcagacgtttcctggccgcgttaaggaggaactttgcccaacctcatttccaagccctagtggtcaacaagccacggtcgaagttaggatgagggaaggtcatgcagtcaatatccacatgttctgcgcacgcaggcccggcattctgatgtccacattgagggctctcgacagccttggcctcgggatcgagcaggcggtcatcagctgtttcaatgggtttgcaatggatgttttccgcgccgagcaatgcagggatggtcctggactcgggcctgaagaaattaagaccgtgctcctgcactctgctggccttcagaacgcaatgtaa

SEQ ID NO: 11938 - DNA, 252 bp, Oryza sativa
  Clone ID: TFbOSC9102j.C1.o1.fg
agaagaagggataggatcaatgagaagttgagagcattgcaagaactggtacctcattgcaacaagactgacaaagcatccatactagatgaagcaattgagtacttgaagtccctgcaaatgcaagttcagatcatgtggatgactaccgggattgtgccgatgatgttccccggtacccaccagctcatgccaccgatgggcatgggattgaacacggcatgcatgcctggggtcaagctcaaggcctga

SEQ ID NO: 11939 - DNA, 1755 bp, Oryza sativa
  Clone ID: TFbOSC416036j.C1.o25.gm
atggaggaagactgcaagtgcattgaccgggcaaaggtggcccagccacacgccatcattaccaacggttaccatgcaggggcagtttgctggcgctggttggggaagtgcggcggcggccctagcggctggcggcaccgagccacggcacatcggggaagtgcggcggcagtgacggcaatggccctagcggctggcgacgccgagccactgcacgtggctggggaatggattgcaccggagatcggaatgggcggcttcgcctaccccttcacgccgtcgccggcgtggtcgcgggacgccgtgttcgctggctcgccgtgggccgcaggcggcgtctcctccctcgccgacgctttggtgagctacggtgccgtcgacgacgaggaggccgcgttcctcggcaagaccgccgcgtcgtctcccagtacggcgaggctgcacgagcagcagcagctgctgctggaggctgagctgctgcgccacggcgacggcctcggcttcgccgcgatggacgacgacggcggcgccgcgatgctcggcgcgctggagccgtgcgccatgccgctcaccgacagcggcggccccccggtcatctgcagcagcagctccaacgacagcagcgggagcgagcactccgccgccatgcctgcaggaggcggcttcctcgtcggagagcagcagcagcacgtgccgccggcggcctacgccgcgggaggtgtactcccgtccatggccgcgggagaagaaacgccgcagagcttcggctttggcagcctcttcaatggcgatctcctgcaggaggcgaccgtgagcaagtatcatcatcatcagcagcagcagcagctgggcgttgtgccttcgtcgcagccgcatcatctgaatgatgacatcgatttcaacactggaaaattgatgtcttttgcttctggacagcagcacgttacccccagcattgacagcctgcagatcgaccagaaggaattcagcagtggcctgcaccacctcaatctctcctcgctgatttctggaccactcgcatcattcaatgcaacacagagccatagacagcctgctgaagcttgcggtggcaaaaatggcggcgccgctccatttgtgaacctatctgaggtgctaccaaagggcaatgggagtggtagtgctgggaatggagcacccaagcctcgtgtcagggctcgccgaggccaggccaccgatccccacagcatcgcagagaggctccggagggagaagatctctgacaggatgaaggatttacaggagcttgtcccaaactcaaacaagactaacaaggcatccatgctcgatgagatcatcgactatgtgaaatttctccaattacaagtcaagagccccgggtttctcctgtccccaagatcatcatcaggagaaaggcaggcaggagcaggagcagtaacaggagggctccccggcgatcagccggagctcctggacggcggcgccatgttcgagcaggaggtggtgaagctgatggaggacaacatgacgacggcgatgcagtacctgcagagcaaggggctctgcctcatgccggtggcgctggcgtcggcgatatcggcacagaaggggacgtcctcggccgccgtccgaccggagaagaagaagaacggtgatggcgatggcggcggcgacgaggaggacgtgaagggagagtttgacgcaccgaggaggcctcctgtcggccggccgaaggagatgaggtccagagtctaa

SEQ ID NO: 11940 - DNA, 1092 bp, Oryza sativa
  Clone ID: TFbOSC400621j.C1.o27.fg
atgtgggaaggcgggagccacgacgccgcggcgcagctgctgccgtggttcgtcggcgagccggcagcggcggcggtggggggatacggagggtgtgtcgacgtggtcgggcagggcggggtgttcgggttcggtttcgaggccgcggcggcgccggtggtaaccaggcagcagcgtggtggcgcggcggcggcggagggatcatcgagaggcggtggcggtaagccggcggtggtgtccgggctgctcggcagcctgcaggcggagctggggcgggtgacggcgagggagatcatggacgccaaggcgctggcggcgtcgcggagccacagcgaggccgagcggcggcgccggcagcgcatcaacggccacctcgccaggctccgcagcctcctacccaacaccaccaagacggacaaggcgtcgctgctggcggaggtgatcgagcacgtgaaggagctgaagcggcagacgacggcgatcgcggcggcagcggcggcgggggattaccacggcaacgacgaggacgacgacgatgcggtggtggggcggcggtcggcggcggcgcagcagctgctgccgacggaggcggacgagctggcggtggacgcggcggtggacgcggaagggaagctcgtggtgcgtgcgtcgctgtgctgcgaggaccgccccgacctcatcccggacatcgcccgggcgctcgctgcgctccgcctccgcgcgcgccgcgccgagatcaccacgctcggcggccgcgtccgcagcgtgctcctcatcaccgccgacgagcagcagcagcagcactgcgacgacgtcgacgacgacgaggacgggcatcgcctccttcttcgccacggcatcgacggcgccggcgccgccgccgacgacgacgacgagtgcgcggcgtctcaccggaggcacgagtgcatagccacggtccaggaggcgctgcgcggcgtgatggaccgccgggcggcggcgagcagcggcgacacgtcgtcgtccggcggcgctgtcgtcgccggcggcggcgggggcagcatcaagaggcagcgaatgaactacggagtgcacgagcaatgctcggtgtag

SEQ ID NO: 11941 - DNA, 648 bp, Oryza sativa
  Clone ID: TFbOSC900054j.C1.o12.fg
atggtggctgcacggagcggcgacgacgcggagctcaggttggacgtcgagtgcttggcggccgcgccgcggtggaccagggcgagaaggagccacagcgaggcggagcggaagcggcgggagcgcatcaatgctcacctcgacacactgcgcggcctcgtcccctcggcgtcccggatggacaaggcggcgttgctcggggaggtggtgcggtacgtgcggaagctgcgcagcgaggcggcgggcagcgcggccgtcgtcccgggggaaggcgacgaggtcgtcgtagaggaggaggaggtggaggtggaggggtgcagctgcgacgccggggagaggcaggcggcgaggcgcgtgaaggcgtcggtgtgctgcgccgaccgcccggggctcatgtcggagctgggcgacgcggagaggtccgtcagcgcgagggcggtgcgcgcggagatcgccaccgtcggcgggaggacccggagcgacctggagctcgacgtcgcgcggacggcggcggcgggaggaggcagcaacggggcgtcccagctgccggcgctgcaggccgcgcttcgcgccgtgatcatgagccaggaggagctgctcgccgtggagagctacaagcagcgccgcttctccgcggatttcgcctag

SEQ ID NO: 11942 - DNA, 2693 bp, Oryza sativa
  Clone ID: TFbOSC400525j.C1.o17.np
atggtttcaaaacggtgcagtgcatcgactgggaaccgtatcggccgatacagaatcaagcgtcgatacatactggttttgagttcatgtcaagctcgggttaagaattcaaaattattgccatacaaggatggagtccaaaatacagcaattgtatctattaattgggccgatttggtcagatcgcatcagctaggtcggtacgatacgtcatcggcctatcgatcgatcggctatcgtgttctaacttcattttattatttatccttgttggttgcagaatcaaaccaactatcacatgaacacacgcgcacacacgaacgtcgcctagtgctgaaatataaaagcgctcgacgacaaggtctcacatgccgcgcacgcgtctactcaagctcaacacaccaaccacttggcgataatactagtataatagttccacgtgacgcgacttacatcagcaaaagcacacgtgacacgttacacccgtgcgcgcgtaacgaccggtcgtcgtgctgcgcggctggcgcgcttcgtgtgtgtcgtactcgatcgtactacgtagtaaagcacggtagcagcgccgtaggttgtatatatataagcgcagagacgcgtgggagctggcgccacggcatgcatgcacagccatggagaacgacgacgacgtggagcatcccttctactacttcgtccacgacgacgcggccgccggcgtcgacgaccacgaggagttgctggcaagcctcggcttcctcctccctcctcctcctccgccgccgccgccaccgcagcctgatcagggaaggagcgccttcgcggcgtaccagagtaccgcggcgatggcgtcgtcgtcgtcgtcgtcggagtctctgagccggcggtaccactcctctgcgtcgaacgtccaccggagaatgcacaggttcctcaggagcatctatgacgacgccggggacgacgcgggggcaaccgcggaaatgcagccggcggagggcgagcagcagcaggcggcgccgagcggcggcagcgcgcggttccggcacatcatgcgggagcggctgcgtcgggagcgcctcagccagggctacgccgacctccaagccatcctcccaaccggcgcatcatcatcaaaagtactcgtaaaatcactcatcaggaactacatgagcggtggcaagaacaccatcgtcgccgcggcggcaaactacatccgggagctggaggggaggaaggggtggctctgcgcgcagaacgagttgctggagcggacgacgccgaagcccggcgccggcatggtggtgaaggtgcgcgccgagagtgagctcggctcgacggtggacgtgttcgaggcggtgctccggcggctcaaggccatggacgagctgcaggtgacggcgatccagtcgtggttcggcgccggcgggatgtggatggacgtcgcggtggagtccaagagacgtgccgcgtgtacgtacgccccacctcgctggaaactgctgagagagaccagacgagtcaaacgaggtcgcagcagtagaattgtcaaattaatcttccttcagctatcggttgcgtctacatcagcaaatgattctccaatcgcgagccgtcacgcgatctgtactacggagtatagtgcctttcagctcgatcgcccccctacttccaggcctcggcacggccacgcgccgtgttcgcaccggccatcacacgcgcgcggtcacggccgcaaaattaaaggaagtcagcgatttggggcgtttttgcggggagtacgtgcgtgctctcgattagcgggaggcgcgcggcatgtcgacgcgcacgtacgtacgtacgtatacgcacgccggtacacggtgggttcgagcaatggaccgaccgacacatgtcatgtacgtgcagacggtgcagcggttgatcgcgtaaggccgattgctgctgtgtcttcttcctgtccgatgcacacggcgcgcggggtcacacccgcaggggagagtggggaggggggaggtcagggacgagatgccgcacgtcgacgtacgcacgcacgcacgccaggagagcaatggaccgctggacgccatgtcatatcacatatgtcacctgacatacgtgcagtggttgatcgggaaacacagttgcttgtgtgttttcgtcgccgtgctgttcgctacgtgttgtacaggaatgaacacgactgctcgatagtagcagggcgccaggatgacgatgggaagcggcagcggcgggacgacaacgtttgtcgcggagtggttggtcgagcggggatgcagagcggcggtggagaatacgttcgatccagcggcggcccttcctctccccaccgtcgcggcgacgccatggacgagctcgattgcggtgagcaccaactcaacggcaccaccagtgtggagatccaccttgaggatggccctcgagtatgtgcttgtactgcgttggcatcagctctgagattgccagcgctccacccactgcccttgcaccctgcccaagtgccaatcgaggttggtggcgtggaaggtggcgatggcggtaaggttgaagctggcgccgttgaggacgtcacaaaggaagttaaaggcgaagaggagcacgaagaggtggcaaacggtgacaaagagagcgtagtggatcccttcctagatgttgaggtaggaggtgactaccgctat

SEQ ID NO: 11943 - DNA, 1275 bp, Oryza sativa
  Clone ID: TFbOSC400283j.C1.o44.fg
atgagcagcagcagcaacaacaacaagaagatgaaggccccactgagcttcgctagcagcaggcagggctccggcggcctctcccagatatccgaggacggcatcccggacctcactgacagcatccatggcgccgctcatcatcatgggcgctccgaggagaacgtctccacccacgaccacgtcgtccgctccttctcctccggtgggttctcgatcgggtcatgggaggactccaactccatcgtgttctccacgtcgacgggcaaatcaggagcgcacggcaacgacgacatcatcgccacccttagcaactacgaatctcagcttgttgcgcccagggagatggctggcgtagagaaatacctgcagatgcagcacgaccaggtgccattcagagtacgggccaagcgtggatgcgcgacgcacccacggagcatcgcagagagggagagaagaacgaggatcagcgagaagctcaggaagttgcaggccctggtgcccaacatggacaagcaaacgagtacttcagacatgctggacttagcagttgatcacatcaagggactgcagagccagctgcagatcattagacattatccagaaaatttacagtgttggtccggggtagcaacatgcatgggtccttggaaaggacgatttaccactctggctggccgttctgtgctggtccagtcggttctcttctccattccagtccatgaatctatggcgatcggcctcccagtctgggttattaaggccattgacaataagcgtcgcgccttcctgtggacagcgctcagggcacccctactaggatggcctaaaggccccagtctagcagaccgtctccgacatgttcgcggcatccactttctttgtgccgggaaatggttctttctttggtttgcattccagcggcgctgctggacggctgatctcatccagaagcgtggcatcgatagtcacttgggctgccccttttgcgttcaggatcttgacacggcgaaccacatcctcttcgactgcatgttcgctcgctggttccaagactggtggtcgtccttcagggcctgcttacctgagcacctctacgacagcttcgactccctagtgttcctggtctcttggcgtctgtggaaggagcggaattctagggttttcgactccgctctctcttcgatctcagtggttctagagttcatccattcggaggggcatatgtggtctttagctggcgtcgtcgcttttggggatttgttgggagtctag

SEQ ID NO: 11944 - DNA, 1485 bp, Oryza sativa
  Clone ID: TFbOSC900117j.C1.o7.fg
atgaaccagttcgtccctgattggagcaacatgggtgacgcatccaggacactcggcgaagatgacaacctcattgagctgctctggtgcaacggccatgtcgtcatgcagagccagaatcaccaccggaagctgccgccgaggccgccggagaaggcggcggcggcggcggtgcaagaagacgaggccggcctgtggttcccgttcgcgctcgccgactcgctggagaaggacatcttctcggacctcttctacgaggcgcccgtcgcggcgacggcggaggcggcgcctgctggcccgggcgcgggcgccgacggcgaaggaaagacttgcaagggcgacgcggcaatggcggaggaggagcgtggcgggccgggcgcggcgtccgaggcgccgcgcgagctgatgccgccgcccaagtcgacgaacgcgtcctgctcgaggcagcagacgatgagcctggcggacggcggcgacaacgccggggacctgtcggagctcgtccgggcgaggaggtcgtccggcggcgcggctcggcggaaggcggaggccggcggcggcggcggcggcgcgtcgtcgtcgatgctgagcgcgatcgggtcgagcatctgcgggagcaaccaggtgcaggtgcagcagcgcacggcgagcgagcccgggcgccgcggcgcgccgccctcggcggtggggagcgcgaacgccatcccctgcggcgggcgcgaccacggccacggccacgaggcgaccaccgtggcgtcgtcgtcggggcggtccaactgctgcttcggcaccaccaccaccacggagccgacgagcaccagcaaccggagcagcaagcgcaagcggctcgacaccaccgaggactccgagagccccagcgaggacgcggagtcggagtcggcggcgctggcgcgcaagccgccggcgaagatgacgacggcgcggaggagccgcgccgccgaggtgcacaacctctccgagaggaggagacgggacaggatcaacgagaagatgagagccctgcaggagctcataccacactgcaacaagactgacaaggcgtcgatgctggacgaggcgatcgagtacctcaagtctctgcagctgcagctgcagatgatgtggatggggagcgggatggcgccgccggtgatgttcccgggggtgcaccagtatctgccgaggatgggcgtcgggatgggggcggcggcggcggcgatgccgaggatgccgttcatggcggcgccgcagccggtggtgcccacaccgccggtgaaccaccttgacctgggcgtcaaccacctgcagccgccgccgacccagggagtggggtattatccgttgggggccaaggccgtgcagcagcagcaaaatccaccacttcacgtgccaaatggaagcattatgcctcctcctgaaaatgcacccaacacaggatcaggtatgggatccttctacttctacttctacttctcttccgattaa

SEQ ID NO: 11945 - DNA, 1188 bp, Oryza sativa
  Clone ID: TFbOSC412646j.C1.o13.fg
atggacggcggcagggtcgggggcgactacatttccagcctcctcagctcctccccccggctcgacttcggcgtgccggtgctggacgccatcgtggcgccgggaggcggcggcggcggcggcgactgcggcctcgacaagctctgcggcgacccggggttcgcggagcgcgccgcgcggctgtccagcttcaacaacggcggcggcggtgttgggcagcggtacggcggcgcgggggcggggctcttcgggatgcctcctccggctcccggcgacttcgccggaggtggctccagggaggcgtcctccgtgtccgaccccgcctcctcggcgatgaaggacgccgccgccaatgccaagaagaggaagtccacggcggcggcggccgccgccgccaagggcaaaggcaaggagcctccggttggggaagagaaggaatcagatggcaagaggtgcaagacgggcaatggcgagaaggagagctcggtgaagccgaaggcggagcaggccgggagcgacagctccgtcgaggacggcggcggtggcgggcagaagcaagggaaggggaagaatgccaagccggtggagccacccaaggactatgtccatgtccgggcgaggcgaggccaagccactgacagccacagcctcgctgagagggtcagaagagagaggatcagccagaggatgaaggttctccaggacctggttccaggatgcaacaaggtaattggcaaggcactcatgcttgatgagatcataaactacgtgcaatcgcttcaacggcaagttgagttcctgtccatgaagctagcaactgtgaatccacttgatttcagtaacctgcctactctgctgcagaaagatatgttccaagcatgcggcccttcagcgagctcggttttctcattagaaagctccaattctgcttttcggtttgccgaacaaggagatgttttccaacagtttgctcaaaacagcatggaaagccagtgcaccctgaatcagttggacctggctctatctcaggctacaaatgctgcacagtatgcttttcaagatggaacagccggcgcaaacttgcagcaaaggaacttctgggaggatgatctccaaagtgttttccatattgagaatggacagagccaggagaatggggtttcagcaccaaacttccatggttggtaa

SEQ ID NO: 11946 - DNA, 711 bp, Oryza sativa
  Clone ID: TFbOSC406614j.C1.o6.fg
atggcctccccggagggctccacgtgggtcttcgactgccctctgatggacgacctcgccgccgccgccggcttcgacgccgcccccgccggaggcttctactggacgacgcccgctcctccgcaggcggcgctacagccgccgccgccgcagcagcagcccgtcgcccctgccaccgcggctccgaacgcctgtccgagatcagaaagtggcactcgaccaagctccaaagcatgcagggaaaaagtaagaagggacaagttgaacgagaggttcttggaactgggtgctgtcctggaaccagggaagacacccaaaatggacaaatcgtctatattgaacgatgctattcgtgtaatggctgagctgcgtagtgaggcacagaagttgaaggaatcaaatgagagtctccaagagaaaatcaaagagttgaaggctgagaaaaacgagctgcgtgatgagaagcaaaagctgaaggcagagaaagagagcctggagcagcagataaagttcctgaatgctcgaccaagcttcgtaccacaccctccggttatcccagccagtgcattcactgctcctcaagggcaagctgccgggcagaagctgatgatgcctgtgattggctacccaggatttccgatgtggcagttcatgccgccttctgatgttgataccacagatgacaccaagtcatgccctcctgttgcataa

SEQ ID NO: 11947 - DNA, 771 bp, Oryza sativa
  Clone ID: TFbOSC32412j.C1.o18.fg
atggacccggccccctcgctcgcggcggagctctggcggccgcatcaccaccgccaccacttcgaggcgtcgtccgtcgtcaccgaccaggggagcggaagccgcggcggaggaggaagcgggcgcaggaggccgcggagcgacgcggggcccgaggacgacgacttgtccaaggtcgtctccacctccgccgcctccggcggcggcggcggcggcgggcaggactcggatgctccagaagcaaaacgtttgaaaccaatgaaatctagtgataagaatgatagtttaaggacagaagctggaaccgattcaggaaacagcagtaaggctgctgataaaaatgctacaccaccagagccaccaaaacaagactacattcatgtgagggcaagaagaggtcaagcaaccgatagccatagccttgcggagcgggcacggcgagagaagataagtgaacggatgaaaattcttcaagatcttgtccctggatgcaataaggtcattgggaaagcatcagtccttgatgaaataataaattacatccagtctttacagcatcaagttgagtttttgtccatgaagcttgaagcagttaatagtcacatgattaacggaattgttgcttttccatctaaagattttggtgctcagccatataacacagctgctggtttgacatttgatccacaaacaacaagggaatttgcccagggttcaacatcagagtggcttcacatgcagattggaaatgcatatgaaagagtgacatga

SEQ ID NO: 11948 - DNA, 1089 bp, Oryza sativa
  Clone ID: TFbOSC400939j.C1.o8.fg
atggcgcttgacaccctgtgcagcgccggcggcgacgtcctcatctacgacacgttcaacgcctccgccgcggcggcggcggcggttgtgccgccggcgagcttcctcttcgggaataataatgccggcggcgcggcggggacggagacgagggtgcaggtggcggccggggcggtgccggaggtggaccagctgctgaagcaggctcagcagccggggaggaggaagcggcggcggcgggcgaggagctgcaagagccgggaggacgccgagagccagcggatgacccacattgccgtcgagcgcaaccgccgccgccagatgaacgagtacctcgccgtgctccggtcgctcatgccggagtcctacgtccaccggggcgaccaggcgtccattgtcggcggcgccattgatttcgtgaaggagctcgagcagctgctgcaatccctcgaggcgcagaagcgcacgctgctgatgcagccgccgccgccaccgcagcagcagcgggagcccaagtgtgatgccgcggactccacgagcgcggccgatcaggagactccggcggcggcggcggcggcggcggcggctgatggaccgccgttcgcgcggttcttcacgtacccgcagtacgtgtggtgccacaacccggcgcaggacggcggcgggggcgggggcgcggcggcggagaaccgcgccggagtggcggacatcgaggtgagccttgtggagacgcacgccagcatccgggtgatggcggcgcggcggccggggcagctgctcaagatggtcgccggcctgcaggcgctccggctcaccgtcctccacctcaacgtcacggccctcggctcgcttgccctctactccatcagcgtcaagagattccatggcggaaaggccattgcttcccttggccccttgggtgtgttctttctctgtgctctgtatctgtggtacagtactacagtggtggaggaagggtgcggcatggcgacggtggacgacatcgcagcggcggtgcaccacgtgctctgcatcatcgacgccgaggcggcgtcgcagatgctgctcgccggggaggcctccggttag

SEQ ID NO: 11949 - DNA, 1455 bp, Oryza sativa
  Clone ID: TFbOSC401130j.C1.o60.fg
atgtttagatcagctgttgcagtgagccagttagctacgacgacgacggtgtggatggatcgtggcttcaacgagatgatcttgagcgagagcgtgtggaatggcggcggcggcggcggagatggagatggtggggcggtggtgctgccgccggaggtgggtggtgtcaatgcggtggacgggagcggcatgacgatgctggagaggctggtgctcgacgaggccctggcggcggcgatactcgagctgcagggcatccaggcgccggggtgcggcgggggcggcggcaaggtggcggtggtgccgccgccgacggccggtgacggcggcgtcgaggcggcggtcgccttcgcggcgatggcgacggggacgcctgcctacgctgacgttgacgcggatgtcctgcagcgacagcggcagcatcaccatcgccaccagggcgcgatggggatggctgccgagtacgacgtcgcaccagcaacaccggctgtcacgttgagcgctgtaccaccaccaccaccaccacctgcgttcgcgaccgcagccgcctccgttgacggcggcggcgccatggacgcgacggtcttctccggcatcggcaacgacgacgtcgtcgacgcggtgagcgccacggtggcgatgactactgccactgcaacgaccagccagtgcgaacgagtcagaggaggcggcggcggcggcggatgtggacgtaagcaacgccggccgggaagaaagcggaaggccgccgagccaaccgccgccgccgccgcggcggacatgtcgtcgcaggacaaccctctctgcagcctcctggcgtcgaacaccgccggcgccgacggcggcatccagatcgcgttcagcacgagcgccccggcgtcgaagcgggcgaagccgtcgctgagcagcagctcgtcgagcatcagcttcgacggcaggggccccggcggcaactgcggcggcggcggcggcgacgacccactgtacgagcccgacacggaggcgctggcgcaggtgaaggagatgatctaccgcgcggcggcgatgcgccccgtgaccctcggcgccgaggacgccggcgagcgcccccgccgccgcaacgtgcgcatctcctccgacccgcagacggtggcggcgcggcagcggcgggagcgcatcagcgagcgcctgcgcgtcctgcagaagctcgtccccggcggcgccaagatggacacggcctccatgctcgacgaggccgccaactacctccgcttcctcaagtcccagatcagggagctgcaaaccctagaccgccggaactacccgaacgccgccatgtccatcaacaccgccgccgccaccaccatggcgacatccagttcaccaacctacaacaacagcaacgccgccatgccagccttcgccttcccggaaaccctaggatgcggaggaggaggagtcgagcagctgatctaa

SEQ ID NO: 11950 - DNA, 1273 bp, Oryza sativa
  Clone ID: TFbOSC29597j.C1.o1.np
ccctgatctgccgctgatctgctcgtgttgacctcaatcttgtcatcgtcaggtccgtcgtctcgctcgccgtcgccgtcgccggcgtgcagctgctgtgattcagatagcttcctgttcttctcctccagctcagctatcctcgccttgaggaccttctcccggcgcttgcgctccgacaagacgtgctgcagctgcagctgctggttctcgccgccgccgccgccggcggtggccgctggcgaagcccgcgcggccatctccatgatctggtagtactgcgcgagcctcgccgcgtggatctttgacagcaccgatatggccttcttgaacgccctctgtccaccgccgccgccggtggcggtgcccccgcccccgcgcgccgccgcgccgcaaaccatcgagccccccgccgccgcgctgcgcgctaaccaggcccccaccgccgtgccgcccaatgccccatccagccccacgtagccgcaccacgcccccatccaagccgaggccgccgcgggcacatccccatcgaggagcacctgccttcgtccccacctttgatggccgtctccatcctctgctccaggtggaacgctatacacgaagtcgtagctccgtttgtgacccccgcctactcctcctaggacgccactaccaaagcttaaacccaaagcaaaccagaggcagatcagatcagagctagtagcagcaagctcgcgatctcccccaacttctagaaccttctagaaccgccgaatgcggctccaccacggccgccaccaccaccaccgacgacgacgaggccaagccgcgccgcccatactccactttcgcctccccgcgcgcgcccacgtccgcattttccgccgccttctcaacccaccgcctcctcgtcctcttctccgtcgcctgcctcctcgtcgccgcggcctccctcgccttcgccttctccgcccgcgccgcgaccctgcagccgccgcccctcgccgccgtggccgaagccaccgccaaggtcgccttccgctgcggccgcgccgaggacaccctccgcgccttcctcgcctcctcctcggggaactactcctccgcggcggaggggagggagagggagaaggtgctcgccgtcgtcggggtgcacacggagatcggatccgccgcccgccgcgccgcgctccgggccacctggttcccgcccaagcccgaaggcatcgtaaggtttccccccacattgctttcctccattcccacctaccaacttggatctagctactcg

SEQ ID NO: 11951 - DNA, 1080 bp, Oryza sativa
  Clone ID: TFbOSC29597j.C1.o3.hg
atggaggagcacgatcatcagtacgccacgccgccgtcgccgtcgtcgtcctccttccgctccttctccgccgggacgacgacgacgacgacgagccgcgacgacaactcgtcgctcatgctcgccgccgccgccgcctcttgccaccaccagacaacggaggtgtcgtcgcagatactactaccacggccgggacaagcagcacggcggagcagcggcggccatggcgccgccgccgccgccaccgcgttccggccgtactcccggtacctgggcccgaagaagcatctcctccggcggccaggggcggcgaccaccgccaccggcggcggcggtggacagagggcgttcaagaaggccatatcggtgctgtcaaagatccacgcggcgaggctcgcgcagtactaccagatcatggagatggccgcgcgggcttcgccagcggccaccgccggcggcggcggcggcgagaaccagcagctgcagctgcagcacgtcttgtcggagcgcaagcgccgggagaagctcaacgatagcttcaaggctctcagggacgtgctcccacccgccaccaagaaggacaaagcatcagtgctgatgagagcaaaggactacgtgaacgtcctcaaggcgaggatagctgagctggaggagaagaacaggaagctatctgaatcacagcagctgcacgccggcgacggcgacggcgagcgagacgacggacctgacgatgacaagattgaggtcaacacgagcagatcagcggcagatcagggcagttcaccgaacaagtgtcaagagcttcatctgaagatagtgctggggtcgtcgtcggggtgcagtgccatggatgccgtggctggcatcctgcagggtctcaacgagaagagggatgtcagcttgttggccacagggcataattccagcagcagcagcagcagtggtcgtcgtcgtcttcttccccgtgcaaagtcttctcaacaacctgcctccagcagctgcgacgaggaaattctcaaggaatctgtagttaaagatgacagtccagcagctgtcaaggatgtgatgcaatcggagaca

SEQ ID NO: 11952 - DNA, 672 bp, Oryza sativa
  Clone ID: TFbOSC412252j.C1.o6.fg
atggtgacggacggggagtgctcggcggcggcggtgaggaagggtgggtcgccggcggtgcggagccacagcgaggcggagcggaagcggcggcagcgcatcaacgcccacctcgccacgctccgcaccctcgtcccctccgcctcccggatggacaaggcggcgctgctgggggaggtggtgcggcacgtgcgggagctgcggtgcagggcggacgacgccacggagggcgccgacgtcgtcgtccccggggaaggcgacgaggtcggcgtcgaggacgaggacgacgacgagggcgagcgcgacgaggggtgttatgtcgtcggcggcggcgacaggcggtggcggcggcgcgtcagggcgtgggtgtgctgcgccgacaggccggggctcatgtccgacctgggccgcgccgtgcgctccgtcagcgcgcgccccgtgcgcgccgaggtcgccaccgtcggcgggaggacgcgcagcgtcctggagctcgacgtagtcgtcgcctccgacgccgccgacaacgacagggccgtcgcgctctccgccctccgcgccgccctccgcaccgtgcttctcaaccgcgaggagctcctcgccgccgccgccgccgccgccaccgacggctacaagcggccacgcttctcgccgaggtgtagcagcctaacctaa

SEQ ID NO: 11953 - DNA, 939 bp, Oryza sativa
  Clone ID: TFbOSC401035j.C1.o20.fg
atggagctccttctccccaccgccgccgcctccgcgccgccgcccccgcccgcgttccccgccgacccgcacctcgtcgaccgcgcagcccggttctccgcgttcgcctccccttcgccgccctccccgccgcctcctcctccccctcccccttcctcctcctccaagcgcaagcccgaccccgcctccaaggggaaggcggctgcgaagaaggggaagacggcggcgagcggcgaggacggtggcgacggcggcgaggacgagaagccggcgtacgtgcacgtgagggcgagaagagggcaagccaccgacagccacagcctcgccgagcgggcgagacgcgagaagatcaatgcgaggatggagcttctcaaggagctggtccccggatgcactgtttctgttcggtccaaaggcacactaggagtccaacaaagagtaatgccaagcgttggtgtgcagcagcagcagcatgtggtagctccattctttatatccaaaactgaggtatcaggaacagcactggtactggatgagatcatcaatcatgtccaatctcttcaaaggcaagttgagtacttgtcaatgaggctcgcagctgtaaatccgagggtcgactttggtgggctagacaacttcttgactacggagtgtggaaggataacaggcttgaactacaagaatggaatggatttggagcaggtcacctggccagacatgggcgtccatggagcaaggaatctcatgcaactacaacagcagttctggcatggtgatttagcacacccgctccagccgccttcacagtgggaaaagcggacggataccaatccccctgtctttagcaattcaagttcctccctcttcggctatgatctagcaagctctgccttgattggaccacaacttttgtctctttcgttgttccagagtgtttag

SEQ ID NO: 11954 - DNA, 1182 bp, Oryza sativa
  Clone ID: TFbOSC400044j.C1.o26.fg
atggagaccttcggctgggccggcggcgggcagctgatgcaccacgacgacatctacttgccgcgctcggtggggtgcgggcggccgttcgagctggacgacgcgttcctgggcgcgtgcttcggcgcccagctccagtgcgacggtggcgtcggcggcggcgacggcggcgggtgtctgcagggtacctcgggatttggcgccgtggctggagacccgttggggttgctgtgctcgggggacgtgtttgcgtctgtcgccgagggcgccggcggcgcgcacgacgacggcctcctcgacgcggcgctcgccttctcccggaatcagctcgggggcgccgcctgcgacgggagcgacggcggggccgtgtcgaacggcgccatgctgtccagctacagcggcaccaccggcggcaacatctcctccggcgagtcgaataactacagcggcggcggcggtggctacgacgccgaggtggtgtcgccgacgtccaccatgtccgcagccacacagtcgctccaccccaagcgaaagctatacgacgaccaccaccaccccgccggcatagcagccgcagccgcagcgccaccgctggcgccgtgcccacgccccaccaccggcgccgtcgccgcgaagcggagggcttccacgtcagcaacaagcatcaccttcggccaccagccgcaccaccaccacgcgggcgccaccaccgccgggtacgagcctgacatggaagccatggcgcaggtgaaggagatgatctaccgggcggcggccatgcgccccgtccacctcggcacggaggccgccgccgacaagccccgccgcaagaacgtgcgcatctcgagcgacccgcagacggtggcggcgcgtctccggcgggagcgcgtcagcgaccgcctccgcgtcctgcagaagctggtccccggcggcaacaagatggacacggcgtccatgctcgacgaggcggccagctacctcaagttcctcaagtcccaggtccaaaagctggaaaccctaggcaccaccaccaccacgtccaagttaccgcagcagtattacagcggcaacatcaacagcagcaataatcaccatggattcctcggattcgcagcaaataacaacaccatttcagctggctacgcaaattctaatgctggaaatgcaacgaaactgttgtag

SEQ ID NO: 11955 - DNA, 1965 bp, Oryza sativa
  Clone ID: TFbOSC401892j.C1.o33.fg
atgcccggctcccgagaaatgtcaatcattagtggaggtatgtggtccgacggcaacgacttcgccgagctgctgtgggagaacggccaggcggtggtgcacgggaggaagaagcacccgcagccggccttcccgccgttcggcttcttcggtggcaccggcggtggcggcggcggcagcagtagtagagcccaggagaggcagcccggcggcatcgatgcgttcgccaaggtggggggcggcttcggcgccttgggcatggctccggcggtgcacgacttcgcttctggcttcggcgccaccacgcaggacaacggtgatgatgacaccgttccgtggatccattaccccataattgacgatgaagacgccgccgcccctgctgctctcgcagcagcggactatggctccgacttcttctccgagctccaggcggcggcggctgccgcggcggccgccgcgccgccgaccgatctcgcctctctgccagcctccaatcacaacggcgccaccaataacagaaatgctccggttgccaccaccaccaccagggaaccctccaaggaaagccacggcggcctgtcggttcccaccacccgagccgagccgcagccgcagccacagctcgccgcagccaagctgcctcggtcgagcggcagcggcggcggcgagggcgtgatgaacttctcgctcttctcccgcccggccgtcctggcgagggcgacgctggagagcgcgcagaggacgcagggcaccgacaataaggcgtccaatgtcaccgcgagcaaccgcgtcgagtcgacggtcgtgcagacggcgagcgggccaaggagcgcaccggcgttcgccgatcagagggcggcggcgtggccgccgcagccgaaggagatgccgttcgcgtccacggcagccgctcccatggccccggccgttaacctgcaccacgagatgggccgtgacagggcaggccgaaccatgcctgtccacaaaaccgaggcgaggaaggcacctgaggccacggtcgcgacatcgtcggtgtgctccggcaacggagctgggagtgacgagctgtggcgccagcagaagcggaagtgccaggcccaggcagagtgctcagctagccaagacgatgatcttgacgatgaacctggagtattgagaaaatctggaaccaggagcacgaaacgcagccgcacagctgaggttcacaatttatcagaaaggaggagaagggacaggatcaatgaaaagatgcgcgctctgcaagaactcattcccaactgcaacaaggcatgctatgttttgcagattgataaagcctcgatgctggatgaagctatagagtacctcaaaacccttcagcttcaagtacagatgatgtccatgggaactgggctgtgcattcctccaatgctattaccaacagccatgcagcacttgcaaattccaccgatggctcatttccctcatctcggcatgggattggggtacgggatgggcgtcttcgacatgagcaacactggagcacttcagatgccacccatgcctggtgctcactttccctgcccaatgatcccaggtgcgtcaccacaaggtcttgggatccctggcacaagcaccatgccaatgtttggggttcctgggcaaacaattccttcgtcagcgtctagtgtaccaccatttgcatctttggctggtcttcctgttaggccaagcggggtccctcaagtatcaggcgccatggctaacatggtgcaagaccagcaacaaggcatagcgaatcaacagcagcaatgtctgaacaaggaagctatacagggagcaaatccaggtgattcacaaatgcagatcatcatgcagaatgttcctgtcctaaaaagatcaatggctgaggaatttcatatggtagaagatgctaccaggttacaagctgtaattcttgacttccagtgcagtttcctatga

SEQ ID NO: 11956 - DNA, 1701 bp, Oryza sativa
  Clone ID: TFbOSC413680j.C1.o2.fg
atgggactgcaagggaataaggcgacgcacgacttcctctcgctgtacgccgccgccgccaccgccacggactactcgccgctcccgcgccacccggactccaagccctcggcgccggcgccgccgcccgctcaagatttcttcctcaagacacacgacttcctgccgcaggtagagaagagagccgaccagacaccaccgccgccgccgccgccgccgccccacgccgcggtcaccgccgagaagcagctgctccaccagcacgcgttggccgccgccggcgcgttcaccatcaaccacgccgtggccgcggccgccaccgccgtcaagcaggagccgcccttcgcgccgtggtgccagcccgtcgccgccgtagatccccgaggtcaccagtggtcgctccccttcgccgcgcgcgccgtcgccgtcgcctcctccaggccgcagcagcagcagcagcagccaccgccgccggagaggaagggtggcggtggattcatggacgccggctccagatccagtggcggcgcgggcttcgacgacgacgacggccatgccgcgcgccgcgaggtctcctcctcgctgaaagagctcacggtcagggtggaagggaaaggtgggagctgcagcggcagcgctggcacggatcagatgccgaacacgccgcgctcgaagcactccgccaccgagcagcgcaggcgcagcaaaatcaacgacagatttcaacttcttagagacttattgcctcataatgatcaaaagagagacaaagcatcatttctcttagaggttattgaatacatacggtttttacaagagaaagtacaaaagtatgaggtttcatacccggagtggaaccaagaaaatgcaaaggttgtgccatggacaaacatctatttccgttcttcctggaaaaatgcgcagaacaaaggccaagttcctgcagatcattcacctgaccctccagaacttctgaaaaatggttccccctatatgttcccttttacagggaactctgataataacaatgcagttgaaactgcagctgcttcaggtgcacaggatcaggcagaaactgatccaatgagtcgtgtgtcttacagatcagtggacactcccagtcccaataatgttgcagacaaagttacatctcagccacacgctcaactggtgagaccatcacctgcagagaatcacacagtaaactgcgacaagttaaataattctgaccttgccatcgatgagggaacaatcagtctatcaagccaatattcccaagagttgcttaacaagttgaatcatgccctggaaaactcgggtatagatttgtcccaagccagcatctccgtgcaaataaatcttggcaagagggctatgaagagatctactcctgctgcaacctccacttctaaggtaggatttatgtctcgtattgacactaagagccactacattatgtttgtggtaattgaaattggagctggcaatggatgttatacatggagctcactgatccggcatctaatagtcaagcaatgggccgtcagcttaggttgggtgatggcgctgaagaacatcgacaagcctcaaagcgacacaaatcagataacagctgatggtttgctcctgaaaaccccagatattcaaccattttttgctcctaactgtgtacggggagccccaaggttttatgtatattaa

SEQ ID NO: 11957 - DNA, 1119 bp, Oryza sativa
  Clone ID: TFbOSC409193j.C1.o3.fg
atggcgcaatgcggcggcggcgacgtttcacgacaccggaagggtcaccttgacaccgtcgagagcctctgccaggggctactcgacgacgtcatgctcgacgacgacaagtgccgcgccatgttcggctacctccaggagtggcaggacctggcaagcatgtgttacgggagcttaggcggcgagccgccgctggcgccggaggccagcaacggcagcggcagcagcggcggcggaggcagcttccggaagaggagaccggacgacgcaaagggtgagagcaacagcatctgcaagaggcagagagggaagcagcaacagcagcagcagccgtgtcatcccgatcagatggcggcggcggtggggaaaggaaggccggagagggcacggccaggagccaagaagaaggcggaggtggcgtcacccaaggattccccggcgacctcggcgtcgacggtgaccgccggccagaagaccgactacatccacgtcagagcccgccgtgggcaggccacggacagccacagcctcgccgaacgggtgaggagggagaggatcagcgagaggatgaggtacctgcaggagctggtgcccggttgcaacaaggtcaccggcaaggccggcatgctcgacgagatcatcaactacgtgcagtccctgcagaagcaagtcgagttcttgtccatgaagatcgcggcatcaaacccggtggtgaacttcaacatcgtcgaggacctcttcggccggcagctcagccaggcggcgtgcaaccctgcggctctgccggccatggcgctgccgatggcgcaggtcgagccttcctgcctccagatgagccccttgcagcagatgcaaacttctgcaggatcctctggctatgggctggagatggtcgtcagtaaccagtactcaccaccgggcgggccgatgtcggtgccggccggtgcatcggtggagccatgcctcaacgtgaatggagctgcaggttgggacattggctctcacggtttgttcagtggatttgatgcaccgtttcagtcagtacagagtgattgtttgctagacaatctcaaaatggaaatgtcccgctcaaagaaggcatctgatctaaggatctaa

SEQ ID NO: 11958 - DNA, 1161 bp, Oryza sativa
  Clone ID: TFbOSC413853j.C1.o5.fg
atggcattcatgaatcgccaagatccagaagcatctgggttcttctccgacgacgactccggccaaaccgccgcaatcgccgccgccgccgccatggagaacgaggatttctcctatatgctgcgtgaatttgactactacacaagcagtgaagatctcttcgagttgatgtggcaaggaggaggaggaggaggagccagcagcttcgaccagccgccgccgccggtttcctaccaccgcctgtcgccgccgccgccggcgatggggacgacgacgacgacgttactgccggagcagccactagttgatgatcatcatctcccagctgctgctgctgctcctccatcggaggaagagatggcagcgtggctctatccgatcgtcagtggccacgaagtcgccggcggcgggtggcggtcgccggaggctcaggatgaccggcgagccgcaccggcgccggagaagaaacagatggagaaaatgccggcggcggcatcgccaacgacgacgatgaataaggatgaaacaagcgacgactccggcgagaggaagaagaagaaggcgtcatcagcggcaggaaaaagcaagcaagcatcaccacgcggctgcaggagctcacaaccttacagaaaaagtggggattcgatcgatgaactcttcactaaatttcataggcggaggttcaagataactgagaggttcaggacgctgcagcgtctcgtccccggatgcgataagtccaaccaggcgtcgacgctggaccagacaatccagtacatgaagtcgctgcagcaccagctcaaggccatgtccgtcgtcggctcgccgccggcgctgctgtaccccgccgccgtgcacccgcagtcgtacatgcatccaccgccaccgccgccgccggtcacgatgccgatgcatccagggatggttcttgctgctcctcctccaggggcggcgccgccgcccggccctccggcgatggtgccattcggagctatgctcccttaccctccctacccggcggtgctgctgccgccggcggcggcgacactgtacggacggccgccggcccccgctcccggcgttgcagctcgtcgacatggatccagcggcggcggcagaattagcaagagcagtagcagcagcctgtgcaagaaattgtaa

SEQ ID NO: 11959 - DNA, 762 bp, Oryza sativa
  Clone ID: TFbOSC400346j.C1.o17.fg
atgtccggtaccccggcggacggcggcggcggaggcggcggaggcggcggagggagcggggacgactggttcctcgactgcggcatcctcgaggacctcccggcggccgcgtgcggggccttcccgtgggacgcatccccgtcctgctccaacccgagtgtggaagtaagcagctatgtgaacaccacctcttatgtcctcaaggaacctggcagtaataaacgtgtaaggtcagggtcttgtggtaggccaacatcaaaagcttccagggaaaagatcagaagagataagatgaatgataggtttcttgaattggggactactttggagcctgggaagccagtaaaatctgacaaagctgctatcctaagtgatgccactcgcatggtaattcaacttcgtgctgaagcgaagcagctaaaggatactaacgagagtcttgaagataagattaaagaactgaaggcagagaaggacgagcttcgtgatgagaagcagaagctgaaagtagagaaggagacattagagcagcaggtgaagattctgactgcaactccagcctacatgcctcaccccacattgatgccagcaccgtacccacaagcaccacttgcccccttccaccatgcccaggggcaagccgcggggcagaagctgatgatgccttttgttggatacccggggtacccgatgtggcagttcatgccgccttccgaagtcgacacctccaaggacagcgaagcgtgcccgcctgtcgcgtaa

SEQ ID NO: 11960 - DNA, 1428 bp, Oryza sativa
  Clone ID: TFbOSC101884j.C1.o4.fg
atggatgaggtgtggtgcagcctggacagcatgccggccgacatcgccgccggcatccaccagccgccgccgcccgacctccacgacccctccttctggccggctttcgccgactgtgctgcgagcttcatcgccggcggcggcggcgacaatgcgtgcttcgacgagctcatggcgggagggtcgtcgggtgacactaggatggtggccatggacgacggcgacgacgggagtggcttcttggtgggggacgccgaggccgagcacctgatgctgtcgtcctcgtcgccgtcgtcgctctcctcgggccgctccctctccatcgacagcgccggctccatgtcctccttctcgctcgacgccgccgcggcgctggcgatgtcgaccctcgccgtcccgcacccgtacccgccgcccgtcgcgcacggcatgttcgcctccggcgacggtggcggcggcggcggcggcgcagtcgacgaccacgaggacgccatcatgcgtgccatgatggccgtcatctcctccgcctcggcctccccctcctcctcgggcggctccgcctcctcgcccaccccgttcagccgggacagcggcgcgcaccaccagcctgcaggtcagccagccatggcggcgccgcagcagccgcgtggagggaacggcggccacgtggtggtgaagagcagcagcagcagcggcggcctcgccgtgccgatggatcagaagcccggcggcggcgggcggggacggcagcaggaggaggcggcggcggcgagcgccaccaacagcagccagctctaccacatgatgtcggagaggaagaggagggagaagctcaacgacagcttccacacgctcagatcactcctcccaccttgctccaagctttacacagtatttgagtggttaccaggaaacaacctgtttcatggaaacggaagtgacaacaaggacaagacgacggtgctgatcaacgcggccaagtacctcaagtcgctggagacggagatcacggagctggaagggacgaacacgaagctggagaagcacatcgccggcggcggcggcgcggcggacgccgccatgagggctcgccgggcgcagcagagggccaaggtgcagatcagcaaggcggcggactcgcagtcgcagcagctggtgagcctgacggtgatggtgatggtggagtgcgacgtggtggagctggtgctccacatcctggaatgcctcaggtggatgaaggagatcagcgtgctgtccgtctacgccgacacctactcgccgcagcttcttctcaaggccatcgccaacatcaagctccagatcgtgggaggagattggaacgaggcgtcgttccacgaggcgatgacgaaggcggcgaacgacgcgaccatttcctgcgccccgctcgcgatcacggcagcacagtga

SEQ ID NO: 11961 - DNA, 1098 bp, Oryza sativa
  Clone ID: TFbOSC400608j.C1.o9.fg
atggatgctaatggcggcaatgggtttggagtagagagcaacgcttcggctgtccatggtggcatggcgatggcttggcaatggcatggcggccagatgagcggcggcagctcgtgcgctgcggcgccgccgccggtgcaacagccggcgatggattctctcgcgtggtcgtcgacggtctcgccgagcaccggcgctgccacggcggcgagcggcgccggcttcttgctgccaccggcagccgtgcgcggcggcttcggcagtttcccggtcaactccggcggcatcgtcgagccggccggtgactgctcgtcggagtccaagaagaggagatcagacgagattgctggaacggatcacgcgaacgcatcgaacgcgcttgccgattctgggaacgagaccgagtgtagcaaagatgtcaacggcgaagtgatcggcccgccggcgacggcggcggccggcggcaagtcgaaagggaagggagccaaggacgccggcgaggcgcagaaggaagggtacagccatgtcagagctcggaaggggcaggcaaccaacaaccacagcttagcagagaggctgagaagggagaagatcagcgagaggatgaagctcctgcaagaccttgtccctggctgcagcaaagtcaccgggaaggcgttgatgctcgacgagatcatcaactatgttcagtccctgcaaagacaagtcgagtttctgtcgatgaagctctcggcagtcaacccaagaatcgatctcgacattgaatcacttgtcaacaattccaaggatgttcttcgttttcccgggcagccttcctctgctcccatgggattctccttctccacggagatgatgccggggctacaattatcacgaccgggcatccttcagggaggtgtccatggcatgatcaatccagatgtgttcaccagcctcatgcagaagcagcagcaaaatgacaagggagcattcagagagcctcagatgcatcagactttggatggatcattccgtaacaccgcacaaatgccgtatccacaggtcatgagttcagaagagctaagcatcaggcaagatcaagatgggtttcacatgtga

SEQ ID NO: 11962 - DNA, 948 bp, Oryza sativa
  Clone ID: TFbOSC102356j.C1.o4.fg
atggggctggatcgctgcgagagcgaggttggcgtgcggtgtccgcgtttgattcgatcggatgctggtggtgatttggcggcgctggggtcgtcggagtcggagcagcccaccaggccggcgcggccgcgcggcaagaggagccgcgccgccgaggtgcacaacctctccgagaagaggaggaggagcagaatcaatgagaagatgaaggccctgcagagcctcattcccaactccagcaagacggacaaagcctccatgcttgacgatgccatcgagtacctgaagcagcttcagctccaggtccagatgttgtccatgaggaatggtctatatctgcccccagtgaacttatctggggcacctgagcatctgccgatcccgcaaatgagtgctgcacttgaccagaatagtgccaaagcatcagatccttcagttgttttgcagccggtgaaccagacttcaggagcacttcttccatttgagctggcaagccaacataaacctctattcttaccaggtgttcctaatgcaaccgctctggagcctcggttccttgtagagtcttcgcgttccaatcttcaatccttacggttcactgaacccgctgagatgatctatcctgatgagatgatgttaaagcaccgcctgacttcagctagtgagagcacaattgtgccaggaaccgatgagaagtcggttaggcagaacacatacatgatgaatgctgatcgttttgatagatatgcactcagcaaagaccagttgcagcacattatgccgaaaaacacagaaagtgtacttgatatgccacacttgcaaagaattctgacaaaggtgttaattgtttcagattataagctgacgattcagcttccaatcttggacaggttgcaaaccagtgacaccaaagttagggtcgagggcagaatcaaagtaaacccatga

SEQ ID NO: 11963 - DNA, 819 bp, Oryza sativa
  Clone ID: TFbOSC404982j.C1.o1.fg
atggtgttatccaaactgaggaggagactcagatcagtcacacccggggagcggaccccgaccgccacggccgatgacagggatgccagagcacagcggagcggcggcggcgacgacgaggacgccacggccgcgccgccgccgccgacgagcagccagctccaccatatgatatcggagcggcggcggcgcgagcggctcaacgagagcttcgagcacttgagaggtttgcttcctccaggatcaaagaaagacaaggccacagttcttgccaagacactagagtacatgaacttgctgatagctcaaatctcggagctcgaagccaagaaccgagcactccaaacccaaatccaccaacgcgccaatggatcatcatcatcgagatcatcaatgatccgaacagtcaacgaggttcaccatcaccataatcaccaatggctagccgtcgccgccgccgccggcggctcgccggagagggtgcaggtccatgtgatcggcggcggtgatcacgacggcggcgcatcggcatcgtcgtcgtcgtcggcgccagaggtgaccgtgagggtggcggtgcgggcgccggagcgcggcggcgccgacgtgtcggagctcgtgctccgggtgctcgcactgctcaaggcgatgggcggcttcacggtggtggccgtcgacgcgaggcagccgggcggcggcggcggcaatggcgtcgctcaggccagcctaacactacgagcaacggtacggatgcttaccctgttgaaacgtatgtttcgtgcaaaaaatcattcttcctctgaccaaattataagattataa

SEQ ID NO: 11964 - DNA, 1122 bp, Oryza sativa
  Clone ID: TFbOSC400679j.C1.o12.fg
atgagcacactagtagacgcgctgtgcgctccctgcagcgacaccgcgctcatctacgacaccttcaacgcctccgccgccgcgagcttcctcttcgacaatgccgccgccttctgcgacgctgacatcctcggcgccacggcgacaggggagaaggaggcgacgtcgtcggccgcggccgcggccgcggaagccgccccgccgaggaagaagcggcggcggcgcgcgaagagctgcaagtcgcgggaggagacggagacccagcggatgacgcacatcgccgtggagcgcaaccgccggcgccagatgaacgagtacctcgccatcctccggtcgctcatgccggagccctacgtccagaggggcgaccaggcgtccattgtgggaggcgcaatcgagttcgtgaaggagctcgagcagcagctgcagtcgcttgaggcgcagaagcgaacgctgctccctcaccacaaggcgagatgcgacgacgcaacgccgatgcataacgccagcggcagcaacgtcggggccggcggctgcatggagcccacgacgacaacgagcaactgcagcagcagcgtcaccgaggacgcgccgtccgccgacgcgcccccgttcgcgcagttcttcgcgtacccgcagtacgtgtggtgccactcgccgcgcgactccaccaccaccaccaccgcggcgtctgcgtcggcgtcggcttcggcgtcgtcgtcgtcgccggccacggtggcggcggcgctccagtcggagcaccgctccgggttggccgacatcgaggtgagcctggtcgagacgcacgccagcgtccgtgtcatgtcaccgcggcggccagggcagctgctcaagatgatcgccggcctgcaggccctccggctcaccgtgctgcacctcaacgtcaccacgctggactcccttgtgctctacaccctcagcgtcaaggtggaggaaggatgcagcctgacgacggtggacgacatcgcggcggcggtgcaccacgtgctctgcatcgtcgacgcggaggcggccgcctcggagcatctcctcgcggcggggcaactggccacgacggcgacggcggtggcgaagagagaactcgcgacgtacatgtactga

SEQ ID NO: 11965 - DNA, 933 bp, Oryza sativa
  Clone ID: TFbOSC400284j.C1.o3.fg
atggcggtcgattggatctgggagaggcgccggagagaggaggaatataatcatcaaatgtcacaagacgaactgcagcaaccaggtcaggtgcagtggacgccggcgccggaagagaagtcggagatcgcggtgcagttcttcaccgcgccgtacccttgccagaacggccagcttgatcacggcgagcaccatgcactaggtggcattggagcgtgcagctccgtgcattggcaacctgaccgtggcacgtgctactggccgccgcctctcagtggggacggcggcggcggcagcggcagcggcagctccggcaccggcgaaggcagctacatcggcgagcgctgctactacgtcggcgagcccgacgtgcccatcggcctcaacctcctcgtcggcgacaatgacggcgccggagtagtactccgtgacgcggcgccgcaggcgaagcggaggactcaggccggccatggaggagatcttggacggcagaagaagaaagctcgagtttcagataagcggaatcaggagagtatgcagagcggcagctgctccgacaacgagtccaattgctcccaagtgaaccgccgcaaggtggatcgtgtcgccggcggcggaaacgggaaggttccggctcgccggaggtcggcgaccattgcccagagcctctatgcaaggagaagaagagagaggatcaatgggaggctccggattttgcagaagctggtacctaatggaaccaaagtggatatcagcacaatgcttgaggaggccgtccattacgtgaagttcttgcagctacagatcaaggtagaagtccaaatagtttgtcatgatcagatgcttagctctgatgagctgtggatgtacgcaccgattgtttacaatggcatggacttgggaattgatctgaatatttcccctccccggtga

SEQ ID NO: 11966 - DNA, 1089 bp, Oryza sativa
  Clone ID: TFbOSC401091j.C1.o1.fg
atgtgggaagctgtaggcggcggcgacggcacggctctcctgccgtggcccggctcggccgcggccgcgccgctctacatgcccccggcagcagcggcagcggcgcccttcgccgccggcgagcagctgccggtggagcagcccttctacttcgacggaggcggaggcgtggcggggcataatcaccatcctcatcatcatcagtacgggatggaggcgccgccgccgatgacgatgatgcagatgggcggcgggggttcgtcgtcgtcgaggatggtggtgtccgggctgctcgggacgctgcaggcggagctcgggaggatgacggcgaaggagatcatggacgccaaggcgctggcggcgtcgcgcagccacagcgaggccgagcgccgccgccgccagcgcatcaacggccacctcgccaggctccgcagcctcctccccaacaccaccaagttccgtaaaattcatgcgttccaatcaaacaatgtccatattttcataatgacggacaaggcgtcgctgctggcggaggtgatcgagcacgtcaaggagctgaagcggcagacgtcggcgatgatggaggacggcgccgcgggaggggaggcggcggcggcgccggtggtgctgctgccgacggaggacgacgagctggaggtggacgcggcggcggacgagggagggaggctcgtggcgagggcctcgctgtgctgcgaggaccgcgccgacctcatcccgggcatcgcccgcgcgctcgccgcgctccggctgcgcgcccgccgcgccgagatcgccacgctcggcggccgcgtccgcagcgtcctcctcatcgccgccgtcgaggaggaagatccagacgaggccgggaacgacgacgacggcgaacacggctacggcgttgccgcctcgcaccggaggcacgagctcgtcgcgtcgatccacgaggcgctgcgcggcgtcatgaaccgcaaagcggcgagcagcgacacctcctcttccggcgccggcggcggcggtgggagcatcaagaggcagcggatgatcagtgcacatgatcagcaaggttccttcaattctagtggctggtaa

SEQ ID NO: 11967 - DNA, 711 bp, Oryza sativa
  Clone ID: TFbOSC401731j.C1.o31.fg
atggacggaggcggagaccccgttgacgagttcctcatcggcggcggcggcgaggacggcgacctcggcgtcttctgcgacggtgtgccgacgctgccctgcgatggaggacttgggattgatgatgtcagtggagatacttgttgccttgaccaatctgttttagggaaaagaggtagagatgaatcatcatcatctggtccaaagtccaaagcttgccgtgagaaaattcggagggatagactgaatgacaggttccttgagttatcttccgttatcaatcctgacaagcaagctaagttggataaagcaaatatcttgagtgatgcagctcgtctgttggcagaactcagaggcgaggcagaaaagcttaaagaatctaatgagaagctacgagaaacaatcaaggaccttaaggtggagaagaatgaactccgtgatgagaaagttactctgaaggcagagaaggagaggctggaacagcaagttaaagcattgagtgttgctcctacaggatttgttcctcatctccctcatccagctgcattccatcccgctgcattccctccatttataccaccttatcaagctctgggcaacaaaaatgctcctacgcccgcagcattccaagggatggcaatgtggcagtggttgcctccaactgctgtggacacaactcaagatccaaagctttggccaccaaatgcttaa

SEQ ID NO: 11968 - DNA, 1344 bp, Oryza sativa
  Clone ID: TFbOSC26607j.C1.o1.fg
atggatgcgggtgcaactgcaaggtcgtcgtcgtcgtcggcgatgatgatgaaccagaagaagcccttgctctcggatggcgagctggtggagctcctgtggcaggacgggggcgtcgtcggccacgcgcagacgcgccaccgatcgtccgacgtcctcgcccggagcggcgtcaccggcgaggaggagacggcgtccgcgtggttcgcggatggcggtggcggcggcggcggcgacgacgacgcgctgggcctgggcatgggcagggacatctactcgcagctctggcacagcttcgccaatgtcgacgggcacgcggcgggcgcgctcgcgctcgcgacgccgacgccgacgccgcgggcggcggcgaggagcgacgacgtgtcgagccgtctcgacgaggccgacctgagcatctgcggcagcaacgcggtcgtggcgccggcgctgcccgcggacgacgacgacgacatcgacgccgccgcgccgcgcgaggaggaggaggaggaggaggaggggccgggcgccgcgcgcgccgccggcgcgtcgtcgtcgggcgggtcggggagcgggagcgggagctacccgctgttcaagcgggggagggaggagctggttgacagccttagcgaggtcgccgacgagacccggccgtcgaagcggccggcggcgaagcgccggactcgcgccgccgaggtccacaacctgtcagagcgtagaagaagggataggatcaatgagaagttgagagcattgcaagaactggtacctcattgcaacaagactgacaaagcatccatactagatgaagcaattgagtacttgaagtccctgcaaatgcaagttcagatcatgtggatgactaccgggattgtgccgatgatgttccccggtacccaccagctcatgccaccgatgggcatgggattgaacacggcatgcatgcctggggctcaagctcaaggcctgaatcagatgcaaagaacaacatattacatgaacaattctctgccaaaccagatgcctcagatcccttctccagctatgaatgcacccagtgttccagacgatatgcagaatgataatcgcatccgcgggccaagaaatccttttcttcattgcaatgatacactgacagcaacagctcaggttgattattatgttaaatttcatcattaccgatcattcagacttcaattcttgtttatcttacaatatcagttcttttcaggtgccaggcaccggcaatatgtgaagaatatagtggctgtgtggactcagcttgagccggcatcgcaaaagctgcacaagaacacaacagtgacagtttcactcttcttttag

SEQ ID NO: 11969 - DNA, 485 bp, Oryza sativa
  Clone ID: TFbOSC26607j.C1.o1.np
catttacccccaagtaccctatccagtcgcgcagcgatcttagagatcggcatcatctttctccaactccggtcgccgaggtccatcttcgatttctccctctccgtcctttgaagaaattgagccatcgccgttcatccaaggtgaagcgccgccgccgagacattccgcgagccatcgtcgacaaccaagctttgccgacctcatccgtgcgccgggccgccgccgtgcgtcatcgccgtcggtggtgaaccccggtgatgcgccgccgccgccgccccaccgtggccgagccatcctggctcgggccggccgccgtcgcgaggaagaattgggaaaagaaaaggagagagagaggaagaacatgtccaccagcaaatacacgatcttcaggtgtctcacagcaaagaccgcaatctttcggtgtcctgtagcaaattttgcctaaaaccaattaatttaggtccacatctacattaccaagc

SEQ ID NO: 11970 - DNA, 530 bp, Oryza sativa
  Clone ID: TFbOSC418437j.C1.o9.np
tgtatttttggtcggatttatttgggccgtccatgcagatatctcgcagcagcagcagcatctgcacgttactcacgtggcatctccaactctaccgccaaaatttgtattctttttttgaaaaaaaaatcgttggctcccgcgaccgcgacgcctcgtcgcggccttggtggtagagtacaagaaggagccaggcttctcttctcctcgagccagcagcaacacgcacgcacgcaccacacacgtagcagcagagcaatggcggcggccatggcgacccggccgtcgaagcggccggcggcgaagcgccggactcgcgccgccgaggtccacaacctgtcagagcgtagaagaagggataggatcaatgagaagttgagagcattgcaagaactggtacctcattgcaacaagactgacaaagcatccatactagatgaagcaattgagtacttgaagtccctgcaaatgcaagttcagatcatgtggatgactaccgggattgtgccgatgatgttccccggtaccca

SEQ ID NO: 11971 - DNA, 1704 bp, Oryza sativa
  Clone ID: TFbOSC400235j.C1.o1.fg
atggcatctgctcctccagttcaggaagaacccctacagccagggacgaaccacttcaggagcctgcttgctgctgctgtgaggagcatcagttggagttatgcgatcttttggtccatttcaaccagttgcccaggagttttgacttggaatgatgggttctacaacggcgtggtaaagacgaggaagatatccaactcagcagacctcacggctggtcagctcgtcgtgcagagaagcgagcaactgagggagctttactactctctcctgtccggcgagtgcgaccaccgggcgaggaggcccattgccgcgctatcgccggaagatctcgcagacacagaatggtactacgtcgtctgcatgacctactccttccaacccggccaagggctgccaggcaaaagctatgcaagcaatgcatctgtttggctgcgcaatgctcagtctgcagatagcaaaacatttctacgctcgctattagctaagacaatcatctgcatccccttcacgagtggcgtgcttgagctggggaccactgatccgactttcattatagcatatgcctgccacaacatggaacaggttttggaggacccaaagttggtaaaccgaatcgttgcatatttccaggagcttcagtttccgatatgcttagaggtactaatgagcactagcccttctccgaacgaaacggaagatgccgacatcgtgtccgaaggcctcatcactcacaacgccatcgaagaggggcagatggttgtctctgatgagtgcgtgtccaacgccaaccgcgatccaatcaccatggagatcgacgagctctacagcatctacgaggacctggacctggacatggacctggacctggacaccgtgcgctttctcgaggataatggctggcctgtgaaccccagctcttttcaactggtcccggcgtcgtcaacggaggcggtggcggcggcggcggcggctaatgatgtcgacggtgttgcgaattctcaagtgtcgtgcttcatggcttggaagagcgcgaagtcaaacgagatggctgtgccggtcgtcaccggtatagagtcacagaagttgctgaagaaagttgtggactgtggtgcacggatgagcactggtcgtggtagtagagcagcgctaactcaagagagtggcatcaagaaccatgtcatatcagagagaaggcgccgagagaagctcaatgagatgttcctgattctgaagtcaatagtcccctccatccacaaggtggacaaagcatccatccttgaagaaacgattgcctacctcaaagtgttggagaaaagggtgaaagagttggagtccagcagcgagccatcacatcagcgcgcaaccgaaacaggacagcaaaggcgctgtgagatcaccgggaaggagctggtctctgagatcggtgtcagcggcggcggcgatgcagggagagaacaccaccacgtgaatgtcaccgtcacggacaaggtggttctcctggaggtgcagtgccgatggaaggagttggtgatgacacgagtgttcgacgcgatcaagagcctctgtcttgacgttctctccgtgcaggcgtcggcaccggatggtcttcttggactgaagatacaagctaagtttgcttgttctggttcagtggcacctgggatgatcagcgaagctctccagaaagctatcggtggctag

SEQ ID NO: 11972 - DNA, 1422 bp, Oryza sativa
  Clone ID: TFbOSC400431j.C1.o63.fg
atggaggattgcagcagctggatccatggctacgccaacgctaacgccaccgccggcaacaacggcttcatgtgcggctacgctgccagctgcagcccagtagagtttcagcagcagcaacagctggtcggctcgcagattgagcaccacctcaaccaggcaagcttgatttgcaatttattcgatcaagaaacaatgcataaaatcaaagaaattttaggatttaatttggtaggtgtcgcgttttattacggcatgcagatcagcatgcagatggggatggatgacgagtcggcggtgtacgacggcgcctccatggtggacgtcctcctcatggcttcctcgtcgccgcaccaccacgccggcgccggcagcttccagtactcctcgccgacgtcctcctccgcctccttccgctccgcctccgtctcgtgcagccctgagagctcggcggcggcgacgacgcacttcctcggaccgccggcgccgtccgcggcggcggcggggttccattacccggaggtctcctcgcaggcgccgttgccactacccttgccgccctacgagccgcagcacggccaatacaccaccgtcctctcgccgccgccgccggcgccagagttgccggcgactactacgccggcgaccggcggcgcgttcaggcggtacgcgcggcacctccgcccgaggaggctgcccaagccgggagggtgcgggcagaggatgttcaagacggccatgtcggtgctcaccaagatgcacgtggcggcgacgtacaaccgccagtactactaccagcaggcggcagccgccgccgcgtcggcgtcggcggccgaggcgccgccgtccggcaaccagctgcagcacatgatctcggagcggaagcggcgggagaagctcaacgacagcttcctcgccctcaaggccgtcctccctcccggctctaagaaagacaagacatcgatactgatcagagcaagagagtacgtaaaatctctcgagtcaaagctgtcagagctggaggagaagaaccgggagctagaggcgaggctagccagccgccccgccgccgccgccaagaacgacaaaggcgagacggcggcggcgccagcgccggaagccggcgatgagacgaagcgaaaggacctagtagagatcgaggtgacgacgagcggcggcggcgccggagcggcggatgcggcggcggcggcgggaggagatcaagagacctgcacgctcaacgtagacttgcgcggcggcggaggcggcggaggcatgagcacgacggacgttgtgctccggacgctgcagtgcctgagagagcagatcggcgacggcgccagcctcgtggcgatgagcaccagcgccggctccggcggccgcccgcctcgtgcaaacctaacattacagctcaaggtgtaa

SEQ ID NO: 11973 - DNA, 681 bp, Oryza sativa
  Clone ID: TFbOSC400099j.C1.o6.fg
atgatgagtttcccgtacagctccggcgacctcggcgaggccaccaccgccgccgccgccgccgttgacatgatcacgctcgaccagatgttcagagactatgatgcctccaccggcgacgatctcttcgagttggtctgggaaagctgcggcggcggcgagatcgacagcggcgccggagaggtgcagcctgctggtgttccctgctgccgtcgattgctgccgggatcgtcgccggagccgacctccgaggacgagatggcggcgtggctctccacgattgtcaccggctctggcggcggcggcggcgacgacgtggctgccggcggagaccatcaagatccggcggtgaagaagcccgacggcgagccgttgacggagaagatggataagaagctcccaacaagaacggaagagaggcggcgcgtcaagcacaaagcaagaagaaatcctggatacgcagaaacacacggcttaacagagaagagacgaaggagcaggataaatgagaagttcaagatgcttcagcggctcgttccagggtgcgataagtgtagccaatcctcgacgctggaccggacaatccattacatgaagtcactgcagcagcaacttcaggttgacccccctgcggctatatataatcgtatttctgtggagagaattgatatgattatttaa

SEQ ID NO: 11974 - DNA, 2400 bp, Oryza sativa
  Clone ID: TFbOSC413939j.C1.o3.gm
atgggccactccaacgtgtggaactcccaccccaagaactacgggcccggctcccgcgtctgccgggtctgcgggaaccctcatgggctgatcaggaagtatgggctcatgtgctgcaggcagtgcttccgcagcaacgccaaggatattggcttcatcaaggcagcggcgtgctccggctccctcgctggcgtcggcgcacaggcgacgatggacctcagcttgaggggagaagctgaggcggcgcccgtgtaccgccctaattcgaagcatttcacaattgagattcatcatggtggatttttctgtggaatgggagtcaatcgcagttatgtggatggaaaagttagctggtttgactatgttaattctcgggagtggggtagttctcttcacttgttagatttggttgctatgctgggttatgcagcagggccaagattggaagtgtattggttgttgcttggaaagagattggctgatggcttgagaattgtggacaatgaagtggagattaatgtaatgaattcagtgtgcaacagagttaagaactttgtcctctatttagaccatagtgaccatgtttcaggcagtaatcatgaagatatcgtactgagcctaatctctcagttgccgaaagtaatgagccctgttagaggttgtcagcagaaggaacatgggaaccaagggggtagtaatgtaggagaaccagtgtgtgtggttgtagatgaagaagctgaagaaattgaagatcatggtgattatgacagcaatgatagtgaggctgatgatttagactttgtggacattgactatgagttgcaagatgatgatgatgacttatttgaagataatgtggatggtgatgtgctggaccagggattggcacctaagaagttcaatcacaagaaggttgcaggtagcaagctcaaggggaaggaagtacttagagaggaaggatcagatgaggagtcaagtgatgaagagatcttggagctgccagacaatacagatgagatcaatttgaggttcaaatcatttaacccagaagatatgaataaccctgtttttaaagttggaatggtgttcccttctcttgagttgcttagaaaagcaatcactgagtacagcttgaagaacagggtggacatcaagatgccaagaaatgatataacaaggatcaaagctcactgtgcagaaggatgcccttggaacatggcagattgcaagatgactctacctagctttgcaaaaactgttcagaaagagtggaatttgacaccttcaaggagcaaactggcaagggctaggaggttggcacttaaagagatatatggagatgaggttgcacaatacaacatgctgtgggactatgggcatgaattgaggaggcctatcatttgcttggatgggtgccatatcaagaccaaatttggtggacagttgttgacagcagttggcattgaccccaataactgcatatttccaatagcaatggctgttgtggaagtggaatcgttgaccacatggtcctggttcttgcaaactttaaaggatgaccttggcattgtgaacacttacattgtagatgttatgaccaagcactgtgattgtaggaggtggtcttcactgttggctgaggtgcatgacaatatgttggatcacatgctgttggagacgccatggctgctcgccgcctccagcctcaacctcgccgactccggccgcaaccaacccgtctccgaccgctacctcctcgttccgcacttcgccgccgcacaccgtcccctcgtcgcctcacccgcttcagccactaaccctaggactattttgttggcatacaaggctattgaacgttttgagtatgaaagcatagcatttgatgtggtcttcttgcatgaaacagagttcattgggttggtcatcactgggaacaagaggatgttccccatggatgagcactttgagcagcagcagaagaagccgaagaagaaaacccgaacttctcgctcggtatcaagtagttcaaccattactgactatgagactagctctgaacttgtcaatcctagctgttcctccgggagcagcgtcggagaggattcaattgctgcaactgatggatctgtagtgctgaaacaaagtgacaattcaagaggccataagcagtgctccaaggatacacaaagcctctatgctaagaggagaagggaaaggattaatgagagactgagaatacttcagcagcttgttcccaatggcactaaagttgacatcagcacaatgctggaggaagcagttcagtatgtcaagtttttgcagttgcaaataaaggcgaaaaaaacgccaccctccccccatctggccgcgctgccgccgttgcccctccgccagatctag

SEQ ID NO: 11975 - DNA, 546 bp, Oryza sativa
  Clone ID: TFbOSC5815j.C1.o1.np
catggcaaaggatcaaacaataagatttgagaaatgccggacacggcggcgggaagctctcacgcgcggcgagcagccagtccctcctcgcggagacggcggcggccggtggcgtccaccagctaccggcgagcgacgggtcgagcagcgacgctccttgtcggaagcggaaggcgccccgccggagacgaggacacgaagccggtcgccggcgacgcgggacacggcggcaatggcaagggaaaggtcctcgacgccgccggcgagccacccaaggactacatccacgtgcgcgctcgccgcggccaggccaccgacagccacagcctcgccgagcgggtgaggagagaaaagatcagcgagcgcatgaagctgcttcaagacctcgttcctggctgcaacaaggtgacaggcaaggcagtgatgcttgacgagatcataaactacgtccagtcgttgcaacggcaagtggagttcctatcaatgaagctttccaccgtcaacccgcagctggatttcgacgtcgacaacttcatcccaaaagat

SEQ ID NO: 11976 - DNA, 1047 bp, Oryza sativa
  Clone ID: TFbOSC401748j.C1.o10.fg
atggagctggatgagcaggcgttcttggaggagctcttctcgctgaggagggacgcgtgggagtacaatgccatgggggacttcttctcgccggcgtgcgccgccatggacggcttccaagaacggcaccagtccaccaccacggtcagcgtcctccccaccttcacggcctcctacgagcagccgccgccggcgccggcggccgggttcgactgcctcagcgaggtctacggcaacgccgccgccgcattcgggcccaatgccggcggcggcggcggcgagtacggcggcggcggcgacatggggtttcttgatgtggttgagcccaaggcgagtatggtggtggatggcggcgggctcggggtgtgcaaggtggagcccgggctgcaggcggagggcgggttcagcgcagcggcggcggcgccggcgtcgaagaagaagagggtggaagggatgccgtcgaagaacctgatggcggagcggcggcggcgcaagcggctgaacgaccgcctctccatgctccggtccgtggtgcccaagatcagcaagatggacaggacatcgattcttggggacacgatcgactacatgaaggagttgctggagaggatcaggcagctgcaggaggagatcgaggagcagcagcagcaggagacgcccggggtgctcagcgtcttcagggagctcaaccccaacgagatgctggccaggaacacacccaaggtagctgcatccatccattgctggatatataatgaggaggatgatgggattaatggagtttgtgaggtgcagttcgatgtggagaggaaggaggggggcgacacgcgggtggagatctactgcgcggccaagccagggctgctcctgtccacggtgagcacgctggagacgctgggcctcgacatccagcagtgcgtcgtcagctgcttcaacgacttcggcatgcacgcctcctgctccgagatgcagagggagaggatgagcgcggacatgataaagcaggagctgttcaagaacgccggctatggaggaggatgcttgtag

SEQ ID NO: 11977 - DNA, 1092 bp, Oryza sativa
  Clone ID: TFbOSC400265j.C1.o4.fg
atggcgttggaggcggtggtgttctcggaaggatactacttcggatgcggcggtgccatggcggcggaagcagctgcaggaggagcttggagctggagccacgggtatggcggtggcgttgatcaggggaagggggcgatggagttagtggtggacgacggggtggtgaacgccttctgggacggcggcggaggcggcgcaagctcttccccggtgatggccgccgtctcggggtttattgaggagccggacggcggtaattcctccgtcgcagacgcagcgccgccgccggagcacggaggtgcgtctgtcgtcggacgggatggctccgcggcggcgccggcggcggccgcagggaggaggaagcggcggagggcgaggaccgtcaagaacagggaggaggtggagagccagcgcatgacccacatcgccgtcgagcgcaaccgccggaagcagatgaacgagtacctcgccgtgctccgctccctcatgccggcctcctacgtgcaaaggggcgaccaggcgtccataattggcggagcaatcaactacgtcaaggagatggagcagcttctccaatccctggaggcgcacagacacgcccgccgcgcacgcaccgacgccgccgccgcgttgccattcgcgggcttcttcacgttcccgcagtactccatgagcgccgtgcccacgacaaccaccaccactgtagcagcagcagcaacggaaaacggcaatgccgtcgccggcgccggcgcgggcgacgacgcggacgcggacgtgtcggggtcgaagccgtcctcggtggcggacatcgaggtgacgatggtggagagccacgccaacctgaaggtgctgtcgcggcggcggccgaggcagctgctgaggatggtggcagggctgcaacaccaccgcctcgccgtgctccacctcaacgtcgccagcgccggccacatggctctctactcccttagccttaaggtggaagaagactgccagctcacgtcggtggacgacatcgcggcggcggtacacgggatcgtcgagacgatcgagcaagagcagcagcagcagcagaagcagagctgtagctag

SEQ ID NO: 11978 - DNA, 1060 bp, Oryza sativa
  Clone ID: TFbOSC900037j.C1.o3.np
tatgaaaaccaagggtacgtagttcaggaggtttatgttctaagcaaccaaaattattgttgcagcgaagacgacgggctcgtcgagctgctatggtgcaatggccacgtcgtcatgcagagccaggcgccgcggaagccgccgaggccggagaagacgacggcggcggcggcggcggcgatggcggaggatgagtcggcgtcgtggtttcagtacccggtcgacgacgtgcttgagaaggacctgttcaccgagctgttcggcgaaatgacggcggccggcggcggcggcggcgacgtccgcagggcggcgtgcaaggaggagcgcggcgcggtcgccgcgttccagagcaggatgatgccgccgccgtggccggcgagggggaaggcggagttcggtgacgtcgacgacgtgtgcggcgtctcggaggtcacggtcggcgagtcatcgatgctgacaatcgggtcgagcatctgcgggagcaaccacgtccagacgccgccggtggggaacgggaaggccggcgccggcaccgccggcgccgccagaagggcgcacgacacggcgacggtggcgtcgtcgtcgatgaggtcgaggtcctgcaccgccaaggccgagccgcgcgacgtcgcagccgccggcgtcggcggcaagcggaagcagcgcggcggcgccgccatggagtccgggagccccagcgaggacgtggagttcgagtccgccgccgcaacgtgctcgccggcgcagaagacgacgacggcgaagcggcggcgcgccgccgaggtgcacaacctctccgagaggaggagaagagataggatcaatgagaagatgaaagcattacaggagctcatacctcactgcaacaaaacggacaaagcatcgatgctggatgaagcgatcgagtatctcaagtcactgcagctccagctacagatgatgtggatgggcggcggaatggcgccgccggcggtgatgttcccggcggctagtactagtatcgtaccacaaagaatgcttcaaggcctgaaatttcgacccaaatacccgaaatttccgg

SEQ ID NO: 11979 - DNA, 1992 bp, Oryza sativa
  Clone ID: TFbOSC400964j.C1.o82.fg
atgactgagatattgtctcctacaaaaaccatcctacttgcagattgcagcagtaaaaaggcccacgcttttaacccaagaaagggtggtggatgtaaagatgcaaaggggatcagcttaccttgccaaccctgtgattctaaagtgttttcacatcctcttgcaaacagaaacagaaatggtctagtaataaattgtgttctacggcagctgcagcagcagcagcagcaactgcacaaaataaagtcagcagcaaggcagcaattcattcccctttcccctcttcctctcttcactcacctcttgcctgtgcaagtgcttcttttccactcctttactgttcccccacttttccttgctttgtcacgcacacgaaaagctcctgcctttaccttatctccgctcgccttccctcacccccgtcgtagtgggatttggtggctgctcgcctctcgcgtttcttttgctggattggggcgttcttgggagctcgggaattcgggtggtttggttgggtttcgtggagaattgcggcagatctttgagatgaactgcgggccgcccgaccagttgccgccggcgacggcgccgtcgtgcttcctcaacctcaactgggaccagtccatggacgcggcggcgggagggcacctcgacccggcgctcagctccatggtgtcctcgccggcgtccaactcgacgggcgctctccacgggatctcgccgcagccgcactacggtggcgggacgccgctcagctcgccccccaagctcaacctgtccatgatggggcagttccaccactacgccgcgccgccgcaggtgggcggcggcggaggcggaggcgggggcctgccaatcctcgagaacctgatgcccatgggccacctcgaccagttcctcgccgaccctggcttcgccgagcgcgccgcgaggctctccggcttcgacgcccgcggcggcggcggaggaggaggctacggcggcgccggcccggcgcaattcggcctccctgacgccggcgcggccggcgcatcgaaggagatggagctcgggaacacccgggacgagtcgtcggtgtctgatccggcgcccggcggcgccgagattccgcccaagggggcttccgacggcaatgcacggaagcggaaggcctccgggaagggcaaaggcaaggacagccccatgtccacctccgccgccaaggaggattccagcggcaagcgttgcaaatcgacggaggagagcaatgcggccgccgaggagaattccggcaaggggaaggccgcgcagagcaacagcgagaatggcggcggcaagaagcaagggaaggacagctcgtcgaagccccccgagccgcccaaggactacatccatgtccgcgcccggcgcggcgaggcgacggacagccacagcctcgccgagagggtgagaagagagaagataagccagaggatgaagctgctgcaggatctcgtgccgggttgtaacaaggtggttggaaaggctgtcatgctcgatgaaatcataaactatgtgcagtcgttgcaacggcaagtcgagtttttgtccatgaagttggccactgtgaatccccagctggacttcaacaatttgcctaacctccttgctaaagatatgcaccagtcatgcagcccgttacagagctcacattttccactagagacctcaggtgcgccgctgccctacattaaccagcctcagcaagggaaccctctcggttgtggcctgacgaacggcatggacaaccagggttctatgcacccattggacccggcattttgccggccaatgggctcgcaccatcctttcctcaatggggttagcgatgcggcttctcaggttggtgctttctggcaagatgatctccaaagtgttgttcagatggatatggggcaaagtcaggagatcgccacctcttccaatagctacaatggatcgttgcaaacagtccacatgaaaatggagctttga

SEQ ID NO: 11980 - DNA, 969 bp, Oryza sativa
  Clone ID: TFbOSC27232j.C1.o1.fg
atgggtgctcatggagaccaccgccaccaccaccaccatcaagaagccggggtgctcgtcgacgaggaggaggaggaggtgatcgagcaggcttgcggtggcccgacgagcggcgtggtggagcaagaggtggggggagacggtggtggagtgtgccaagatgctgccggcatggtgttcgaggcgaccagtagcgtcgggagcgtgagcgccaccatggggccgccgccgatcatgtgctggccaccgccggcgcagcctgtccacggtgcaatccaccaccaccacaacctaggcggcggcggcggccagcagagcccgttcttcccgctgctgccgcccctgccccctcagcccccgccgccacccccgttcttcgccgacttctacgcgcggcgggcgctccagtacgcgtacgaccactccggcggcgcgtcgtcgtcgtccgacccgctcggcctcggcgggctctacatgggtcaccacggctcccacgtcgccggcatgatgatgccgccgcccttcgctccgtcgccgttcggcgacctcggccggatgaccgcgcaggagatcatggacgccaaggcgctggccgcgtccaagagccacagcgaggccgagcgccgccgccgcgagcggatcaacgcgcacctcgcccgcctccgcagcctcctccccaacacaaccaagacggacaaggcgtcgctgctcgcggaggtgatccagcacgtcaaggagctgaagcggcagacgtcggagatcacggaggaggcgtgcccgctccccaccgagtcggacgagctcaccgtcgacgcgtcgagcgacgaggacgggcgcctcgtcgtgcgcgcgtcgctctgctgcgacgaccgcaccgacctcctgccggacctcatccgcgcgctcaaggcgctccggctgcgcgcgctcaaggccgagatcaccacactcggcggccgcgtcaagaac

SEQ ID NO: 11981 - DNA, 1062 bp, Oryza sativa
  Clone ID: TFbOSC9960j.C1.o2.fg
atggaggactcgagcctgttcatggagtgggccatggagacgctgcagcacctgcacccgctgccggcgacgccgccgcctgccggcggcgggtacgccggcgacaacgcgacttttccgtcgctccaagcgctccgcgagtcgtcggtgtcgcagaacggcatggccccgccggagccaacggcgcacgaaggccaccgagcctccaacagctggagctcgggcgacacggacagcgtgtccggtggcggcggcggcgcggtcatggagcacgacggatggtcgacgtcgccaaattcggtcaggtgcgccgctggcggcgggggcggcggcggcggcggcggcctctggcccgtgagctggaacttctcgtcggccatgacgcagccgtgcaacgatcaggccacgccgtcgaacccgccgacgacgacgagagcgcgctacggcggcggcggcgttcgatacctgccggccgccgtgtcgccatcgccatctgcacagacacggagagcctcctccaaaggcaacggcggcggtggctccggctcctcgtcggcggcgccgtacgcgcaggagcacatcatcgcggagcgcaagcgccgggagaagatcaaccagcggttcatcgagctctccaccgtcatcccgggcctcaagaagatggacaaggcgacgatcctctccgacgcggtgaggtacgtgaaggagatgcaggagaagctcagcgagctcgagcaacaccagaacggcggcgtcgagtcggcaatactcctcaagaagccgtgcatagccacgtcgtcgtcggacggcggctgccccgcagcgtcatcggccgtggctggaagcagcagcagcggcacggcgagaagctcgctgccggagatcgaggcgaagatctcgcacggcaacgtgatggtgaggatccacggcgagaataatggcaaggggtcgctggtgcggctgctcgccgcggttgaagggctccacctcggcatcacgcacaccaatgtcatgcccttctcggcatgcaccgccatcataaccatcatggcaaaggaatag

SEQ ID NO: 11982 - DNA, 570 bp, Oryza sativa
  Clone ID: TFbOSC17447j.C1.o1.fg
atgtcgcacatcgccgtggagcgcaaccggcggcggcagatgaacgaccacctcaaggtgctccgctcgctcacgcccgcattctacatcaaacggggcgaccaggcgtcgatcatcggcggcgccatcgacttcatcaaggagctacagacgctactgcaatcgctggaggcccagaagaagcgcaggcagcagccgcaggcgcacctaatctcgccggcatcgatatcggcctccggcggcggcagccccagccccacgcccagcccgcgctccctcatcacctcctgctctcccactgccgccgccggcagcagcgccggcagctcatcctccatctcccccaaggacgaaaataagcagcagctgcagctggtagcagagctcgccgcctgctgcaactcccccatggccgacgtggaggctaggatctccggcgccaacgtgcttcttcgcacgctctctaggcgcgcccctcccgtcaggatcatcgcccttctcgagagcctccatctcgaggtgctccatctcaacatcaccaccatggacgacaccgtcctctactccttc

SEQ ID NO: 11983 - DNA, 1539 bp, Oryza sativa
  Clone ID: TFbOSC401546j.C1.o6.gm
atgcacgccgcccatggtggaggtggaaggcaaccagtaaccatcttgccaatctcgagttctcagcttgtggtcacaggtggagattggccacttcttgcctacctggagaaggctctcatggcgctggaagctgtggtgttcccgcaggagcacctgtcgtgcgctgccgccatgtacgcggcgccgccgtcgtcgctgggatgcggcgttgacatggacgagttcgaggagaacggtggtgtggtgctgcaagaggaggccggagtggcggtgcacggcggcggcggcggtggcgctggtgggatgatgagcctctgggtcaacgcggcgacctgcgcgcgctccattgctgcttccggcgccgtggaggagttctgggacgagaggcagtaccccgtgtcgtcaccgccggcggcgccgacgccagcagcgtccggcggtggtggcggccacgccaaggcggccgcgcggaggcggcggcggcggcccaaggtggtgaagaacaaggaggaggccgagagccagcggcgcaaccacatcgccgtggaacgcaaccggcggcggcagatgaacgagtacctcgccgtgctccgctccctcatgccgccatcctacgcgcagcggggtgaccaggcgtcgatcgtcgccggcgccatcaacttcgtcaaggagctggagcagctgctccagtcgctagaggcccagaagcgtcgcgccgagcacgcgccgccggcgccgccgttcgccgggttcttcacgttccctcagtactctaccacagttggtgacaacaatgcggccggctctggcgccgccgacggcgagggcggctgcggcgcgcggcccggcgcggccgacatcgaggtggccatggcggagagccacgcgaacgtgagggtgctcgcgccgcggcggccgaggcagctgctgaggatggtggtggcgctgcaatgcctcggcctcaccgtgctccacctcaacgtcaccaccaccgccgaccatttggcgctctactccttcagcctcaagatggaggatgaatgccggctttcgtcagtcgacgagatcgccggcgccgtcaatcagatgatgtcggagtctgaagatgaaaagagcctctcggatgaaataacagatacatcacacctaccatgggatcccttctggaccaggaaatgcaaatacccgagcggtgggcggagcgacaacgggtggcagagaacggaggggtggcgggcggtgggcggagcgagcgccgggcggagaagaggagcggcgggtggaagcgaagcgtcggcggggcggtgggtggagcagtggggtggcaggtggaagtggagcgtcggtggggcggtgggccgagcgacggcgggcaccaggggcggtggccgcagcgagaggagcggtgcacgacggcgggagataggagagacggccggcggacgagaggagcaccgcgcggtcggcctcccttcctctccctctgtcatccgcggtgaagagatggggtggaaaagagggcgctcagagcagtag

SEQ ID NO: 11984 - DNA, 804 bp, Oryza sativa
  Clone ID: TFbOSC401369j.C1.o46.fg
atgggctctgctccgttcggtgacgccgtcgccggcggtgggctctatgagtaccaggggtatcacggtggcttcgccggcggccatggtctcggccaaccggccggccgagcgcccgcgttggacgacggtgaaactgaggggatggacgcatccgccgccgccgcagtcgccgccatggagatggcaaagaggaattgtggaggcggccgggaggagaaggcggcgatggcgctcaagagccacagcgaggcggagcggcggcggcgggagaggatcaacgcccacctcgccacgctccgcaccatggtgccctgcaccgacaagatggacaaggccgcgctgctggctgaggtggtgggccacgtcaagaagctgaagagcgccgcggcgcgcgtcggccggcgcgccaccgtcccgtccggcgccgacgaggtcgccgtcgacgaagcgtccgccaccggaggcggaggagaaggccccctcctcctcagggcgacgctgagctgcgacgaccgcgccgacctcttcgtggacgtcaagcgcgcgctgcagccgctcgggctggaggtggtcggctccgaggtcaccacgctgggcggccgcgtccgcctcgccttcctggtctcgtgcgggtctcgcggcggcgccgccgccgccgccatggcctcggtgcgccacgcgctccagtccgtgctcgacaaggccagctccggcttcgacttcgcgcccagggcggcgtcgctgctgggcagcaaacgccggaaggtctccacgttcgagtcatcgagctcctcgtcttga

SEQ ID NO: 11985 - DNA, 1125 bp, Oryza sativa
  Clone ID: TFbOSC401762j.C1.o11.fg
atgtctcaagaaggtcccaacaaccatcctcaaggcacccaagaaacccatgactgccccttcaccatcgccaccaacacaccgttaggctcgacaaagatgggctactccgactctagaaagtctgacgagaataatacctcgtcaaagccagcaagtccagtggtgtctagtgatgttgtagagatcaaggaaacatgggaaaatgttgtcgttgcggatgaagagggggaaggtggcgaggatggcttcgctagcgatgctagtgaatctaagtccaagagctcatctgatgaagttgattatgagctcttggatcttttggcaggtgcaagtgaaggatgcagcggaggaaacaacaacgatgaagtgaaaaactttgcctatgcagaccacaagatgcatgttttgagagagagggagagaaggaaggagatgaaaaacaagtttgagattctgcatgccctcatccccaacctcccagaaaagactgacaaggccactatagtggaggcgaccataaactatatcaagaacctccaagacaaaatccataagatggagatgctcaaggtggagcgcgagcatgccatcgctctcgccaccgccgcaaccgccaccgccgctgcctctgcggacaccgcgctgcaggcaccgccgccgtcggaggaggagaatgaggagcacgactccgtggtggctgcagcgacgagggagatggccctggctgacatggtgcacgcctgggagcagcagcaggaggccgccgccaccggcggcagccatggcggccacgccgtgccgccgccgccgcccgctgcttcgctccagacgtggacggggcccaacatgacggcgagcctcaccggcgatgacggcttcatcaccctctccctgccgcatcagggcggccagaagaacctcgtcgccggcgcggtgagcgtcctggagcgccaccacatcgacgtcgttacggccaccgtctcggcatccgagcagggcgacaacctgatcagcctgcactgccatctgagtccagggagctctagctctcagaacctgacgcctctggacaagttcaagctggcaatgtcagagctgatgctttgggtgatctccgtctga

SEQ ID NO: 11986 - DNA, 801 bp, Oryza sativa
  Clone ID: TFbOSC413853j.C1.o7.fg
atggcggcgtggctgtatccgatcgtcggtggccaccaagtcgccgccggcgggtggctgtcgccggaggctggggatgaccggcgagccgcaccgccggcgccggagaagaaacagatggacaacatgccggcggtggcatcgccgacgatgaacaaggacgaagcaagcgacgactccggcgagaggaagaagaagaagaagaaggcatcatcagcggcaggaaaagcaagcaggcatcgccacgctgcaggagctcacaaccttacagaaaaaaggcggaggttcaagataactgagaggttcaggacgctgcaacgtctcgtcccaggatgcgataataagtcgaaccaggcgtcaacgctggaccagacaatccagtacatgaagtcgctgcagcaccagctcgaggccacgtccgccgtcggctcgccggcggcggcggttctgtaccccgccgccgtgcacccgcagtcgtacatgcatccaccggcgccgccgccaccggtggccggagcggcggcgccggtcacgatggcgccgatgcctgccgggatggttcttgctgctgctcctccgggggcggcgccgccgcccggccctccggcgacgatgatgccgttcggagctatgctcccttaccctccctacccggaggtgctgctgccgccgccgccggcgacgctgtacggacggccgccggccgccgctcccagcgttgcagctcgtcgacatggatccaccagcggcggcggcagaattagcaagagcagtagcagcagcctgcgcaaggaattgtaa

SEQ ID NO: 11987 - DNA, 528 bp, Oryza sativa
  Clone ID: TFbOSC19716j.C1.o1.fg
gtggtgcagaagaagggtaataagaacgcgcagtcaaagaaggcgcagaagggcgcgtgcagccggagcagcaaccagaaggagagcaatggcggcggcgacggcggcaatgtgcagagctcgagcaccaactacctctctgatgacgactcgctgtcgctggagatgacttcgtgcagcaacgtgagctcggcgtccaagaagtcgtcgttgtcatcgccggcgaccgggcacggcggcgcgaaggcgagggccgggcgcggggcggcgaccgatccgcaaagcctctatgccaggaagaggagagaaaggatcaatgaacggctaaagatactgcagaatcttatcccaaatggaaccaaggtggacatcagcacgatgcttgaagaagcagttcactacgtcaagttcttgcagctccaaatcaagcttctgagctcggatgatatgtggatgttcgcgccgatcgcgtacaacggggtcaacgtcgggctcgacctcaagatctctccaccgcagcagcaatga

SEQ ID NO: 11988 - DNA, 975 bp, Oryza sativa
  Clone ID: TFbOSC900178j.C1.o3.fg
atggaggactcggaggcgatggcgcagctgctcggcgtgcagtacttcggcaatgaccaggagcagcagcagccggcggcggcggcgccgccggcgatgtactggccggcgcacgacgcggccgaccagtactacggctcggcgccatactgctacatgcagcagcagcagcattacgggtgctacgacggcggcgcgatggtggccggcggcgacttcttcgtgccggaggagcagctggtggccgacccgagcttcatggtggacctgaacctcgagttcgaggaccagcacggcggcgatgctggcggcgctgggagcagcgccgccgccgccgccgccgccaccaagatgacaccggcgtgcaagaggaaggttgaggatcacaaggatgagagctgcacggacaacgtcgcgaggaagaaggcgcgctccacggcagcaacagtggtgcagaagaagggtaataagaacgcgcagtcaaagaaggcgcagaagggcgcgtgcagccggagcagcaaccagaaggagagcaatggcggcggcgacggcggcaatgtgcagagctcgagcaccaactacctctctgatgacgactcgctgtcgctggagatgacttcgtgcagcaacgtgagctcggcgtccaagaagtcgtcgttgtcatcgccggcgaccgggcacggcggcgcgaaggcgagggccgggcgcggggcggcgaccgatccgcaaagcctctatgccaggaagaggagagaaaggatcaatgaacggctaaagatactgcagaatcttatcccaaatggaaccaaggtggacatcagcacgatgcttgaagaagcagttcactacgtcaagttcttgcagctccaaatcaagcttctgagctcggatgatatgtggatgttcgcgccgatcgcgtacaacggggtcaacgtcgggctcgacctcaagatctctccaccgcagcagcaatga

SEQ ID NO: 11989 - DNA, 912 bp, Oryza sativa
  Clone ID: TFbOSC417480j.C1.o2.fg
atgacccacaactccagcagcagcagctcatgggatttggacatgagcctcggcagccaccaccatcccctcctcttcgaccagccgccgccgccgccgcccccgccgccgccgccgccattacccttccacctccaccaccaccctctagatccctctccttcttcttctttggttcctcctcctccccatcatcaccaccatgcccatcacctccatcatcctctcgacctggaccagcggcgtggtcaccatgactatggcggcggtgaccaggggggcgacgaggagctgaggcttcagcaggaggcggcggcaggtggtggtggtggtggccaggacggcggcggcggtggggatcaggacgccgacgaggagctcggcgccatgaaggagatgatgtaccggatcgccgcgatgcagccggtggacatcgacccggcgaccatcaagaagccccgccgccgcaacgtccgcatcagcgacgacccgcagagcgtcgccgcccgccaccgccgggagcggatcagcgagcgcatccgcatcctgcagcgcctcgtcccgggggggaccaagatggacaccgcctccatgctcgacgaggccatccgctacatcaagttcctcaagcgccaggtccaggagctccagcaccagccgggaccgccgccgccgccgtatcccgccggagctgcaccggccgccgggcccagcacctcggccgtgggcccaccgggccggccattcttgccgctgggtggaggagggcccatgatcgactgggtcggcctgaccaggccggtggacatccatgggccgacctcgtcgtcgtcctcgtcgtcgatgggcggcgccttgggtttcgggttcggctgcggcggcggcgggcagagcagccatgggatgcactga

SEQ ID NO: 11990 - DNA, 912 bp, Oryza sativa
  Clone ID: TFbOSC417550j.C1.o1.fg
atgacccacaactccagcagcagcagctcatgggatttggacatgagcctcggcagccaccaccatcccctcctcttcgaccagccgccgccgccgccgcccccgccgccgccgccgccattacccttccacctccaccaccaccctctagatccctctccttcttcttctttgtttcctcctcctccccatcatcaccaccatgcccatcacctccatcatcctctcgacctggaccagcggcgtggtcaccatgactatggcggcggtgaccaggggggcgacgaggagctgaggcttcagcaggaggcggcggcaggtggtggtggtggtggccaggacggcggcggcggtggggatcaggacgccgacgaggagctcggcgccatgaaggagatgatgtaccggatcgccgcgatgcagccggtggacatcgacccggcgaccatcaagaagccccgccgccgcaacgtccgcatcagcgacgacccgcagagcgtcgccgcccgccaccgccgggagcggatcagcgagcgcatccgcatcctgcagcgcctcgtcccgggggggaccaagatggacaccgcctccatgctcgacgaggccatccgctacatcaagttcctcaagcgccaggtccaggagctccagcaccagccgggaccgccgccgccgccgtatcccgccggagctgcaccggccgccgggcccagcacctcggccgtgggcccaccgggccggccattcttgccgctgggtggaggagggcccatgatcgactgggtcggcctgaccaggccggtggacatccatgggccgacctcgtcgtcgtcctcgtcgtcgatgggcggcgccttgggtttcgggttcggctgcggcggcggcgggcagagcagccatgggatgcactga

SEQ ID NO: 11991 - DNA, 1200 bp, Oryza sativa
  Clone ID: TFbOSC400812j.C1.o6.fg
atgtacggctcgccggtttccaaggatctgaacctcccggtgcagccgccggcgatgagctcgtcgggcttgctgcggtacagatcggcgccgagcacgctgctcgccgagttctgcgacgacttcctcccgcccgccgccgcgccccgcgccgccagccccgacgccgacaacgtcttctcccgcttcctcgccgaccaccagatccgtgacaagtctccccccgccaccgccgccgccgccgccgctgccgctcacttccccgacgaccccaccatggccacccagcaccaccaccagcagcagatgatgttccagcaccacccgcagcagatggcctctgtcgaggggctctaccgcaccgtcagctccaccgggattgacgccgccaccgccgccgccaacgccgccggtggcggcggcggcgggctgctccggcagagtagctcgcccgccggattcctcaatcatttgaacatggacaacgggtacgggagcatgctgcgggcgggcatggcggcagccggcggtggggtggggttcaggaacggcgcgaacgccgccgccgcggccgactcccccggcggcagcgggggcaggctgaaggggcagctcagcttctcgtcgcggcagggctcgctcatgtcgcagatctcggagatggacagcgaggagctcggtgggagcagccccgagggcgccggtggcggcggcggcggcggtggccggggttacctctccgggtacccgatgagctccgggtgggaggagtcgtcgctcatgtcggacacgaacatctccggcgtgaagcgccagcgcgactcgtcggagccgtcccagaacggcggcggcggcggcggcctggcgcaccagttcagcctgccgaagacctcgtcggagatggcggccatcgagaagttcctccagttccaggacgcggtgccctgcaagatccgcgccaagcgcggctgcgccacgcacccgcgcagcatcgccgagcgggtgaggaggacaaggatcagcgagcgaatcaggaagctgcaagaactcgtgccaaacatggacaagcaaaccaacactgctgacatgctggatttggctgttgactacatcaaggatcttcagaagcaggtcaagggattaaacgacagccgagctaactgcacctgctcagcgaagcatcagcagtactctggctag

SEQ ID NO: 11992 - DNA, 711 bp, Oryza sativa
  Clone ID: TFbOSC900200j.C1.o12.fg
atggacttcgacttgttcaattcctacccggaatcgcagcttgacctgatgagcacgatgcttcagctggagcagctcactgcgctcagtgaccagtcgctgttcatggcggcgccgacgtcgccgccggtatcacccatggggaccccttctccccagttctcaccaccgccgcagatgtcggtcaccaccaccaccgccggtggcggttaccaggatcagtataactccatgccggcaacgtacggcgccggtgcgggcgtgcaccagctggacttcgcgatgtcgtcaccgggctccgactccggcgcgccgcagggctcgtcgtcgtcgtcctcgtcggaggcgatgcgggagatgatcttccacatcgcggcgctgcagccggtggagatcgacccggaggccgtgcggccgccgaagcggcgcaacgtgcgcatctccaaggacccgcagagcgtggcggcgcggctgcggcgggagcgcatcagcgagcgcatccgcatcctgcagcggctcgtcccgggcggcaccaagatggacaccgcctccatgctcgacgaggccatccactacgtcaagttcctcaagtcccaggtgcagtccctcgagcgcgccgccgccgccaccggcgccgccgcccaccgcgccgccgcattcggcgccgcctacccagctgccttacccatgcagcaccacgctccgtggtag

SEQ ID NO: 11993 - DNA, 418 bp, Oryza sativa
  Clone ID: TFbOSC403397j.C1.o2.hg
ccatagaatcggtgctgaccaagatgcacacggcaacaatgtacaggcgtacgccagtgctaataccagcagacagcggccgccgccgtccagcaaccagctgcagcacacgatgtcggagcggaagcggcgggagaagctcaacggcagcttcgtcgccctccagtccaggccgtacgtcctccctcccggctccaagctagacaagacgtcgtcgatactgatcggagcaagggagtacgtgaagtttctcgagtcaaagctgtcggagctggaggagaagaaccgggagctggaggcgcggctagttagcagccccgccgtcgtcgccaagaacgacgcggaggaggcggcggcgccacccgaggctggcggcgagtcccggttcaaatacccggtactaaagatcgatttttag

SEQ ID NO: 11994 - DNA, 798 bp, Oryza sativa
  Clone ID: TFbOSC400741j.C1.o5.fg
atggtttcggaggacccaaacttggtaaaccgaatcgttgcatatttgaaggagcttcagtttccgatatgcttagaggtaccgagttctactccttctccagacgaaacagaagatgccgacaccgtgttcgatggcctcattgaagaggaccagatggtcatactccagggagaagacgagctaggcgacgtcgtcgtcgctgagtgcgagaccaacggcgccaaccccgaaacgatcaccatggagaccgacgagttctacagcctctgcgaggagctggacctggacctcggttcttatcagctagtcccgacgtcggcacgggagacggtggctgcggcggcggcggcggctaacgatgtcgacggcgttgcatactctcacgcctcgtgtttcgtgtcatggaaaagagcgaacccggcggagaaggtggtggccgtgccgatgactgcaggcatagagtcacagaagttgctgaagaaagctgtaggcggcggcaccgcatggatgagtaatattgatgatcgtggtagcgtggcaataacgacgactccaggaagtaacatcaagagccatgtcatgtcagagagaaggcgccgagagaagctcaacgagatgttcctcattctgaagtcactactcccctccgtccgcaaggttgacaaggcatccatacttgcagaaacgataacctacctcaaagtgttagagaaaagagtgaaagagctggagtccagcagcagggagccatcgcgttggcggccaaccgaaattggacaggggaaggcgccgtaa

SEQ ID NO: 11995 - DNA, 1437 bp, Oryza sativa
  Clone ID: TFbOSC400736j.C1.o3.fg
atggactactctgctggttcctacatgtggcctggcaattcaggttctgagaactataattttgttgacggttcgtcggaatcatatgcagaagaaggaagcctaccaccttcaggctatttcatgggagctggatcagatcgcagtttaaagatcacggagaatgaaaggaaccccactatgcttgcaaatggatgcttgccatacaacacccaggctcatccattatctggccagattctacctaagggtgagctccctaacaatcttctggatcttcaacagctacagaacagcagcaatctgcgaagcaattcaattcccccaggggttcttcagtgcaattcaacatctggaacatttgatgcgaaattggatacacctggtcttgcagaactgcctcatgctttgtccagttcaattgatagcaatggtagtgacatttctgcttttcttgctgatgtgcatgccgtttcttcagccccgacgttgtgttcagcattccaaaacgtttcctccttcatggaaccagtaaatctagatgctttcggtttccaaggggcacaaaatgttgctatgttgaacaaaacaagtcttccaaatgggaatccctcgctgtttgataatgctgccatagcatcactacatgatagcaaagagtttctcaatggtggttccatcccttcgtttggtactgtcctgcaggcactaggagcgggtggtttgaaggctgctcaacaggagcaaaatatccggaatatacctctccctacattcacatctggtagtcatttggcagttactgatgcacaagggccaccacttccttcaaagataccaccattgatccatgaccataatagtgagtaccctattaaccattcttctgatgtggaaccccaagcaaattcagctcctggaaatagtgccaatgcgaagccacgtacaagggctcgccgtggacaggcaactgatcctcacagtattgctgaacggcttcgccgagagaaaatttcagaaaggatgaaaaatctccaagtccttgtcccaaactccaataaggcagataaggcatcaatgcttgatgaaataattgattatgtgaaatttcttcagcttcaggtcaaggtattgagcatgagcaggctaggagctcctggagcagttcttccccttcttagggaatctcaaaccgagtgccatagtaatccatctctatcagcttcaaccatttcacaagggccaccagacatgccagactcagaagacagctctgcctttgagcaagaggtagtgaagctgatggaaacgagcatcatcagcgcgatgcagtatcttcagaacaagggtctctgcctgatgcccattgctctcgcttcggccatatccaaccagaaaggcatggctgctgctgctgcaatccctcctgaaaaatga

SEQ ID NO: 11996 - DNA, 1392 bp, Oryza sativa
  Clone ID: TFbOSC401380j.C1.o29.fg
atgcaacccaacgcccgccaaatgcgcggcggcggcggcggcggcggcggcgggcaggacgacttcttcgaccagatgctgtccacgctgccggcggtgtggtccgagctcggctccggcaagcccgcctgggacctcacggccggcgccgtaggaggaggaggaggagcctccgatgaccactccgccgcggcgttcgacgactccgcgctcctcgcctcccgcctccgccagcaccagatcgacggtggaggcgacaagcccatcatgctccaactcagcgacctccaccgtcatcacggcctcgccgccggcgatgacagcggcggcgctgccgggttccttcccctgtcgctgttcgctgaccggtcgcaggacgacatcgacgccgccttcaagtcccccaatggcgctagaggtgaccatgcgctgtacaatgggttcggggccgccggaatgcatggcgccgccgccatgcagccgccgccgttcgggcagggaggatcaatgccggcgcagagcttcggtggcggagcggccgcgagcggcggcggcggcggcgggtcggcgtcggcggcagcggcggctggggcatcgtcgggcggaggggcggcggcgccgccgcggcagcggcagcgggcgaggagagggcaagccactgacccacacagcatcgccgaacgtgtataccactctcccaccacctttcccttctcgcccccattttttattgcctccatgccatgttgtctccggagggagaggatagctgagaggatgaaggcgttgcaggagctggtcccaaatgccaacaagaccgacaaggcatcgatgctcgacgagatcattgattatgtgaagttcctccagctccaagtcaaggttctcagcatgagcagattggggggagcttctgcagtcgcgcctctagtggctaacatgtcatcagagagtaatgggaatggcaatgccaccagcagcagcgggaacggcgaggcggccaatggcagcagcaacggcgacaacaatggtggcggcacactgcgggtgacggagcagcaggtggcgaagctgatggaggaggacatgggctccgccatgcagtacctgcaggggaaggggctatgcctgatgccgatctctctcgcaacggccatctcctccgccacctcctcgtcgctcctcccccgcactgggggaggcgctggagggtccctacatgaaggtggtaatggtacatcaccaccattggtgaatggcaccgccaccggatgtgacgacgccggagtattcttttctgttaaatttgtcgtggagctgtcgtttctcctgctgaatgaagactgtagaggtaaggaggaatcgaaattattggtccagaagggaccctga

SEQ ID NO: 11997 - DNA, 1356 bp, Oryza sativa
  Clone ID: TFbOSC400506j.C1.o47.fg
atggcgatttgcagcacggacaacgagctggtggagctgctatggcacaacggcggcgtcgtggcgcagccgcaggcggcgcaggcgagggtcgtctcctcctccggccgcggccagagcgccagcgtgctcaccggcgacgacacggagaccgccgcgtggttcccggacaccctcgacgacgcgctggagaaggacctctacacgcagctctggcgcagcgtcaccggcgacgcgttcccggcggccgcggcggcggggccgagctctcaccacgctccgccgccggacttgccgcccccggcggcgaggccgccgatgaggagcggcatcgggtcgagctggaccggcgacatctgttcggccttctgcggcagcaaccacatcccggagacggcggcgcagcgctgccgggacgccggcgcggcattgccgccggagcggccgcgccggtcgagcacccacgacggcgccggcacgtcgtcgtcgggcggctccggcagcaacttcggcgcttccggcttgcccagcgagagcgccagtgcccacaagaggaaaggcagagaagattcagacagtcgcagtgaggatgctgaatgcgaggcaaccgaagagaccaaatcgtcgtcgcggcgatatggatcaaagaggagaactcgtgcagctgaagttcataacctgtcagagaggagaagaagggatcggatcaacgagaagatgcgcgcattgcaagaactcatacctcattgcaacaagaccgacaaggcatctatattagatgaagcaatcgagtatctgaagtcactccaaatgcaagttcagatcatgtggatgactactgggatggcaccaatgatgttccctggtgctcaccagttcatgccaccaatggccgtgggcatgaattctgcgtgcatgcctgcggcacaaggcctaagtcacatgtcaagattgccatacatgaaccattctatgccaaatcacatccctctaaattcatctccagctatgaacccaatgaatgttgcaaaccagatgcagaacattcaactgagagaggcaagcaatcccttccttcacccagatggctggcaaacagtgccaccacaggataaggaattcaatgtaggctttgcacaaagggtcgtctttctggagatagctgaaaatattgacatgatgaacagattgcatccatattgctgttatcagcagcaggaacaacaactgggagagcctgaggattatgtctgggaaccctaccaccattgcaaattgccatcatcccagcagaaacctgaaggtggagatttggagttcatgtccaagttggttgcatctattatctcttgttga

SEQ ID NO: 11998 - DNA, 84 bp, Oryza sativa
  Clone ID: TFbOSC403417j.C1.o1.gm
cacatgatctcggagcggaagcggcgggagaagctcaacgacagcttcgtcgccctcaaggccgtcctccctaccggctccaag

SEQ ID NO: 11999 - DNA, 792 bp, Oryza sativa
  Clone ID: TFbOSC401007j.C1.o1.fg
atggacgagcttgtactctccccttcctccttctccgccacggcctgcttcccgacgcttgacttcgagttctgcgaggtccccgaccaatggctgctgggactcggacacgacgagctcgacaaggatgccgccgcctccgccttggcggcggcagcggcctcgcaatcggcgagcaacgacgacgtgcccaggaacccgcccgccacgacgacgacgacgaagcggcgggggcggaagccagggccacgctccggcggcggcggcgcgcccccgatcggccacgtggaggccgagcggcagcggagggagaagctcaaccgccggttctgcgaactccgcgccgccgtgcccaccgtgtcacggatggacaaggcgtccctcctcgccgacgccgttgactacatcgccgagctgcgccgccgcgtcgagcggctcgaggccgaggcgcggagggcgccgctggctccctccgctgccgccgccgccgcctgggccgcggggctgggcgccggcgccatcggccgggatgatctcgtggtgcggatgatcgggcgtgacgccgccatactgcgcctgacgacggcggcggcggcggcgcggcacgccccggcgcgcatgatgtgcgcggtgcgggcgctgaacctggcggtgcagcacgcgtcggtggcgcgcgtgggcggcgcgacggtgcaggacgtgatggtggacgacgtgcccgccgcgctccaggacgaagcccgcctccgcgccgcgctgctgcacacgctgcagctcgccgacacgacctag

SEQ ID NO: 12000 - DNA, 1458 bp, Oryza sativa
  Clone ID: TFbOSC401238j.C1.o2.gm
atggagctaatggacgacgacggctcgtcgtccctcctggaggagctcatggcgccgctccggagaggcacaccgacgacgacgccggaagatctgtggcttcaggcgtacccgatgatgatgagcccgatgtgcggcgacggcgtcatgctcggtgacctcctcgtcgggggcggcaacgcgaggaacacgcttgcctcgccgccgccgccgtcgttcccactgcctgtgcctctgacgacgacgactccttgtccgcctctgcacgaggtcagctttgagtttgattcaattgattgcttgggtgaagtgtgcaacccgtacaagagatcaggcggcgctgtccgtgccaccgccgccgctcaggtgatggtggccgccatggatccgagacgcgaagctgcgtcgtctgcggtggcggtggcggcggtggaggaggaggagagatgcaaggcgcgacgtggcgctggaggcggtggtgatagtggcgagctggcgcccatgttcgtgttcggcggcggcggcggcgcggcggcgagcgtccgcccaagaagctgcaggccgccgcaaccaggcgcgccgtccaagaacctgatggcggagcggcggcggcggaagcggctcaacgaccgcctctccatgctccgctccgtcgtgcctaggatcagcaagatggacaggacctcgattctcggcgacaccatcggctacgtgaaggagctgatggatcggatcaagaacctccaggtcgaggccgccaccggtgactcatcctcctcctccacggagaatctctccatgctgaagctgaacacgctcaagcctccgccgtcgtcgagctccggcgaagagacgccgcttatcagaaactcgacgaggttcgaggtggagaggagggagaacggaagcacgaggatcgagatggcatgcgcggcgatccccgagctgctgccgtcgacgctggccgcgctggaggcgctgggcgtggagatcgagcagtgcgtcatcagctgcttcgatgacttcgccatgcaggcctcctgcctacaggcggcggcgcgggagcagaggtccaggttctacatcttccgcaggtgcgtcgccatgctcctctgctggtacaagtacaggaacatcacaccccttcgtgcgccgaagaccgccacgcccaccggcagctcctcctcacacctaggtcgcctcctccaccgccggccgcgcctctctgcgccaagccgacctcctccaccggacgcgcctctcgcgccaatccggcctccctccatcggctgcgcctctcgcgccaagccggcctccatctccgccgcccgtgcctctcgcgccgagccggcctccgctgccatcggctgcgcttctctgcgccaagccggtctccgacccttccaccaaacgatgccgcgcagaccagaagcagccgtctcccacgccctcggctag

SEQ ID NO: 12001 - DNA, 990 bp, Oryza sativa
  Clone ID: TFbOSC410031j.C1.o10.fg
atggcgttagaggccgtggtgtttccgcagggccatttcggctacgggtgcggaagggactcgccggcgtacgggatgccgtggtgcgacgtcctggctgctgccggcggcggcggcggcttcggtgagttttacggagtggacgagtgggatgaccagctgcaggtcgcctccgtggatgagtgggaggtggcatccaaggataactcggatgcttccacggagggcaaggcggcggcggcggagcgggcggagccggtggccgccgggaggaggaaacggaggcggacgaaggtcgtcaagaacaaggaggagatcgagtgccagcggatgacccacattgccgtcgagcgcaaccgccgccgccagatgaacgagtacctcgccgtgctccgctccctcatgccggcgtcctactcgcagaggggtgatcaagcatcgatcgtcggaggagcaatcaactacgtgaaggagctggagcagctactgcagtcgctggaagtccaaaagagcctcaagaaccgcagcggcgccatggacgccgccggcgattcccctttcgccggcttcttcagcttcccacagtactccacgtcgcctcgcactggctgcagcgccgccgccagcgccgggagctccggcagtgcgagcagcgtcgtcatggacgacacggcgggctccgcggagagcggccggcagtcggcggccatcgccgacatcgaggtgaccatggtggaagggcacgcgagcctcaaggtgctcgcgcggcggcgaccgaagcagctgctgaagctggtcgtcgggctgcagcagctgcgcatcccgccgctgcatctcaacgtgaccaccgtcgacgccatggtcctctactccttcagcctcaaggtggaggatgattccaagctgggctctgtggaagacattgccaccgctgtgcatcagatcctgggcagcattcagcagcaggaggccgtcctctccatcagctga

SEQ ID NO: 12002 - DNA, 1206 bp, Oryza sativa
  Clone ID: TFbOSC401398j.C1.o3.fg
atgtacggcgcgccggtgtccaaggacctgagcctgcagccagccggggtgcggacgccgccgcagatgagctcgccgggcttgctgcggtacaggtcagcgccgagcacgctgctcggggaggtctgcggcgacttcgtcctccccggtggtggtggtggtggtgggcagctgcagctgcagctgcagcagcagcggcctgggagcccggaccacgccgcggacaccgtcctcgcgcgcttcctcgccggccatggcggccacgacaacaagcctccccgccccgccgcccacttcgccccaccggaagactccatggcctcgcatcagcagcagctcatgtaccagtcgcatcagcagcagcagcagatggcttccgccatggagggactctaccgcaccgtcagctccggcggcacggagtccaccgccgccgccgccggcaacagcctcctccggcagagcagctcccccgccggcttcctcaaccatcttaccatggacaacggatacgggaatatgctaagagcgggcatgggcggcggcggcggtggcggcgacccgcggctcaaggggcagctcagcttctcgtcgcggcaggggtcggtgatgtcccagatctcggagatgggcagcgaggacgaggagctcgccggcggcggcggcagcccggaggctggcagcaacggcggtggcgccgcacgcggcggctacggcggcgggtacgcgatggggtcctccgcctgggaggagccctcgccgccggcgacgtcgctcctcccggacagcagcctcccgtccaagcgcccccgcgacgacctgccgcggcagctcagcctcccggcggcgtccaagaacagcagcaagcccccctcctccgcctccgccgccgcgtcgccggagatggccgccatcgagaagttcctccagttccaggacgccgtcccctgcaagatccgcgccaagcgcggctgcgccacccacccccgcagcatcgccgagcgggtgaggaggacgcggatcagcgagcggatacggaagctgcaggagctcgtccccaacatggaaaagcaaaccaacactgctgacatgttggatcttgccgtggactacatcaaggagctccagaagcaggtcaaggtgttaaacgacagccgttccagctgcacctgctcggcgagcaagcagaagcacttcgccggctaa

SEQ ID NO: 12003 - DNA, 1649 bp, Oryza sativa
  Clone ID: TFbOSC400741j.C1.o8.fg
atggccgacgagctggtcctgcagagaagcgagcagctgagggagctctacgactctctcctctccggcgagtgcggccaccgagcgaggaggcccgtcgctgcactgttgccggaagatctcggggacacggaatggtactacgtcgtctgcatgacctacgccttcggcccccgccaagggtgcgtatggttgccaggcaaaagcttcgcaagcaatgaatttgtttggctgacaaacgctcagtctgcagatagaaaactattccatcgcgcgcttatagcaaagacaatcgtctgcgtgccatttatcatgcatggtgtccttgagctcgggaccactgatccgatttcggaggacccggctctcgtcgaccgtatcgcggcgtcgttctgggatacgccgccccgcgcggcgttctcgtcggaggcgggagacgccgacatcgtcgtcttcgaagacctcgaccatggcaacgccgccgtcgaagcgacgacgacgacggtcccgggggagccacacgcggtagccggcggcgaggtcgccgagtgcgagcccaactccgacaacgacctcgagcagatcaccatggacgacatcggcgagctctacagcctctgcgaggagctggacgtcgtgcgccctctcgacgacgacagtagcagctgggcggtcgcggatccctggtcgtcctttcagctagttccgacgtcttctccggcgccggatcaggcgccggcggcggaagctactgacgtcgacgacgtcgtcgtcgccgctttagacagtagctccattgatggatcttgcaggccgtcgccgtcgagttttgtggcgtggaagaggacggcggactcggacgaggtgcaggccgtgccgctcatcagcggagagccgccacagaagttgctgaagaaagctgtcgccggagccggtgcctggatgaacaatggtgacagcagcgcggcggcgatgacgactcaaggaagcagcatcaagaaccatgtcatgtcagagagaaggcgccgggagaagctcaacgagatgttcctgattctcaaatcagttgtcccgtccattcacagggtaatactaattactacttcatccgtttcacaatattcattaccatcaatatgaatatgggaaatgctagaatgacttacattatgaaacggagggagtgtaatttttttagaaccaaatttgtcaaggtggacaaagcatccattctcgcagaaacgatagcctacctcaaagagctggagaaaagagtggaagagctggaatccagcagccaaccatcgccatgtccattggaaacaagaagcaggcgaaagtgccgtgagatcactgggaagaaggtttctgcaggagcgaagagaaaggcgccggcgccggaggtggccagcgacgacgacaccgacggggagcggcgccattgtgtgagcaacgtgaacgtcaccatcatggacaacaaggaggttctcctcgagctgcaatgccagtggaaggaattgctgatgacgagagtgttcgacgcgatcaagggagtctccctggatgtcctctcggtgcaggcatcaacatcggatggtctccttggactgaagatacaagccaaggtcgtcatctcagcggctaagtag

SEQ ID NO: 12004 - DNA, 987 bp, Oryza sativa
  Clone ID: TFbOSC401695j.C1.o30.fg
atggcgctggaggcggtggtttactcccacggcggccatttcggcgggtacggcggcgggctgatgggcggcgccccggcggcgccgtgggatgtcttcgcagccgccggtggcggcgggagctgggacgatcccggcctgttcgcggcagaggcgtctcttgatgtgatccagggcgtggatgagtgggaggtggatcaggatcagcatgcttcttcttcttctaaggtggcggcgcggccgcctgtgaaggcggcggcggcggcggggaagagaaagaggcggcgggcgaaggcggcgaagaaccgggaggagatcgagagccagcggatgacccacattgccgtcgagcgaaaccgccgccgccagatgaacgagtacctcgccgtgctccgctccctcatgccaccttcctacgcccaaaggggtgaccaagcatccatagttgggggagcaatcaactacgtgagggaactagagcagctgctccaaacactggaggcgagaaggaccatcaaggaccacatcgacggcggcgccggcgagtctccctcccccttcgccggcttcttcgccttcccacagtactccaccgccacctccggccatggcggcggcggcgatgcacacagcaggatcgtcgtcaagcctgcagagacgacgactacggccgccggtggcggcgccggcgcggcgatcgccgacatcgaggcgagcatggtggagggccacgccagcgtcaaggtgcaggcgcggcggcggccgaggcagctgctcaagctcgtcgccgggctccaccagctagggctcaccaccttgcatctcaacgtcaccaccgtcgccgccatggccatgtactccttcagcctcaaggtggaggatggatgtaagcttgggtctgtggaggagattgcaactgcagtgcatgagattctggagaggatgcaggaggagcaggcttttgctgatgccaaaactagcttgtga

SEQ ID NO: 12005 - DNA, 1842 bp, Oryza sativa
  Clone ID: TFbOSC100243j.C1.o15.fg
atggaggctgatgaggatggtgccaatggcggaactggtgggacatggactgacgaggaccgagcgctcaccgccagtgtgcttggaacggatgcttttgcttacttgacaaaaggaggtggtgccatatccgagggccttgttgctgcatctttgccagtggacttgcaaaatagactccaggagcttgtcgaatcagatcgtcctggtgctggttggaactatgccatattctggcagctgtcgcgcacaaagtccggtgaccttgtccttggatggggggatggctcttgccgtgagcctcatgatggtgagatgggacctgctgcttctgcaggtagtgacgaggccaaacagaggatgcgcaagcgtgtgctgcagcgattgcactcagcattcggaggtgttgacgaggaggattatgccccaggcattgatcaggtgacagacacagagatgttttttctagcatctatgtactttgcatttccacgccgtgctggtggccctggtcaagtatttgcagcaggcgtgcccctgtggattcccaacactgaacgtaacgtatttcctgccaattactgttaccggggataccttgcaaatgctgcaggatttagaactattgtgctagttccatttgagaccggtgtacttgaactgggttcgatgcaacaggtagcggagagttctgacactctccagaccataagatctgtgtttgctggggcaattggcaataaagctggagttcagagacacgaggggagtggccctacagataagtcaccaggtttggcaaagatttttgggaaggaccttaaccttggccggccttcagcaggcccaggaactggcgtgtcagaggcagatgaaaggtcgtgggaacaaaggactggtggtgggagctcattgctccccaatgtccaaagaggtttgcagaatttcacttggagtcaggctcggggcctgaattctcatcagcagaagtttggcaacggtatattgattgtgagcaatgaagccacaccgcgcaacaatggaggagttgacagctctactgcaacacagtttcagcttcagaaagcaccaccacttcagaaactaccacagctccagaaatcacatcagctagtaaagccacagcaactagtgagtcagcaacagttgcagcctcaagctcccaggcaaatagatttcagtgctgggaccagttccaaacctggtgttttgactaaaaaaccagctggtattgatggggatggtgcagaggtggatggcttgtgtaaagacgaaggtccgccacctgcattagaagaccggcggcctagaaagaggggaagaaagcctgcaaacgggagggaagagccactaaatcatgttgaggccgagcgccagaggagggagaagctcaaccagcgattctatgcactgagagccgttgtacccaatatatcaaaaatggacaaggcatccctccttggtgacgccataacatacatcactgacctacagaagaagctcaaagagatggaggtagagcgagaaaggcttatcgagtctggaatgatcgatccgagggatcggacgcctcgacctgaggtggacattcaggtggttcaggatgaggttctagtccgagtgatgagccccatggaaagccaccctgtcagggccatcttccaagctttcgaagaggcagaagtccatgcaggggagtcgaagatcacaagcaacaacggcacggccgtgcattctttcatcatcaagtgccctggcgccgaacagcaaacgagggagaaggtgattgccgccatgtctcgcgtgatgaactcagggtag

SEQ ID NO: 12006 - DNA, 1842 bp, Oryza sativa
  Clone ID: TFbOSC22065j.C1.o1.fg
atggaggctgatgaggatggtgccaatggcggaactggtgggacatggactgacgaggaccgagcgctcaccgccagtgtgcttggaacggatgcttttgcttacttgacaaaaggaggtggtgccatatccgagggccttgttgctgcatctttgccagtggacttgcaaaatagactccaggagcttgtcgaatcagatcgtcctggtgctggttggaactatgccatattctggcagctgtcgcgcacaaagtccggtgaccttgtccttggatggggggatggctcttgccgtgagcctcatgatggtgagatgggacctgctgcttctgcaggtagtgacgaggccaaacagaggatgcgcaagcgtgtgctgcaccgattgcactcagcattcggaggtgttgacgaggaggattatgccccaggcattgatcaggtgacagacacagagatgttttttctagcatctatgtactttgcatttccacgccgtgctggtggccctggtcaagtatttgcagcaggcgtgcccctgtggattcccaacactgaacgtaacgtatttcctgccaattactgttaccggggataccttgcaaatgctgcaggatttagaactattgtgctagttccatttgagaccggtgtacttgaactgggttcgatgcaacaggtagcggagagttctgacactctccagaccataagatctgtgtttgctggggcaattggcaataaagctggagttcagagacacgaggggagtggccctacagataagtcaccaggtttggcaaagatttttgggaaggaccttaaccttggccggccttcagcaggcccaggaactggcgtgtcagaggcagatgaaaggtcgtgggaacaaaggactggtggtgggagctcattgctccccaatgtccaaagaggtttgcagaatttcacttggagtcaggctcggggcctgaattctcatcagcagaagtttggcaacggtatattgattgtgagcaatgaagccacaccgcgcaacaatggaggagttgacagctctactgcaacacagtttcagcttcagaaagcaccaccacttcagaaactaccacagctccagaaatcacatcagctagtaaagccacagcaactagtgagtcagcaacagttgcagcctcaagctcccaggcaaatagatttcagtgctgggaccagttccaaacctggtgttttgactaaaaaaccagctggtattgatggggatggtgcagaggtggatggcttgtgtaaagacgaaggtccgccacctgcattagaagaccggcggcctagaaagaggggaagaaagcctgcaaacgggagggaagagccactaaatcatgttgaggccgagcgccagaggagggagaagctcaaccagcgattctatgcactgagagccgttgtacccaatatatcaaaaatggacaaggcatccctccttggtgacgccataacatacatcactgacctacagaagaagctcaaagagatggaggtagagcgagaaaggcttatcgagtctggaatgatcgatccgagggatcggacgcctcgacctgaggtggacattcaggtggttcaggatgaggttctagtccgagtgatgagccccatggaaagccaccctgtcagggccatcttccaagctttcgaagaggcagaagtccatgcaggggagtcgaagatcacaagcaacaacggcacggccgtgcattctttcatcatcaagtgccctggcgccgaacagcaaacgagggagaaggtgattgccgccatgtctcgcgtgatgaactcagggtag

SEQ ID NO: 12007 - DNA, 560 bp, Oryza sativa
  Clone ID: TFbOSC7102j.C1.o1.gm
gcccaggaactggcgtgtcagaggcagatgaaaggtcgtgggaacaaaggactggtggtgggagctcattgctccccaatgtccaaagagctggtattgatggggatggtgcagaggtggatggcttgtgtaaagacgaaggtccgccacctgcattagaagaccggcggcctagaaagaggggaagaaagcctgcaaacgggagggaagagccactaaatcatgttgaggccgagcgccagaggagggagaagctcaaccagcgattctatgcactgagagccgttgtacccaatatatcaaaaatggacaaggcatccctccttggtgacgccataacatacatcactgacctacagaagaagctcaaagagatggaggatgaggttctagtccgagtgatgagccccatggaaagccaccctgtcagggccatcttccaagctttcgaagaggcagaagtccatgcaggggagtcgaagatcacaagcaacaacggcacggccgtgcattctttcatcatcaagtgccctggcgccgaacagcaaacgagggagaag

SEQ ID NO: 12008 - DNA, 840 bp, Oryza sativa
  Clone ID: TFbOSC400553j.C1.o15.fg
atggcgcagtttcttggagctcatggtgatcactgcttcacctacgagcaaatggatgagtccatggaggcaatggcagcgatgttcttgcctggccttgacaccgactccaattcttcttctggttgtctcaactacgatgtgcctccacaatgctggcctcagcatggccatagctctagcgtcaccagcttccctgatccagctcatagctatggaagctttgagttcccggtcatggatccgttcccgatcgccgatctcgacgcgcattgcgccatcccctaccttactgaggatctgatcagccctccacatggcaaccatccatcagcaagagtggaagaagctacaaaggttgttacaccagtggctaccaagaggaagtctagtgctgccatgacggcatcaaagaagagcaagaaggctggcaaaaaagatcctattggcagcgacgaaggcggcaacacctacattgatacgcaaagttctagcagttgcacctcagaggaaggaaacctggagggcaacgcgaagccgagctcgaagaagatgggtactagggccaaccgtggggcggcaaccgatccccagagtctctatgcaaggaagaggagagagaggatcaatgaaagattgaggatcctgcagaacttggttcccaatggaacaaaggttgacatcagtacaatgctggaggaagcagtgcagtatgtcaaatttttgcaacttcagattaagttgctaagctctgatgacacgtggatgtatgcaccaatcgcttacaatggagtcaacatcagcaatattgatctgaacatctcttctctgcaaaaataa

SEQ ID NO: 12009 - DNA, 885 bp, Oryza sativa
  Clone ID: TFbOSC400390j.C1.o14.fg
atggcagctcaggcaagcagcaagcgcggcatgctgctgccacgggaggcggtgctctacgacgacgagccctccatgccgctggagatcttgggctaccacggcaatggcgtcggcggcggtggctgcgttgacgccgattactactacagctggtcggggtccagctccagctccagctcgtcggtgctcagctttgaccaggcggcggtcggcggcagcggcggcggctgcgcccggcagctggctttccatcccggcggcgacgacgacgactgcgccatgtggatggacgccgccgccggcgccatggtcgagaacacgtctgtcgtcgccggcggcggcaacaactactgtcatcgcctgcagttccacggcggcgccgccggtttcggactcgcgagcccaggctcgtcggtcgttgacaacggcctcgaaatccacgagagcaacgtcagcaagccgccaccgccggcagccaagaagcgcgcatgcccgagcggcgaggcgagagcagcggggaagaagcagtgcaggaaagggagcaagccaaacaaggctgcttctgcttcttctccttctccttctccttctccttctccttctcctaacaaggaacaacctcaaagcgccgctgcaaaggtaagaagagagcggatcagtgagaggctcaaagttcttcaggatctcgtgcctaatggcacaaaggtagacttggtcaccatgctagaaaaggcgatcaactacgtcaaattcctccagctgcaagtgaaggttttggctactgatgagttctggccggcacaaggagggaaagcaccagagctctctcaagtcaaggacgccttggacgccatcctatcttctcagcatccaaacaaatga

SEQ ID NO: 12010 - DNA, 885 bp, Oryza sativa
  Clone ID: TFbOSC400498j.C1.o30.fg
atggctatggtggccggcgacgaggcgatgtcagtgccatggcacgacgtcggcgtcgtcgtcgaccccgaggcggccgggacggcgccgttcgacgccggcgccggctatgtcccatcgtacggtcagtgccaatactactactactacgacgaccaccaccaccacccgtgcagcacggagctgatccacgcgggcgacgctggcagtgcggttgcggttgcgtacgacggcgtcgacggctgggttcacgccgccgccgcagccacctccccgtcctcgtcatctgcgctcaccttcgatggtcacggcgccgaggagcacagcgcagtgtcgtggatggacatggacatggacgcgcacggcgccgcgcctcccctaatcggctacggcccgacggcggcgacctcctccccctcctcctgcttcagctccggcggctccggcgacagcggcatggtgatggtgaccaccaccaccccgaggagcgccgccgcctctggttcgcagaggcgggcacgcccgccgccgtcgccgttgcagggatcagagctgcacgagtactccaagaagcagcgcgccaacaacaaggagacacagagctcagctgccaagagccggcgggagaggatcagcgagcggctgagggcgctgcaggagctggtgccgagcggcgggaaggtggacatggtgaccatgctggacagggccatcagctacgtcaagttcatgcagatgcagctcagggtgctggagaccgacgcgttctggccggcgtccgacggcgccacgccggacatctcccgggtcaaggacgcgctcgacgccatcatcctctcctcgtcctcgccctcgcaaaaggcttctcctcctcggtcgggctag

SEQ ID NO: 12011 - DNA, 1698 bp, Oryza sativa
  Clone ID: TFbOSC401508j.C1.o13.fg
atgggccgcgccgcggcgcgccttcccgggtgcctctacctctgcctctgggcgccggcggcggccatcgccggcggcgtccagcccaaccatctgttctgcttggacgcgtggatcggcggcggtggcggcgtcggcgccggcggaggcggtggtgaccgcgcgctggagctgttcgaggcgtacaggggggcgctctgcgccgccgtgagcgggtgcgtgccgggttgggcgtacaaggagggcgccgcgtgcatggagctgacggagcacgacctggcggcgtcggcgtcgctgcaggtgcagcagcagttctaccacgaaaccggcaccaagatggcggtgttcatgggatgcgacagcggggagatcgaggtcgggctgtcggccgcctcggcgacggcgacggcggcggtggtgggtgagatgcagcagtcgatactggaggagctcctccagatgccgccgccgccgccgtcgccctcgtcgtcctcgctgctgtcgctgtccgtcgggagcccggaatactcctcgctcgttcgctcgatggcgacgtcggtcggtgcgtccgccgccgcggatccgtccccggtgcacggcggcctgctcgcgcctgtctacggcgagttcccgggctccgacgacgacgccgcgatggcgcaggcgatgctcgcggtcatctccacccccgcgcctccgcctccgctgtggcgtccgccccggcgccgcgcgcgctccagctcgtcgccgcgcagggcgacggcgttcaaggcgtacaacgccgcgctctcgccgagggcgcggccgcggccgggcgcgccggggcagaggatgatcaagacgggcatctcgctcctcgccagcgtgcacatgcaaacgcgcagccgagagctcgccgcggcgcgccaaagagacactcacgccgcgccgccgccgccgccaccgccgccaccgcccagcagcagccagcttcaccacatgatctcggagcgccgccggcgagaacggatcaacgacagcttccagacgctcagggcattgctccctctccctcccgattcaaagaaagacaaggcggctattctcgccagcacgacggagtacatggacaagctgatatcgcaggtgtccgagctgggggagaagaaccggcagctggaggcgcagctcgccgcgcgttccggcgaggcccagtggccggctgcaagcggcggcggtggcggtgagtcgtcgtcggagagagtgcaggtcgacgttgtcatcgccggctcgtcggcgtcgaccgatcagcctcgggaggtgagcatcagggtgacggtgcgcgctgagtgcgacgtgtcggagctcgtcgtcgccgtgctcgcgcggctgagagagatgggtcgcttcgccgtggtgtccgtcgacgcggggcgaaggagcagctcgtttgcacaagccagccttacgttccgtgtcatgaattacaaatacaaaacaaattcagtcaccgtggggaaatctcagctaattgtccatactgaaaagtacaaggccggcgacgtctgcgacgagacatcgctgaaggaagccgtggcgaaggccgtggacggcgcggctttcttcaagtttcagagaactccttttatgcattcaaaaaactatgaccagtctgatgatcttgagggggaagctaagttgctaccgcttgattcttga

SEQ ID NO: 12012 - DNA, 288 bp, Oryza sativa
  Clone ID: TFbOSC1723j.C1.o7.gm
atgcccgcatccacggcacagaccgtcccgccctgctccacggccgctgatgtgcgcatcaagtttgtgatgtcgcacatcgtcttcctcctcgctacagccccacccttggccgggcagcgcagcaaggcagagccgctggagtactggagtccgatttggttgcaacagcgacaggggctggggctgagatggttccatgcatggatgctgcggatggaaggtccgggagatgtggaacgaagccacaaagcgcggcagggagtaatgccggccgagcgtgattga

SEQ ID NO: 12013 - DNA, 1206 bp, Oryza sativa
  Clone ID: TFbOSC400822j.C1.o1.fg
atgggagacgcgctgtgtgatcagctcctcttggtggacagcgacggcggcgagttcatcccccaccacgccgacgccgacgccgacgacctcttcaccatcctcgagacgtgggagggctgcgccaacgtcgtcgccggcggcgcccccgcgaccacgacgacgttaggtagtcctattgccgccgctgcctgcatctccggcgttgttggtgggcagaatcatcagcagctgccggaacctgccgccgcgaagaccgtgccagccaccaataacaagcggcgggaggaggaggtggcggaccgtgacggcgacggagacgacgacgacggttcgccgcagaagaggcgcaagtgctgctcgccggagtcttcgacgacggacgtggcggcggcgacgacgcccaagacggcgcacatcgccgtggagcgcaaccggaggaagcagatgaacgagaacctcgccgtgcttcgctccctcatgccatgcttctacgtcaagcggggagaccaggcatccatcataggaggagtggtggactacatcaaggagctgcagcaagtattgcactcgctggaggccaagaagcagcgcaaggtctacaccgaccaggtgctcagcccacggccgccggcgacggtggcggcgtcgtgctgcagcccgcgcccaccgcagctcagccccaggctgccgccgcagctgctcaagtccacgccgccgctcagcccgcggctcgccgtgccgatcagccccaggacgccgccgacgcccggtagtccctacaggctcctccggctgccgccgccgccgcccccggcgtccggctccaactacgcgtccccggcgatgacgccgacccaccacgagacggcggcgccgtcgctggacgccatcgccgccgagctgtcggcgtacgccagcaggcaggcgctgggcggcggcctcctcctccccgacgtgaaggtggagttcgccggcgcgaacctggtgctgaagacggtgtcgcagcggtcgccggggcaggcggtgaagatcatcgccgccctggagggccgatcgctggagattcttcacgccaagatcagcaccgtcgatgacaccgccgtcaactccttcactgtcaagtatatctttgggcagattggaattgagtgcgagctcagcgctgaagagttggtacaggtgattcagcaaacgttcacatga

SEQ ID NO: 12014 - DNA, 1119 bp, Oryza sativa
  Clone ID: TFbOSC400032j.C1.o27.fg
atgccggcggcgggggggctggcgaggtacggctcggcgccggggtcgctgctggcgtcgatcgccgactcggtgatccggggccgcggggttggggttgtcgatcagctgcatcatcatcagcatcagcatcagcttccgccgccgccgccgccgcagcagcagcagatggtggggaggtacttctccgcggagtcgtcggggctcacctcctgcgagtccagctgccggacgacgacgacgacgtccacagcggcggcggccgatgtcgggcggcacccgctcgagcgcgcgtacggcggctccggcgagatccacgtcgacgcctcctccgccgccgtcccgctcttccgccacagcagctcccccgccggcctcctctcccgcctcatggctgacccgcacggcaatggcatggccgcgacgagagggatgggcggctactccggcggcggcggcgacgccggcgcgatggcgcacaggaggctgagctcgcagtggagcttctcgcggcaggacctgccgcagatatcggagatgggcggcctcatccccgacatcggggagagcatcgtcaccggcggcggcggcaacagctccagcgatggcgccggccacggcgcgcagtcctcctccttcctctcctccaggaacttctccatgagctcctgggacgacaccaactccatcatgttctcgcccccgagcagcagcaagaaggcccgcgtcgccgccgccgccgccggcgaccacggcgacgacatggtctccagcttcagcaacatcgactcccagtttggcttgtcgaagcagtcgtcgctggagatggccggcatggatgacttcttgcagctccagccagactccgtcgcctgcagggcccgggcaaagcgcggctgcgcgacgcacccgcggagcatcgctgagagggagaggagaacgaggattagcaagaggctgaagaagctgcaggatctcgtgccgaacatggacaagcaaacgaatacatcagacatgttggatattgctgtaacctacatcaaggagcttcagggccaagttgagaagctaaaacatgaccaagcaaactgcacttgctcaggcaagcacgattgctga

SEQ ID NO: 12015 - DNA, 1281 bp, Oryza sativa
  Clone ID: TFbOSC400853j.C1.o7.fg
atggacgccgagatggccatgggcgagagcttcgcctactactgggagacgcagcgctaccttgagtccgaggagctcgacagcatgtacctgccgacgcaggatgactccaactacgagtcgagctcgccggacgggtcgcactcgtcgtcggcgccggcgccggcggccgtgggcggggacgcagccgccgcggtggcgggtagcggtggcgggatgacgacgatgatgatgggcggcggcggcggcggtggcgacgacgccggtggcgcgaacaagaacatcctcatggagcgcgaccgccgccgcaagctcaacgagaagctctacgcgctccgcagtgtcgtgcccaacatcaccaagatggacaaggcgtcgatcatcaaggacgcgatcgagtacatccagcgcctgcaggcggaggagcagcagatgctccgggaggtcgccgcgctcgagtccgccgccgcggcgagcgccgccccggccgcggcgaacccgttcgccggcctcggcgccgacgaggaacacgagtacggccaccaccacccctcgtcgtcgtcggagcggacgaagaaggtgaagcgggcgctgtccgtgtcgtccatcagcgacgccctgctcgccgcggcggcgccggcgccgccggtggagatccaggagctgcgcgtgtcggaggtgggcgacagggtgctggtggtgagcgtgacgtgcagcaagcgccgcgacgccatggcccgggtgtgccgcgccctcgaggagctccgcctccgcgtcatcaccgccaacatcacctccgtcgccggctgcctcatgcacaccctcttcgtcgaggtagatcacatggatagtgtccaaatgaagcagatggtggaggctgctctctcccagcttgtggcgaccggcaggtgtggaagtgcttcacatgactacttgctatttgtcgaccacggcgccgtcgtcaatgtccgatactgtgaattcttcctgctgtgcagctccagaaccctcgccaatctccctccccggctctctttggaggctgtggcggcgcatacaccgatgccgccgttaactcgagttgaggtgggagcaaccgggacaggggtgcgcttcatgtgggagtcattgccctcgctgatgaggatggtgccgattgggtcattgaagccagcggccaatgtcagagcttgtgcggaggtggctgcaacatcgggggagtcgaacctcacgtgcagccagcaacaagtccacctccgtctcaagctttcttgcgcttaa

SEQ ID NO: 12016 - DNA, 1017 bp, Oryza sativa
  Clone ID: TFbOSC418099j.C1.o14.fg
atggatgactcgagcttcttcatgcagtgggcgatggacacgctgcaccagctcccctccgactccaccgccgccgcagcctacgccactgacgtcgccggcgacagcggcgccttcccgtcgctgcaagctctccgcaacgcctcggcggccggcggcggcggcggattccgggacctgacagtgcaggtggaccaggtccaccgcgccaacagctggagctccagcgacagcccaggcggcggcgctgccacggccgccgccgggtggtccccgcatgtcaccggcggcggcggcagggggcacaggccgatgagctggaacttcagcgcggcgtcggcgcagccgaccaccgaggatagcggcggtggaggcggcggcggagtagttccggcgccgctgcaggcgatggagactaccgcgacagcgagagcggcggtgaagaaaggaggaggcggcgggtcgtcgtcgtcggcggcggcgccgggatacgtgcaggaccacataatcgcggagcggcggcggcgggagaagatcaaccagcggttcatcgagctctccaccgtcatccccggcctcaaaaagatggacaaggcgaccatcctcggggacgcggtgaagtatgtgaaggagttgcaggagaaggtgaagacgctggaggaggaggacggcggcgggcggccggcggccatggtggtgaggaagtcgtcgtgctccggccggcagtccgccgccggcgacggcgacggcgaagggcgggtgccggagatcgaggtgcgggtgtgggagaggagcgtgctggtgcgggtgcagtgcgggaactcgcggggtttgctggtgaggttgctgtcggaggtggaggagctccggctgggcatcacccacaccagcgtcatgccattcccggcctccaccgtcatcatcaccatcaccgctaaggcaagctcgctctctaaccatcctgcattgctttgcttatatatatgcatcaaattaccatgtgtaatttccagctag

SEQ ID NO: 12017 - DNA, 2067 bp, Oryza sativa
  Clone ID: TFbOSC401909j.C1.o20.fg
atggaggcgttcatggcctccgccgacctcccggccttcccgtggggggcggcctccaccccgccgccgccgccgccgccgcctcaccaccaccaccaacagcagcagcagcaggtcctgccgccgcctgcagcagctccggcggcggcggcgttcaaccaggacacgctgcagcagcggctgcagtcgatcatcgaggggtctcgggagacgtggacgtacgccatcttctggcagtcctccatcgacgtctccaccggcgcctccctcctcggctggggcgacggctactacaagggctgcgacgacgacaagcgcaagcagcgctcctccacccccgccgccgccgccgagcaggagcaccgcaagcgcgtcctccgcgagctcaactccctcatcgccggcgcaggcgccgcccccgacgaggccgtcgaggaggaggtcaccgacaccgagtggttcttcctcgtctccatgacccagtccttccccaacggcctcggcctccccggccaggccctcttcgccgcccagcccacctggatcgccaccggcttgtcctccgccccctgtgaccgcgccaggcaggcctacaccttcggcctccgcaccatggtctgcctccccctcgccaccggcgtcctcgagctcggctccaccgacgtcatcttccagaccggggacagcatccccaggatccgcgccctcttcaacctcagcgccgccgccgcctcctcctggcccccccaccccgacgccgcctccgccgatccctccgtgctctggctcgccgacgcgccccccatggacatgaaggactccatctccgccgcagacatctccgtctccaagccaccacccccgccgccgcaccagatccagcacttcgagaacgggagcaccagcacgctcacggagaatcccagcccgtcggtgcacgcgccgacgccctcgcagccggccgcgccgccccagcggcagcagcagcagcagcagagcagccaggctcagcagggccccttccgccgggagctcaacttctccgacttcgcgtccaacggcggcgccgcggccccgcctttcttcaagcccgagaccggcgagatcctaaacttcggcaacgacagcagcagtggccggaggaatccgtcgccggcgcccccggccgccaccgccagcctcaccaccgcgccggggagcctgttctcgcagcacacgccgacgctgacggcggcggcgaacgacgccaagagcaacaaccagaagaggtccatggaggccacctcccgcgccagcaacaccaacaaccacccggcggcgacggcgaacgaggggatgctgtccttctcgtcggcgccgacgacgcggccgtcgacggggacgggcgccccggccaagtcggagtcggaccactcggacctggaggcgtcggtgcgggaggtggagagcagccgcgtggtggcgccgccgccggaggcggagaagcggccgcggaagcgcgggcggaagccggcgaacgggcgggaggagccgctgaaccacgtggaggcggagcggcagcggcgggagaagctcaaccagcgcttctacgcgctgcgcgccgtggtgcccaacgtgtccaagatggacaaggcgtcgctgctgggcgacgccatctcctacatcaacgagctccgggggaagctcacggcgctggagacggacaaggagacgctgcagtcgcagatggagtcgctcaagaaggagcgggacgcgcggccgccggcgccgtcgggcggcggcggagacggcggggcgcggtgccacgcggtggagatcgaggccaagatccttgggctggaggccatgatccgcgtgcagtgccacaagcggaaccacccggcggcgcggctgatgacggcgctgcgggagctggacctggacgtgtaccatgccagcgtctccgtggtcaaggacctcatgatccagcaggtggccgtcaagatggccagccgcgtctactcgcaggaccagctcaacgccgcgctctacacccgcatcgccgagcctggcaccgccgcccggtaa

SEQ ID NO: 12018 - DNA, 834 bp, Oryza sativa
  Clone ID: TFbOSC400825j.C1.o44.fg
atgctgcagctgagcgagctgcaccggcaggccggcggcggcgaggaggacgggagcggcgcgttctcgccgctgccgctgttcacggaccggacgaacgtgccgccgcgggaggagatggagggcggcttcaagtcgcccaatgccgccgccggaggcgagcacgcgctgttcaacgggttcggcgtgcacggcggcagcggcggcgccgggcagccgccgttcggccagcttcggagggagaggatagcggagcggatgaaatcgctgcaggagctagtcccaaacgccaacaagacggacaaggcgtcgatgctggacgagatcatcgactacgtcaagttcctgcagctccaagtcaaggttctcagcatgagccggctcggcggcgccgccggcatggcgccgctggtggcgagcatgtcgtcggaggggaacagcaacgggagcagcaatggcggcggtggcaaggcgagcaagggcggcaccggcggcgagggcggcggcggcggcggaggaggaggaggaggtggcaccggtggtgggatgcgggtgacggagcagcaggtggcgaagatgatggaggaggacatgggcacggcgatgcagtacctgcaggggaaggggctctgtctgatgccgatctccctcgcctccgccatctcgtcggcgacctcatcggcgtcgctcctctcccgcccgtccatccgccacgccggcgcgccgccgcagacgatgctcgatgccgccggcccgacctcgccggcggcgatgtctaacggcgatgacccacggcacgcaaaggcggacggcggcgccggcgggacgcaatga

SEQ ID NO: 12019 - DNA, 1104 bp, Oryza sativa
  Clone ID: TFbOSC412868j.C1.o5.fg
atgcagccgagcagccgcgacacggtcgccggcggcggcggcgaggggacgcaggatgacttcttcgaccagatgctctccacgctgccgtcggcgtgggccgacctggggggcggcggcggcggcgcggcggggaagtcgccgtgggaggtcgatccggcagcggcggcggcggcgtcgcaggtgttcgacgagtcggcgctgctcgcgtcccgcctccggcatcaccagatcggtggggctggcggcggcgggggagagaagccggtgatgctgcagctgagcgagctgcaccggcaggccggcggcggcgaggaggacgggagcggcgcgttctcgccgctgccgctgttcacggaccggacgaacgtgccgccgcgggaggagatggagggcggcttcaagtcgcccaatgccgccgccggaggcgagcacgcgctgttcaacgggttcggcgtgcacggcggcagcggcggcgccgggcagccgccgttcggccagcttcggagggagaggatagcggagcggatgaaatcgctgcaggagctagtcccaaacgccaacaagacggacaaggcgtcgatgctggacgagatcatcgactacgtcaagttcctgcagctccaagtcaaggttctcagcatgagccggctcggcggcgccgccggcatggcgccgctggtggcgagcatgtcgtcggaggggaacagcaacgggagcagcaatggcggcggtggcaaggcgagcaagggcggcaccggcggcgagggcggcggcggcggcggaggaggaggaggaggtggcaccggtggtgggatgcgggtgacggagcagcaggtggcgaagatgatggaggaggacatgggcacggcgatgcagtacctgcaggggaaggggctctgtctgatgccgatctccctcgcctccgccatctcgtcggcgacctcatcggcgtcgctcctctcccgcccgtccatccgccacgccggcgcgccgccgcagacgatgctcgatgccgccggcccgacctcgccggcggcgatgtctaacggcgatgacccacggcacgcaaaggcggacggcggcgccggcgggacgcaatga

SEQ ID NO: 12020 - DNA, 576 bp, Oryza sativa
  Clone ID: TFbOSC400803j.C1.o1.np
tactaaagtagagcaagcaacagaggtttcatctcagcaagagaggatatcaatggaggaggacaaccaaaagagttgctccaaaatgcaaagcaaggaagattcttctgatggtgatggtactaaagaagattatgttcatgtccgggcaaagcgaggccaagccactaatagccacagccttgcagaaagactgaggagaaaaaagataagcgagaggatgaagctgcttcaagatcttgtcccaggctgcagtaagatcactggtaaggcagtcatgcttgatgagataatcaattatgtacagtcactacaacgtcaagttgagtttttgtcgatgaaactcgcaactgtcaaccctgagcttagctttgatattgagcagattctatcgaaacaaagcttcagtgttctctctagagtttacttgagccgtcttaacctgaaaacatcacctttttatgcaattttttatacaacaaaaatcttgaaacatagttttctgctgatattcctcgaataaatagaggaatggcaatatgcacgtcctctagaagaactgaaactaaacaaact

SEQ ID NO: 12021 - DNA, 1056 bp, Oryza sativa
  Clone ID: TFbOSC900340j.C1.o13.fg
atggcactggaggccgtgctgctctcgcgtggtgatctgtttggtcgtcgtcgttgcgccatggaaggaggaggaggtggttggagcagcccgttcagtggcttcgagggagtgatggatttggacggcggcaactgggacgccgccgcgtgctcatcgatgcttctgcatggcttccaggagctagagatccctgcggccgccgctgctgctgctgccatggcgccgccgccgccgccggtagagcctgctaattgcgcggagaatgcaggaggggttggtggtcatcaggaggatcaggctgcggtggcggcagcggcgacggcggtgcagtcggggaggaggaagcggcggcgggcgagggcggcgaagaacaaggaggaggtggagagccagcggatgacccacattgccgtcgagcgcaaccgccggaagcagatgaacgagtacctcgccgtgctccgctccctcatgccgccgtcctacgcgcaaaggggtgatcaggcgtccatcgtcggcggcgcaatcaacttcgtcaaggagctggagcagctgctccagtcgctggaggcgcggaagagttcccggcaatgcgcggcccacgacgcggcggcagcggcggcgccgttcgccagcttcttcaccttcccgcagtactcgatgagcgccgccgccgccgcggcgccggtggctcccgttgtgaacgagttgcacggccgtgacgacggcggagcaggcaccgccgaggccgaggcgtcagggtcgaagccgtcggcggtggccgacgtcgaggtgaccatggtggagagccacgccaacctgcgggtgctgtcacggcggcggccgaggcagctgctccggctggtggtggcgctgcagggccaccggctcaccgtgctccacctcaacatgaccagcgccggccacatggttctctactcgttcagcctcaaggtggaggatgattgccagcttacgtctgtggatgagattgcaaccgccgctcatcagatcattgagaagattcaagaagagcagggctgtagtttagattag

SEQ ID NO: 12022 - DNA, 747 bp, Oryza sativa
  Clone ID: TFbOSC400376j.C1.o32.fg
atggagcagctgttcgtcgacgacccagccttcgcgagcagcatgtcgtcgcttgaggcggacatcttctccggcgccggccagctgccgtcctcgccgtggctggacctagacctcgacgacgatgtccaagacctctccatggcgccgacgacggcgaacgcggtgtcctccggctacggctccggcggatccggctcccacaggaagctcagccacaacgcctacgagcgcgaccgccggaagcagctcaacgagctctactcctccctccgcgctctcctccccgacgccgatcacactaagaagctgagcatcccgacgacggtgtctcgcgtgctcaagtacatacccgagctgcagaagcaggtggagaatctggagaggaagaagaaggagctgacgacgacgagcaccaccaactgcaaaccaggagtgttggggagccagctgatgagcgagggcatggctcccatcgtttcggctacctgcatcaatgacatggagatcatggttcaggtcagcttgttgagcaatgtggcgggttcagttcttcctctctccaagtgtatcaaagtactggagaacgaaggtcttcacttcatcagttcatcgacttcctccggatttgggaacaggacattctacagtatccatcttcagagaagtgaaggaacgatcaacgaggagtgcccagcattttgtgaaaggttggagaaagtcgtcaggaacaaagcaaagctttaa

SEQ ID NO: 12023 - DNA, 1293 bp, Oryza sativa
  Clone ID: TFbOSC19437j.C1.o1.fg
atggagcttgacgaggagtccttcttggatgagctcatgtcgctgcggcgtgatggatcggcgccgtggcaggcgccgccgtacccgggtggcggcggcggcggcggcggtggcggcatgatgatgagtgacctcctcttctacggcggcgacggcggcagcgcggaggcgaggggcgggatggacgcgtcgccgttccaggagctggcgtccatggcggcgccgccgcctcagcatccgcacgaggagttcaacttcgactgcttgagcgaggtctgcaacccgtaccgcagctgcggcgcccagctcgtcccctcggaggcggctagccagacgcagacgcagctcactcctctccgcgacgcaatggtggcggaggaggagacgagcggcgacaaggcgctgctccatggcggcggcggctcgtcgtcgccgacgttcatgtttggaggtggcgccggagagagctcggagatgatggccggcatcagaggcgtcggcggcggcgtccacccgcggagcaagctccacggcacgccgtcgaagaacctcatggccgagaggcggcgtcgcaagcggctcaacgaccggctgtccatgctccggtccatcgtgcccaagattagcaagatggacaggacctcgatccttggtgacaccatcgactacgtgaaggagctgacggagaggatcaaaaccctcgaggaggagatcggcgtcacgccggaggagctcgacctgttgaacacgatgaaggattcctccagcggcaacaacaacgagatgctcgtgaggaattccaccaagttcgatgtcgagaaccggggcagcgggaacacgaggatcgagatatgctgcccggcgaaccccggcgtgctgctgtcgacggtgagcgcgctggaggtgctggggctagagatcgagcagtgcgtcgtgagctgcttcagtgactttggcatgcaggcctcctgcttacaagaggacgggaagaggcaagttgtcagcaccgacgagatcaagcagacattgttcaggagcgcaggctatggcggaaggaattatagtagatcgagtaccatttatgagttcatattcatcagcagtggtagtacctcgtttctgaacacaccagagagcaaattaaagatttgctcaagtattgtaagctttgcatttgtgaatcggtatgggaaccggccgtgtgatttgtcgaacattggatttgaattaaacgccaagaaatggttcatctggttttgtcccgagctatatatcatatgcgcgcgcatatga

SEQ ID NO: 12024 - DNA, 648 bp, Oryza sativa
  Clone ID: TFbOSC401716j.C1.o98.fg
atgcatgacccacgcggcttccccatccacccgcagccgtaccacctccaccccacggccggcggcctcggcgagggcaggatgcggggcggcgggcggcggcgccccggcgccaagctctccaccgacccgcagagcgtggcggcgcgggagcggcggcaccggatcagcgaccgcttccgcgtgctccgcagcctcgtgccgggcggcagcaagatggacacggtgtccatgctggagcaggccatccactacgtcaagttcctcaaggcgcaggtcaccctgcaccaggccgcgctcgtgcagcacgaggagggctgccagcacgccgacgtcgccgcggcgttctccgccgccgacgccgatctggcccttgagctgaaccatcgccacggcggcgccggcgatgatgacgccgggatgacgacgctggagatggcgccgatgcaagaggcggtgggctacggcgacggcccggctcatcagatgatgcagcaagcgctcgatccagcggggcagctgatgatgggcggcgctcatcagctgcctcctttgccttgctgtgtcttcgtccaggagactgacccctcgtgctactcggtgtgcaatgtccacggtgaggagtctggtgcgcaaggatcttattag

SEQ ID NO: 12025 - DNA, 897 bp, Oryza sativa
  unsure (1)..(897): unsure at all n locations
  Clone ID: TFbOSC400780j.C1.o2.gm
atggcgcggcggtgcgggaatangcactccttcgtcgtcgcctttttgtcgtgctgcccctgtccaccggtcgccgacctcgacctgctcgagagctgcgtcacgcaggcggcggcgccccccgtcacggctccggcgaccagggcggagcggaggaggaagaggccgaggccgcgcccgcgcgccgcgccgccgccggagaagcgcaagaagcccgaggaggccgagaaccagcggatgacgcacatcgccgtggagcgcaaccgccgccgcctcatgaacgaccacctcgcctccctccgatcgctcatcccctccaactacatccctcgaggtgaccaggcgacggtggtgggcggggcgatcgactacgtgaagcagctggagcagcagctggtggcgctgcaggcggcggcggcggagcggagcggcgtcggcgtggtggcggcggcggccaccgcggcgtcggacggcgtgttcgtgtccccgcagtacacgagctactccgaagcgcgcggcggcagcggcgtcgacgtggaggcgacggccgcggtgggggggcacgtgcgggtgcgcgttgccggcaggcggtggaccgggcggctcgtgcgcgccgtcgccgccatggaggacctccgcctcaccgtgctgcacctcgccgtcacctccgtcggacatgacgccgtcgtctactgcttcaacctcaagatggaggaaggatgcgagatggcgacggcggacgaggtggcgacggtggtgcaccagatcttcgcgtgggcccaagaccacggcagcagtggtcactcctggcagtctcaggctcatgccggcctactgctcgaggaagacctctactgtagcaagagggagagtgtaaaagtgcagagtagtgtgtag

SEQ ID NO: 12026 - DNA, 201 bp, Oryza sativa
  Clone ID: TFbOSC29119j.C1.o1.fg
attaggggttatgtcgtagttgctgtgccttgtaaggacaaggctcctttcgtgaccaaggctgagaagctcaaggctgagtacaccaagaagattgacgcctacaacaacaagcaggcaggaggcccggctacctcaggcgactctgacaagtccaagtccgaggtgaacgacgaggacgagggcagcggtgacgagtga

SEQ ID NO: 12027 - DNA, 225 bp, Oryza sativa
  Clone ID: TFbOSC16612j.C1.o1.fg
gtgagcaaggctgcaggggagaagtggcgagctatgtctgagcaagagaaggcaccttatgtggacaaggctggccaaaagaagcaggactacgagaagaccaaggccaacttcgataagaaggagagcacaagctcaaagaaagctaagacccatgatgatggagaaggctctgacaagtccaagtctgaggtcgacgatgaccaggatggtggtagcgatgag

SEQ ID NO: 12028 - DNA, 612 bp, Oryza sativa
  Clone ID: TFbOSC400021j.C1.o5.fg
atggcggggaaatccggcgcacgcacgaggaagcgcgtggaggcgacggattccgccgtcctgaagcgcgcgcgcgacggcagcgccttcacccgctgcgaggcttgcggcaagagcgtctccgtggtcctcatcgacatgcacaactgcagcctcgacgacaagatccgcatcagcctagaggctcaggtggtggagcaggccgtggaggtggcagcgagcaagaagaagagcggcaagaacaacaacaacaatggcgagggggccaaaaagggcaagcgcccacccactgcctttttcctcttcatgagtgacttcaggaaggagtacaaggcggagcaccctgacaacaagagcgtctccgctgtcgccaaggaaggaggggagaggtggaaatccatgtctgacgaggacaagaagccttacttggacaaggctgcagagctcaaggccgagtaccacaatggcgagcgcagcgacgagaacaatgttggtggcaacgcaggcgagcaggaggtagatcagccacccaagaaaggcactgatgaagacgaccaagaagatgaagatggtgcagaggaagagaagaacgagctagacgacgacatctag

SEQ ID NO: 12029 - DNA, 438 bp, Oryza sativa
  Clone ID: TFbOSC423122j.C1.o6.fg
atgaagggcaaggccgacgcctccaagaagggcgagggcaggctcaaggccgccggcggcgccgggaagcggaagaaggccgccgctagcggcaagccgaagcgcccgccgtctgctttcttcgtcttcatgtctgagttcaggcaggagtaccaggcagcgcatcctgacaacaagagtgtcgccgccgtgagcaaggctgcaggggagaagtggcgagctatgtctgagcaagagaaggcaccttatgtggacaaggctggccaaaagaagcaggactacgagaagaccaaggccaacttcgataagaaggagagcacaagctcaaagaaagctaagacccatgatgatggagaaggctctgacaagtccaagtctgaggtcgacgatgaccaggatggtggtagcgatgaggaaaatgaggacgatgaagagtaa

SEQ ID NO: 12030 - DNA, 525 bp, Oryza sativa
  Clone ID: TFbOSC408633j.C1.o3.gp
atgaaaataagctgaaatttctcaagcttgctgagttataaaattgaagcagaataccccaatccatacgaaatgttacgcctaaaccagaccaaacgcaacagataacttcgcaccaatcaccaaagctactgttttctccattggattcagagaagagaatcctcgtcagcgttaggaccaccaccaccatcgccatccatggcgactaggacgaggccgaggaggacgtacagggggaggcgtcgccgccgccgccgccgctggccgccgccttggtgtactcctccatgtccctcttgtacgccgccatggcctccgcggccttgccgttccacgcctgcttctccgcctccccgagctccttccacttcaccgacacgagcgcggtcagcgtggagctcgccacgccggggcgctcctccgccagctgccgcctcgcctccttgctgaacagcaggaacgacgacgccggcttcttgggccggttcgggtcggcggcagcggcggcgccgcccaccttct

SEQ ID NO: 12031 - DNA, 2055 bp, Oryza sativa
  Clone ID: TFbOSC400426j.C1.o30.fg
atggacctagggtttctccctgatgcggtagatgcagtaaatggagctttgaagctaaactggaaaatagaatggaatcctctgagctttgaagctaaaatggaaaatggattggaatcctctgtgagtttcgaagctaaactggaaaatagattggaatcctctaatcctggccagtttaaagtgtattctggaggtcttgcatggaagagacagggtggaggaaagaccattgagattgagaaatctgatttaacgtcggtgacatggatgaaagtccccagggcctatcagcttggagtcaggaccaaagatggcctgttttacaagtttattggcttccgtgaacaggatgtaagcagtctgaccaatttcatgcaaaagaatatgggcctctcaccagatgaaaaacagctttctgttagtggtcaaaactggggagggatcgatataaatgtcacactctccattgtaggaaatatgcttacctttatggttggttcaaagcaagcatttgaagtgtcgctggcagatgtctcacaaacacaaatgcaaggcaaaacagatgttctcttagagtttcatgttgatgatactactgggggcaatgagaaagattcgcttatggatttaagctttcatgtacctacttcaaatactcagtttcttggagatgagaatcgcactgcagcccaggtcctatgggaaacaataatgggtgttgctgatgttgattcttctgaagaggcagttgtcacctttgaaggaattgctattcttacaccaagaggacgttatagtgttgagcttcatctgtcatttttgcgtctccaaggacaagctaatgattttaaaatccaatatagcagcattgttcgcctttttcttttgccaaagtcaaacaaccctcatacatttgtggttgtcactcttgatccaccaatccgtaaaggacaaacactgtatcctcacattgtcattcagtttgagacagaggcagtagttgaaagaaatctggcattaactaaagaggttctggctgaaaaatacaaggacaggctggaggaatcttacaagggtctgatacatgaggtattcaccaaagttcttcgtggtctatctggtgctaaagttacaaggccaggttctttcagaagttgccaagatgggtatgcagttaaatcgtctctcaaagctgaagatggactgttgtatccacttgaaaagggcttcttctttctgccaaagcctcccaccctcattctacatgaagagattgagtttgttgaatttgaacgtcatggtgctgggggtgccagtatttcatcacactatttcgacctcctagtcaagctgaaaaatgatcaagaacatctcttcagaaatattcaaaggagtgaataccataacctcttcaactttatcaatggaaaacacttgaaaataatgaaccttggagatggtcaaggcgcaactggtggggttacagctgttctacgagacactgatgatgatgctgttgatccacatctagaacgaattaaaaatcaggctggggatgaggaaagtgatgaagaggatgaagattttgttgcggataaggatgatagtggatcacctactgatgattctggtggggaggattcagatgctagtgaaagtgggggtgaaaaagagaaattatccaaaaaggaagctagtagttcaaagccacctgtgaagaggaagcctaagggaagggatgaagaaggttcagacaaaagaaagccgaagaagaaaaaggatcctaatgcccccaaaagagcaatgacaccattcatgtacttctcaatggctgagcgaggaaatatgaagaataacaatcctgatttgcctacaaccgagattgcaaagaagctcggggagatgtggcaaaagatgacaggcgaagagaagcaaccttacatccaacagtctcaagtcgacaagaaacgatacgagaaggaatctgctgtctaccgtggcgcagccgccatggacgtggactctggctccggcggcaacgagtctgactag

SEQ ID NO: 12032 - DNA, 441 bp, Oryza sativa
  Clone ID: TFbOSC900350j.C1.o14.fg
atggcgactccaggtgagttttgttggtggttttgtgcttgtgctcgcgggtggtttcggctctcggtgaggaagaccaaggcggagaaggacccgaacaagccgaagaggccaccgagcgcgttcttcgtgttcatggagcagttcaggaaggactacaaggagaagcaccccaacgtcaagcaggtctcggtgattggcaaggctggtggtgacaagtggaagtccatgactgatgctattaggggttatgtcgtagttgctgtgccttgtaaggacaaggctcctttcgtgaccaaggctgagaagctcaaggctgagtacaccaagaagattgacgcctacaacaacaagcaggcaggaggcccggctacctcaggcgactctgacaagtccaagtccgaggtgaacgacgaggacgagggcagcggtgacgagtga

SEQ ID NO: 12033 - DNA, 402 bp, Oryza sativa
  Clone ID: TFbOSC400934j.C1.o22.fg
atgaagacgaggtcgcagacggcgccgaagccgctgaaaacggtgcggctgcctcctgtcaagccgcggcccaagccgccgccgccgcagccgcagccgccgccgtcccggaagaaggggcagcccctcgtcgaccggcgccgccccaagaagccgcccaccgccttcttctacttcatggaggattttcggaaaacttacaaggaagaaaatccaagtgtaaaatcaatgcaagaagtagggaaggcatgtggcgagaaatggaatacaatgacatttgaggaaagagtgaagtattatgatatagcaaccgagaagcgtgcagagtatgagaaggcggtggctgaatttgacaagaaaaaggaaagcggtgaattgtccgaggaatcagattacgactag

SEQ ID NO: 12034 - DNA, 1941 bp, Oryza sativa
  Clone ID: TFbOSC15468j.C1.o2.fg
atgacggacggccaccacttcaacaacatatccctcggcggccgcggcggcaacaaccctggccagtttaaactttattcgggaggacttgcatggaagaggcaaggtggaggaaagaccattgaggttgaaaagtctgatatcacttctgtgacatggatggcaatccccagatcctatcagcttggtgtttcaacaaaggagggcctcttctacaggttctttggcttccgtgaacaggatatcagttcattgactaacttcatggaaaagaacatgagaatcacaccagaggagaagcagctttctgttggtggacataattggggcggaattgaaatcaatggcaatatgcttagctttaatgttggttcaaaggaagcatttgaagtctctctagcagacgtagcacaaactcagatgcaaggaaaaacagatgttgttctggagtttcatgtggatgatactactggtggtaatgagaaagattcattgatggatttaagctttcatgtaccaacttcaaatactcaattccctggagatgagaatcgtccttcagctcaggttttatggcaggctatcttgaataaggctgatgttggctcatcagaggaagctgttgttacatttgatggaattgctattcttactccaagaggtcgatacagtgttgaacttcatctgtcattcttacgactccaaggacaagctaatgatttcaaaattcaatatagcagtattcttcgcctctttgttttaccaaagtcaaataatcctcatacctttgtggttatcactcttgatccaccaattcgcaaaggacagacattatatcctcacattgttattcagtttgaaactgaagcagtcgttcaaagggatctgacattaagtgatgaggttttggctgaaaagtacaaggatagactggagaactcttaccagggtctgatacatgaagtgttctccaaggtccttcgtggcctatctggtgctaaagttacgaggccaagcacgttccgcagttgtcaagatggatatgcagtgaaatcatcactcaaagctgaagatggttgctctatccgctggagaagggcttcttctttctaccaaagcccccaacactcattctgcatgaggagctgtagctctttatggcagattgagtatgttgaatttgagcgacatggtgctgggggtgctagtatctcatctcactattttgatctcctggtcaagctgaaaaatgatcaagaacatctattcagaaatatccaaagaaatgaataccataatctcttcaatttcatcagtggcaagcatttgaaaatcttgaatcttggagaagctcaaggtagagctggtggcgttacagctgttcttcagagcactgatgatgatgctgttgatcctcatctggagcggatcagaaatcagactggcgatgatgagagtgatgaagaggatgaagattttgtggcggacaaggacgacagtggatctcctactgatgattctggagaggagggttctgacgctagtttaagtggaggagaaaaggagaaatcttccaaaaaggaagctagtagctcaaaggcgcctttgaagaagaggaagccaaagggtggggatgcggcggaaggctcggagaaaagaaagccaaagaaaaagaaggatcctaatgcccctaaaagagcaattgcaccattcatgtacttctcaaaagctgagcgagctaatctgaagaacagcaatccggagctggctaccacagagattgcgaagaagcttggggagaggtggcaaaagatgacagccgaggagaagcagccatacgtcgagcagtctcaagttgacaagaagcgctacgcggaggagtcagccgcctaccgcggggcggctgccatggatgtggactccggccctgcttcggactga

SEQ ID NO: 12035 - DNA, 1515 bp, Oryza sativa
  Clone ID: TFbOSC408633j.C1.o1.fg
atggcgacggcgggtagtaggaagggcgggaggggccggaaggcgctgacggcggtgctggacaacgacgctaacatctccgccgggaaggccgacgtggccgctgccgccgggatcctgtcgccgccgcagaaggcgaagagggcgacgtcgaagagcagcaaggggaaggccgcggctgcggcggcggcggaggaacaggcgtcggtggtggacgcggtgtcggagctgcaggggatgctggaggagctgcggctggagaaggagaaggcggaggagatggtgcgggagcgggacgaggtcatccgcaggaaggaggaggagcagggtcgcctccaggccgagctcaagaaggtccagcgcgccaaggagttcaagcccaccgtgagcattcctctcgtgaaggcattgatcgagaaagaccaggaaggagagaagaagaagggcaagggcaaggccggccatgagaggaagaagccctgcccggcgtacgtcctctggtgcaaggaccagtggaacgagatcaagaaggagagcccggacgccgacttcaaggaggtctccaacgctctgggagccaagtggaaggcgctgggcgcggaggagaagcagccgtacgaggagaggtacaggcaggagaaggaggcgtacctgcaggtggtcgggcaggagaagcgcgaggccgaggcgatgaagctgctcgaggaggagcagatgcagaggaccgccaaggagctgctcgagcagtatctcaagttccggcaggaggccgacgacgacggcgacggtggtgacaacaagaaggcgagcaagaaagggaagaagaagaagaaggagaaggacccctcaaagccgaagcagcccatgtccgcctacttcgtctacacccagcagcgccgcgcggcgctcgtcgccgagaagaagaacgtccccgagatcggcaggatcaccggcgaggagtggaaggcgatgtccgaggcggagaaggcgccgttcgaggcggcggcgcggaagcagagggaggagtaccaggtggagatggcggcgtaccggcagaggaagcaggaggaggcggcgtgccaggagaaagaggaggaggagcagaagaagatcatgaagcaggaggcgctccagctgctcaagaagaaggagaagacggacaacatcatcaagaagaccaaggaggagcagaggaagaagaaggtgggcggcgccgccgctgccgccgacccgaaccggcccaagaagccggcgtcgtcgttcctgctgttcagcaaggaggcgaggcggcagctggcggaggagcgccccggcgtggcgagctccacgctgaccgcgctcgtgtcggtgaagtggaaggagctcggggaggcggagaagcaggcgtggaacggcaaggccgcggaggccatggcggcgtacaagagggacatggaggagtacaccaaggcggcggccagcggcggcggcggcggcgacgcctccccctgtacgtcctcctcggcctcgtcctag

SEQ ID NO: 12036 - DNA, 1812 bp, Oryza sativa
  Clone ID: TFbOSC25282j.C1.o3.fg
atgtcgtccgccgcggggggaggaggagggtacgggggcggaggcggcgagcatcagcatcagcagcagcagcaccacctgctgcttgggcaggcggcggggcagctgtaccacgtgccgcagcacagccggcgggagaagctgcggttcccgcccgaccacccggcggagtcgccgccgccgccgccgcccgggtcgtggccgctgcccccggcgttctactcctacgcgtcgtcctcgtcatcgtactcgccgcacagcccgacgctggcgcacgcgcagttggtggcgcatgggatgccgccgggggccgcgacgagcggaggggcccagatcccgagccagaacttcgcgctgtcgctgtcgtcggcgtcctcgaaccctccgcccacgccaaggaggcagtttggcggccccggcggcggcggcggggccgccgggccgtacgggcccttcacgggctacgccgccgtgctcgggcggtccaggttcttgggccccgcgcagaagctgctcgaggagatctgcgacgtcggcggccgccccgcgcagcttgacaggggctccgacgagggtttgctcgacgtagacgccatggacgccgcgggaagcgtcgaccacgagatggacggcagcgatcgcgccgtcgcggacgcggtcacggtctccggcgccgagcagcagtggaggaagactaggctcatctcgcttatggaagacttcaaggctcttttaagctcccttctaaaactagcaggaggtgatccgcagtttatctataatcaaaaggtttgcaagcgatacaggcaatactaccagcaactccaagctgtagtatcgtcctttgagactgttgcgggtctgagcaatgctgctccttttgcttccatggctcttaggacaatgtcgaagcatttcaagtatttgaagggcattatactgaaccagctgcgcaatacgggcaagggtgctacaaaagatggtctcggcaaggaagacacaacaaactttgggcttatgggcggcggcgctggcctactaaggggaaacaatgtgaattcgtttagccaacctcacaacatatggcgcccgcaaagagggctaccagagcgtgctgtttcggttcttcgtgcatggctattcgaacacttcctgcacccgtatccaactgacagcgataagcagatgcttgctaaacagacaggattaactaggaaccaggtatcgaactggtttatcaatgcaagggttaggctctggaagccaatggttgaagaaattcacaacctcgagatgaggcagctgcagaagaatccgtctcttgacaagaatcagctctccatgcagcacacccaacattcgtcggacagcagcgggaagccctgtgatccatcaaactcgctgcaagggcaaagtagcagcatgaccaggaatcacagcatctccgcctcccggcacatcgaggacggcctctcccagatgccccatgacatctccggtcaggtgagcttcgcatacaacgggctcgccgcgcatcacagcatcgcgatggcgcaccaccaccaacctgacctcattggcaccggtggtgccgcgaatgctggcggtgtctcactcacccttggccttcaccagaacaataaccgagcttacattgctgagccccttccggccgcgcttccgctcaatcttgcccatcgtttcggactggaggacgttagtgatgcctacgtgatgagctcatttggtggtcaggaccggcatttcaccaaggagatcggtggccatttgctccatgactttgttggttga

SEQ ID NO: 12037 - DNA, 1812 bp, Oryza sativa
  Clone ID: TFbOSC401969j.C1.o5.fg
atgtcgtccgccgcggggggaggaggagggtacgggggcggaggcggcgagcatcagcatcagcagcagcagcaccacctgctgcttgggcaggcggcggggcagctgtaccacgtgccgcagcacagccggcgggagaagctgcggttcccgcccgaccacccggcggagtcgccgccgccgccgccgcccgggtcgtggccgctgcccccggcgttctactcctacgcgtcgtcctcgtcatcgtactcgccgcacagcccgacgctggcgcacgcgcagttggtggcgcatgggatgccgccgggggccgcgacgagcggaggggcccagatcccgagccagaacttcgcgctgtcgctgtcgtcggcgtcctcgaaccctccgcccacgccgaggaggcagtttggcggcggcggcggcggcggcggggccgccgggccgtacgggcccttcacgggctacgccgccgtgctcgggcggtccaggttcttgggccccgcgcagaagctgctcgaggagatctgcgacgtcggcggccgccccgcgcagcttgacaggggctccgacgagggtttgctcgacgtagacgccatggacgccgcgggaagcgtcgaccacgagatggacggcagcgatcgcgccgtcgcggacgcggtcacggtctccggcgccgagcagcagtggaggaagactaggctcatctcgcttatggaagacttcaaggctcttttaagctcccttctaaaactagcaggaggtgatccgcagtttatctataatcaaaaggtttgcaagcgatacaggcaatactaccagcaactccaagctgtagtatcgtcctttgagactgttgcgggtctgagcaatgctgctccttttgcttccatggctcttaggacaatgtcgaagcatttcaagtatttgaagggcattatactgaaccagctgcgcaatacgggcaagggtgctacaaaagatggtctcggcaaggaagacacaacaaactttgggcttatgggcggcggcgctggcctactaaggggaaacaatgtgaattcgtttagccaacctcacaacatatggcgcccgcaaagagggctaccagagcgtgctgtttcggttcttcgtgcatggctattcgaacacttcctgcacccgtatccaactgacagcgataagcagatgcttgctaaacagacaggattaactaggaaccaggtatcgaactggtttatcaatgcaagggttaggctctggaagccaatggttgaagaaattcacaacctcgagatgaggcagctgcagaagaatccgtctcttgacaagaatcagctctccatgcagcacacccaacattcgtcggacagcagcgggaagccctgtgatccatcaaactcgctgcaagggcaaagtagcagcatgaccaggaatcacagcatctccgcctcccggcacatcgaggacggcctctcccagatgccccatgacatctccggtcaggtgagcttcgcatacaacgggctcgccgcgcatcacagcatcgcgatggcgcaccaccaccaacctgacctcattggcaccggtggtgccgcgaatgctggcggtgtctcactcacccttggccttcaccagaacaataaccgagcttacattgctgagccccttccggccgcgcttccgctcaatcttgcccatcgtttcggactggaggacgttagtgatgcctacgtgatgagctcatttggtggtcaggaccggcatttcaccaaggagatcggtggccatttgctccatgactttgttggttga

SEQ ID NO: 12038 - DNA, 3228 bp, Oryza sativa
  Clone ID: TFbOSC21053j.C1.o5.gm
atgcccgacgggcacgggggccacgacccgctgcggccgcgcccatcccgccagttcagtcaccaacccaccaaaccccaccgcgaccgcgactccgacgtctccgccacgggccaaagtcgaaaaatcgaggggactttcccatctccatcccgcggcgggcgcacggtggcccaggagggcgcccgcggctactgctgcttccgctcaaagcttcaagttcccgtgcgcttctgcttccccactacctcccgctggtctcggtgcccactgcgcagcgcgggctcttcaataactattatcggtactcctggtggtcttcttggtagttttaagatagaattaactggggctactgtacctggtgaaccagaccctccaattgtgcttcattacaatgtccgtcttcttggtgataaacttacagaagatcctgtaatagtccaaaatacatggactatagctgacgactggggttctgaagatcgttgcccatctcctggttcagatgctaaggacattgcaaaagtggatgagttagaaaaatgcggtagcatggtgggcaatgatcaaaaacaagcatgggccactaagttaaagtccaatgtttcaagcatacaacctgcctggaaaaagaacacagaacctaagaaatattttcccttcagacaaggatatcttgctatagcaattcttcgtgttggagcacatgggatccatatgactgtagatgggaaacatgtcacttcatttgcctttcgggaggatttggagcctggatttgttggtgaagctccaccagttcccatggacaaacccctggatctttttattgggatcttttctacagctaacaatttcaagcgcagaatggcagttcgcagaacttggatgcagtatgatgctgtccgctcaggaaaggctgcagttcgattctttgttggcctggaatggcctgaggagagttatcctccatgggcacatggtccgggatacattgtatcacaagacatagcaaaagaagtttacaggaaacacaagagaggagaacttaagatgttcaaactagaagatgtcgcaatgggaatatggatcaatgagatgaagaaggatgggttggataagtacggggacaacgctgggattgacggggtgtcgtcgccgatgacgttgaggcggtactacaaggagcagggcaatgtcatgcctggcgaggacttcctcgagctcgacctgagggcggcgcgcggaggcggaggcggcgggcgcacggctgcggaggctgctgaggacgagcgcgacaacggaggctgcgcgcggcggaggctgacggcggcacatgctcatttatctagactgtatcttggttataaccccttcctcaaagcatttatccaggacttccctaagcttatcaagactgatctatctgttcctacagaggagaaagtttttcctgaggcagcatcctttttgaatggttctaagcaaattgatgcgtccgatcttccatcagatgattcagcagacaatgattatgaccctactttggctcaagggcacaaggtggatgaagaaaaatcttctggagaagatggtggtgaaggattagattctgatgactcatcttctgaggattctgaatcttctgagaaggaaaagtctaaaacttcacagaatggaaggacagttgatgatcttggtttgccttctgaggattcagaggatggtgactttgatccagcaggtccagattccgacaaagaacaaaatgatgaatcaaactcagatcagtcagatgaatcagattttacatctgactctgatgatttttgtgctgagattgctaaatcctgtggtcaggatgaaatctcaggcccttcatcatcacaaatcagaacagtcgatcgcaccgatggaagtggttttgatgcgtcgtcgtcgtcgttgccgaccggtggcggcgcgcgcagaagaagattgaggccgatgcgcgcggggagggagggagcggctccctgtgatcttcgccgtggcgtcgtcgttgtcgttgttgctgacccggcggcggtgcgcgcgcggaggaagacagaagccggcacgcagacggagggaggaaggcgctggagctcgccggcgtgcggagggcgggcggcggcatcacgcgcgcggagaaaggaggaggctggcgcgcgtggagtgccgccggatccaccgcttgcacaccaccacggcctgagctccaccaccgttgctcctcttcctcgtcatcgagctcaccgtcgccgccacgacagctcggcgccaccgcccccacagctcggcgtcgccgcccccacagatcggcgccgccccgcgccccatcagaccgccgccgccctccacctccacagcgggcgccggcggggctgtacatcacgccgctgccgccgcctcctcagctcgccgccgccgcccccacagatcgttgccgccgccccctcagatcggcgccgactcggaccccctcaaagcgccgccgctgccgccctccaccacaacgagtgggcgccggcggggcagaggcttatggtaaagcatcatctgattcaagtgacgatgaagagtggtatggaaatagtacacccgaaaaagaaactgaaggcacatttcaaggaagatccataccctagtcgtgcaacaaaagaaaatctggcacaagagttaggcctcacatttaatcaggtcactaaatggttttccagtactcgtcattacgcaagagtggcagccacaaaaaaggagaacaacattgaaaatcatacggctgagaataataacaataccaacactgttgatagcatacaactgagaggatccaatgatattgttagtgtagatagaaatgatatggtctccgaggaaaggacaggacaaagtaatctcaatgaaggtactccattaagatcagataccagctgtgggcagagtgtggctgtgactcctatggtacacccagaaaaccagggcaatgattcctcaagtaatgttagaacaccaaatgctaagtctgcggagaaattgatccctggactggaaaattcagatgaggctaggcgaaaggcggtacaacgggaactgagaaagatgaagactggcagaatttctgataagatgacacttggaagcacatcctgcagcactccagttacaggaatgggttcagttgactgtaacagtttagcatag

SEQ ID NO: 12039 - DNA, 2397 bp, Oryza sativa
  Clone ID: TFbOSC401975j.C1.o17.fg
atgccgccggtgatcggccggaacggcgtggcgtacgaatcgccgtcggcgcagctgcccctcacccaggctgatatgctggacagccatcatctgcagcaagcactccagcagcaatacttcgatcagatcccggtgacgacgacggcggcggcggacagcggcgacaacatgctgcacggccgcgccgacgccggcgggctggttgacgagttcgagagcaagtcgtgcagcgagaacgtcgacggcgccggcgacggcctctccggcgacgaccaggaccccaaccagcggccgcgcaagaagcgttaccaccgccatacccagcaccagatccaagagatggaagctttcttcaaggagtgcccgcacccagacgacaagcagcgcaaggagctgagcagggagctgggtcttgaacctctgcagaaccagcacgagaggcacgagaacgcgcagctgcgggcggagaacgacaagctgcgcgcggagaacatgcgatacaaggaggccctgagcagcgcgtcgtgccccaactgcggcggccccgccgccctcggcgagatgtccttcgacgagcaccacctccgcgtcgagaacgcccgcctccgcgacgagatcgaccgcatctccggcatcgccgccaagcacgtcggcaagccccccatcgtctccttccccgtcctctcctccccgctcgccgtcgccgccgcccgctcccctctcgacctcgccggcgcctacggcgtcgtcacccccggcctcgacatgttcggcggcgccggcgacctcctccgcggcgtgcacccgctcgacgccgacaagcccatgatcgtggagctcgccgtcgccgccatggacgagctcgtccagatggcccagctcgacgagccgctctggtcgtcgtcgtcggagccggcggcggcgttgctcgatgaggaggagtacgcgcgcatgttcccgcgcggcctcggccccaagcagtacggcctcaagtcggaggcgtcccgccatggcgccgtcgtcatcatgacgcacagcaacctcgtcgagatcctcatggatgtgaatcaattcgcgacggtgttctcgagcatcgtgtcgagagcgtccacgcacgaggtgttgtccacaggcgtggcaggcaactacaatggtgcactgcaagtgatgtcaatggagtttcaagtgccgtcgccgctggtgccgacgagggagagctatttcgtcaggtactgcaagaacaactccgacgggacatgggccgtcgtcgatgtctctctcgacagcctccgccccagccctgtccagaaatgccggcgcaggccgtctggctgcctcatccaagaaatgcccaatggctactccaaggtgacatgggtggagcatgtggaggtggacgacagctcggtgcacaacatctacaagccattggtgaactccggcctcgcattcggcgcgaaacggtgggtcggcacgctggaccggcaatgcgagcgcctcgccagcgccatggccagcaacatccccaatggcgaccttggagtgattacaagcgtggaggggaggaagagcatgttgaagctggcggagaggatggtggcgagcttctgcggcggcgtgacggcgtcggtggcgcaccagtggacgacgctgtcgggcagcggggcggaggacgtgcgcgtcatgacgaggaagagcgtcgacgaccccggcaggccaccgggcatcgtgctcaacgccgccacctccttctggctccccgtccctcccgccgccgtcttcgacttcctccgcgacgagacctctcgcagcgaggtgcccaatttgccccccatccctagggaatttatccaatttgctgaccaaattttatacgtgatcaaattcattcctgacgagtttggatttccgcagtgggacattctgtccaacggcggcgccgtccaagaaatggctcacattgccaacggccgtgaccatggcaactctgtctcgcttcttcgtgtcaatagtgcaaattcaaaccagagcaacatgctgatcctgcaagagagctgcacggacgcgtcgggctcctacgtggtgtacgcgccggtggacatcgtggcgatgaacgtggtgctcaacggcggcgacccggactacgtggcgctgctgccgtcggggttcgccatccttcccgacgggccgtcggggaacgcgcaggccgccgtcggggagaacggctccggctccggcggggggtccctcctgacggtggcgttccagatcctcgtcgactccgtgccgacggcgaagctctcgctgggctccgtcgcgacggtgaacagcctcatcgcctgcacggtggagcgcatcaaggccgccgtctgcagggacagcaaccctcagtag

SEQ ID NO: 12040 - DNA, 2037 bp, Oryza sativa
  Clone ID: TFbOSC900171j.C1.o8.gm
atggcggcgtactaccacggcggcgccggcacggacatccagtccggcaccgacggcctgcagacgctgtacctcatgaacccgagctacgccggctacggcgacgccgccgccgccgccgccgcgcccggggcggcggccaacatgatgctcctgaactcggcggtgacctccatgacgccggtgtcgttcggccaccagccgtcgccgtcgtcgtcgtcggcggcgcagcacttcgtcggcatccctctccaggcgccgccggcttccgggtacaacctgtggaccccggcggcggccaccggcgcgggcgacatgtcgccgccgacgccgcagcaccagcatcagcaagctcacggcggtggcgcggcgggtgtcagtgctgtcctcagcctgtcgtcccgcgaggcggcgccgccggtgacggtggcggccgtggtggccgccggcgacgaggggaagtacctgcaggcggtggcgcagggcgcggcgtcgcacgggcagatggtgatgagctccaagtacctcaaggcggcgcaggagctgctcgacgaggtggtgagcgtcagcaagggcgtggacgacgtcaaggccgccgcggcggcgaagagcccggcctcggtgaagaagaaggaggactcggagggcgtgtccggcggcggcacggaggatggcggcggcgccaagagcggcggcgcgccgccgccgccggagatgtcgacggcggagcggcaggagctgcagatgaagaaaggaaagctgattaacatgcttgatgaggtggagcagcggtacaggcagtaccaccagcagatgcaggtggtggtggcgtcgttcgaggcggtggcggggggcgggtcggcgaggacgtacacggcgctggcgctgcggaccatctcgcggcagttccggtgcctgcgggacgcgatcgcggggcaggtgagggcggcgagccgggcgctgggggaggccgtcgacgccgacggcggatgcggccgcacggtggggtccaggctccggtacatcgaccaccagctccggcagcagcgcgcgctgcagcagctgggcatgatgcagagcagcgcgtggcgcccccagcgcggcctccccgagcgctccgtctccatcctccgggcttggctcttcgaacacttcctccacccatatcccaaggattcggacaagatcatgctcgccaagcaaaccggcctcaccaggagccaggtttcgaactggttcatcaatgccagggtgaggctgtggaagccgatggtggaggagatgtacctggaggagaccaaggaccaggacggcggcggcggcgccggcgccggcgacgaggggagcaagcccggtgggagcaagggcggcggcgccggcgtcaatggcggtgtggttgacagtgccgcgaagatggacagcaaggcggcgcacatggagagcggcggcggcgtacatccgtcgctgctcgagctcgccggtgaccaccaggcgcaggcggggttctacgacgacgacgacgaggatggcggcgccgccgccgcgctgcagcagaagctgaagaaggcgaggacggaggagcagcagcaggcggcgttccacgtgtccgacgtggccacgctgcacgcgcatgccgcggcggcggcggcggcgaggcacgacgaggtgagccaccgggagctcctcatgaagttcatggagagcggcagcgccggcgccggcgccggcgccgccgcgagggaccaccaccacgaacaccatggcggcgtcggctactcgctgttcgcgccggcgccgtacgggcagttcgccacggagcagttcgcgttcgccggccacggcggcggtggcggcggcggcggcgtgtcgctcacgctcggcctcccgcacggcgccgagcagacggcgtcgttcctcatgaccagcagcaacggcagcgacggcgccggccacgtcgccggcggcggcggctacgacatgaacatgcagagcacaaagtccttcgcggctcagctcatgagagacttcgtggcctag

SEQ ID NO: 12041 - DNA, 1944 bp, Oryza sativa
  Clone ID: TFbOSC401411j.C1.o9.fg
atggctacttactattcaagccctggtagcgaaagagactcgcagaccatgtactcaagagacccaggcagtgcatcctatcctatgtcatcagctctagggaacttgctctatctgaacaatccatcttctggaccttatacggagttcagcggcattctgcagcctcagcagaattgcatggagatgcctggccctgggcatgcgtcagcaatgtcacaagacccctcttcaagggagtccgacatgctttcttcgcaccagggtcaacgctctttcagccatgtcaaagatatgaaaaatgagatgttgatgcatatgatggatggagcacaaggtagtggctctgagctcatccatgatgatgcccacactggttcacagcttgagtttggtgttctgaataatcacaactcatcaagtgttccatcaatgcaaagccaagggctatctctgagcttgaacacacaaatcatggcgccttccttaccgtactggtctataaagccagacatgttaacgccgcagtcttaccatgacaaccttagaggggaagacatgcggatgaagaatttgcagtccgaagcttcacgcgcaatccggaactcaaggtatctcaaggcagcacaagaactgcttgatgaggtcgtgagtgtttggaagagcataaaacaaaaggctcagaaagagaaggttgaatcaggaaaagcagatggcaaagagactgatggagggccaaaaagtgagggtgtatcttctaatccacaagaatctggcgctaatgcagcacctgagctttccactgctgagaagcaagagcttcagaacaaaatggcaaaactgatggcaatgttggatgaggtggaccggaaatacaagcattattaccaccaaatgcaaaccgtggtttcatcgtttgatgtggtagctggaccaggatctgcgaagccttacacagcagttgctcttcagacaatctcacggcactttcggtgcctgaaggatgctatcaatgatcagatcaatgttatcaggaaaaagcttggcgaggaagagaactcatctggcaaggagggaaaattaacccgcctccggtacattgatcagcagctaaggcaacaacgtgctttccaacagtacggtatgattccacaaaacgcctggagaccacagaggggactgcctgaaaactctgttacaattcttcgcgcttggctgtttgaacacttcctccatccgtacccaaaagattccgagaagttaatgcttgctaggcagactggcctgactaggagtcagatttcgaattggttcataaatgcccgtgtccgcctttggaaaccaatgattgaagacatgtacaaagaagagattggtgatttagagcaagactccaactcttcctctgacaatgcaccaagaagtaaggataaaatggcatcttcagaagacaaggaggatctcaaaaactccagggcacggatttgcgaaacaagccaattgagcgagtcgagaaccagcattggagcaatgaatgttggcggagcgcctgttggcttccagaatgagcccaatcctgatgacagtttcatgaacctgatgctgaaggaccagcgatcgaacgaagtggatggcggcctccttctccacaacactgtcgcgcagcactcagacgagaacgcccggttcatggcctatcacttggcagagcttgggagatacggcaatggcaatgtgtcgctgacactgggcttgcagcactccagcagcaacctcgttcctaatgctcagccaggtttccctggtgttaatgaggatgacatctacaatgctactgctcctcttggtgtcaccgtcgcatcttcggactatgattcgatgaatcagatggatcaacggcaacggtttgagcattcacctcttctgcatgattttgtggcctga

SEQ ID NO: 12042 - DNA, 1929 bp, Oryza sativa
  Clone ID: TFbOSC401247j.C1.o7.fg
atggctacttactactcgagccctggcaatgaaagggactcgcaagctatgtacccagcggattcaggcaattcatcatatcctgtgccatcagcaataggaaacatgttatatcctggcaatgggtcttctgggccatacacggaattcagtggcattatccagcatcagcagaatttcatggagctgcctggccatccaactgcgatctctcaagattcatcgtcacgggaacctaacatggtcgcgtcgtacatggatcagcgctcttttggacctgccaaagatatgagaaatgagatgttgatgcatctgatggatggagcacataatgctggtgctgatctcatccacaatgacactcatagcagcgcgcagattgagtttggcctattgaacaaccacaattcgatgagcgttgcaccagcaccaggccaaggattgtctctgagcctcaacacgcatatcctggcgccttcgtatccatactggtctgcgaaaacagagttgctaacaccacactcttaccatggtgatgacaacagaatgaagaatatgcaatctgaggcctcacaggcaatcagaaactcaaagtatctgaaagcagcacaagaattgcttgatgaggtcgtcagtgtttggaagagtataaagcagaaggctcagaaagaccaggctgaagcaggaaaatcagataacaaagaagccgaggggggttcgaaaggtgagggggtatcttccaacccacaggagtctactgccaatgctgcaccagagatttctgctgctgagaaacaagagctccagaataagatggcaaaacttatggccatgttggatgaggtggaccgaaagtacaaacactattatcatcaaatgcaaattgtagtctcatcttttgatatggttgctgggtctggagctgccaagccttatactgcagtggcccttcagacaatctcaaaacatttcagatgtctgaaagatgctatcaacgatcagatcaatgttatccggaagaaacttggagaggaggagagttcatctggcaaagagggaaaattaacgcgcctccgttatattgaccagcaattaagacaacagcgcgctttccagcagtatggtttgttacagcaaaatgcttggaggccacagaggggactgcccgaaaactcagtttcaattcttcgtgcttggctttttgaacacttccttcacccgtatccaaaagattcagaaaagctgatgctagcgagacaaactggcttaacaagaagtcagatttcaaattggttcataaatgcccgtgtccgcctgtggaaaccgatgatcgaagacatgtataaagaagagattggggaggcggatctcgactcgaactcctcctccgacaacgtaccaaggagcaaggacaaaatagcaacatctgaagataaggaagatctgaaaagctctatgagccagacttatcaaccaagccaattaggtgaatccaaagccaacatcgggatgatgagccttggtggggcaccagccggcttccacaacgaaggcaaccaggatgacagcttcatgaacctaatgctgaaggaccaaaggccgggcgaagccgaaggcagcctcctccatgatgccgtcgcccatcattccgatgagaacgctcggttcatggcttaccatttgtcggggctcggaagatacgggaacagcaatgtgtcattgacacttggcttacagcatcctgacaacaggctttcggtacagaacactcatcagccaggtttcgccggtgctggagaagaaatttacaactccaccgcttctctcggtgtcgctgcagcttcctcttcggactacgaatccacgaaccaaatagatcaaaggcaacggttcgaaccatcgcctctaatgcatgattttgtggcctaa

SEQ ID NO: 12043 - DNA, 2655 bp, Oryza sativa
  Clone ID: TFbOSC401273j.C1.o3.fg
atgtggaccctacatgtcatcctctctctcttcttcctccctctctttcccttctctctctccacttcggccttctgcaagaggcgatggcggcagcggcagcgacggcggcggtggcgcgagggtaggcgctggaggcactggagcggtggcggcgacggacggggaccggagtggcggcggcgcttcgggctagagttggcgtggatggaggcggaggcggcgacagaggagatggcaggcggtcgagggccggagcgacggcgggtcggcggagagcctggcggccggtggtggctagcggggagagagctagtggcgaaggccgcccccatcttcctccctcctcgccgggctccgcacgcacctgccccgatcggtggagcggattacgcggttgggtccgtaccacgggctgccaaaggcggacggcttgggcttcgcggcggacttacggatggtgatgcgggcctcgccgaagagggatgtggacgccgcgcgaccattactgcggaggagagcgccgtggcgaatcgaacagctgctggaacccggttggctatctccactagtagcaacttccacaaggctgcttcggcgaaaaagaaaagaagaagtcagaaaaagacgacaagagaaacaacccaactgcaagaatccttgggatcatctctgtccccgttctgggtggtttctgtcatactccaggaactgtcttgttctagctctttgcttggtctgaaagtcgatttctgcacaggtactgcgaaagctttgggaatagtattgcagaaagcgcagcaatctgaagcttactgtccaagtctgtctcttcttctgcttctgaagacgatggccacattcttctcctcttccaccaatcagagagacctcaccggcggcggcggcgacggaggcgacatgtcgttccagcactacccaccgccgtctaacccttactcggactcgtcggccggcggcctgatcccgctcccggcgagcatcgtgtcgcatagccacattgcgcacggcggcggcgacgagccggcggcgttcagggaagcggcgacggcggacggcggcgagatgggcctgcagacgcagctgctcatggcgcacggcgcggcggcgcggggacaccagggcgggctatcgcttagcctcggcacgcaggtgccggtgtctctctaccagtacaggccggcgggcatggcggccgcctcgctgctcagcccgagccagtcgtcgccgatggcggggaggagcgcgcagaacagcatctacgtgcagaactcgaggtttctcagggcggcgcgcgagctgctcgacgaggttgtcaatgtccgcgacgcgatcaagcggaagggtgacaagaaccagggcaaggattccggcgagtgcaagggcggtgacgccgccggcgacgacaaggccggctcgaacccgcaggagcaggagagcaattcagcccccgagctctcgccgtcggagaggcaggatctccagaacaaggtcaccgcgctcatggccatgctcgatcaggttgatcggaggtacaggcactaccaccaccagatgcagatcgtgatgtcgtcgttcgacgcggtggccggcggcggcgcggcgaggccgtacacggcgctggcgctgcagacgatctcccgccacttccggtcgctgcgggacgcgatcggcgcgcaggcgcaggcggcgcggcggggcctcggcgagcaggacgcgtcggcgcagggcggcggcggcctctcccggctgcgctacatcgaccagcagctgcggcagcagcgcgccatgcagcagttcggcatgatgcagcagccgcagcacgcgtggcgcccccagcgcggcctcccggagtccgccgtctccgtcctccgcgcctggctcttcgagcacttcctccacccgtatccgaaagattccgagaagctgatgcttgcgaggcagacgggattgtccagggggcaggtatcgaactggttcatcaacgcgcgcgtgcggctgtggaagccaatgatcgaggagatgtacaaggaggagttcggcgcggagatggactccaactcgtcgtcggagaacggcggcggcggcggcggcaagggcaaggacgaggcgatctcgtcggaggaccgcgacgagttccagagcccgtcgagcgccgccgcggcgaggcacgccggcgtcgcgggccagctcaacaacccgttcaagtcggaggcgatgggcggcgccgccctggacgtcggcgtcggcgtcgtcggcctgtccagctgcctcggcggcgccatgggcacgtacgccaccggcctcaacctgaaccaccacgtgcaccaccccggcgccggcggcaccagcctactgcacgacgcgctgcaccaccaccaccacggcggcggcggcgacgccaggttcgtctcctacggcgacatggccgacttcggcggcggcggcggctacgacggcggcagcgtgtcgctgacgctgggcctgcagcactgcaacaacgccggccccgtcccggccgagcagcagggcctgctctacggcagcgccggcgacttcgactacatcaacggctccgacgaccggcagcggttcggcccggcgtcgcagctgctgcacgatttcgtcgcgtga

SEQ ID NO: 12044 - DNA, 2655 bp, Oryza sativa
  Clone ID: TFbOSC410066j.C1.o3.fg
atgtggaccctacatgtcatcctctctctcttcttcctccctctctttcccttctctctctccacttcggccttctgcaagaggcgatggcggcagcggcagcgacggcggcggtggcgcgagggtaggcgctggaggcactggagcggtggcggcgacggacggggaccggagtggcggcggcgcttcgggctagagttggcgtggatggaggcggaggcggcgacagaggagatggcaggcggtcgagggccggagcgacggcgggtcggcggagagcctggcggccggtggtggctagcggggagagagctagtggcgaaggccgcccccatcttcctccctcctcgccgggctccgcacgcacctgccccgatcggtggagcggattacgcggttgggtccgtaccacgggctgccaaaggcggacggcttgggcttcgcggcggacttacggatggtgatgcgggcctcgccgaagagggatgtggacgccgcgcgaccattactgcggaggagagcgccgtggcgaatcgaacagctgctggaacccggttggctatctccactagtagcaacttccacaaggctgcttcggcgaaaaagaaaagaagaagtcagaaaaagacgacaagagaaacaacccaactgcaagaatccttgggatcatctctgtccccgttctgggtggtttctgtcatactccaggaactgtcttgttctagctctttgcttggtctgaaagtcgatttctgcacaggtactgcgaaagctttgggaatagtattgcagaaagcgcagcaatctgaagcttactgtccaagtctgtctcttcttctgcttctgaagacgatggccacattcttctcctcttccaccaatcagagagacctcaccggcggcggcggcgacggaggcgacatgtcgttccagcactacccaccgccgtctaacccttactcggactcgtcggccggcggcctgatcccgctcccggcgagcatcgtgtcgcatagccacattgcgcacggcggcggcgacgagccggcggcgttcagggaagcggcgacggcggacggcggcgagatgggcctgcagacgcagctgctcatggcgcacggcgcggcggcgcggggacaccagggcgggctatcgcttagcctcggcacgcaggtgccggtgtctctctaccagtacaggccggcgggcatggcggccgcctcgctgctcagcccgagccagtcgtcgccgatggcggggaggagcgcgcagaacagcatctacgtgcagaactcgaggtttctcagggcggcgcgcgagctgctcgacgaggttgtcaatgtccgcgacgcgatcaagcggaagggtgacaagaaccagggcaaggattccggcgagtgcaagggcggtgacgccgccggcgacgacaaggccggctcgaacccgcaggagcaggagagcaattcagcccccgagctctcgccgtcggagaggcaggatctccagaacaaggtcaccgcgctcatggccatgctcgatcaggttgatcggaggtacaggcactaccaccaccagatgcagatcgtgatgtcgtcgttcgacgcggtggccggcggcggcgcggcgaggccgtacacggcgctggcgctgcagacgatctcccgccacttccggtcgctgcgggacgcgatcggcgcgcaggcgcaggcggcgcggcggggcctcggcgagcaggacgcgtcggcgcagggcggcggcggcctctcccggctgcgctacatcgaccagcagctgcggcagcagcgcgccatgcagcagttcggcatgatgcagcagccgcagcacgcgtggcgcccccagcgcggcctcccggagtccgccgtctccgtcctccgcgcctggctcttcgagcacttcctccacccgtatccgaaagattccgagaagctgatgcttgcgaggcagacgggattgtccagggggcaggtatcgaactggttcatcaacgcgcgcgtgcggctgtggaagccaatgatcgaggagatgtacaaggaggagttcggcgcggagatggactccaactcgtcgtcggagaacggcggcggcggcggcggcaagggcaaggacgaggcgatctcgtcggaggaccgcgacgagttccagagcccgtcgagcgccgccgcggcgaggcacgccggcgtcgcgggccagctcaacaacccgttcaagtcggaggcgatgggcggcgccgccctggacgtcggcgtcggcgtcgtcggcctgtccagctgcctcggcggcgccatgggcacgtacgccaccggcctcaacctgaaccaccacgtgcaccaccccggcgccggcggcaccagcctactgcacgacgcgctgcaccaccaccaccacggcggcggcggcgacgccaggttcgtctcctacggcgacatggccgacctcggcggcggcggcggctacgacggcggcagcgtgtcgctgacgctgggcctgcagcactgcaacaacgccggccccgtcccggccgagcagcagggcctgctctacggcagcgccggcgacttcgactacatcaacggctccgacgaccggcagcggttcggcccggcgtcgcagctgctgcacgatttcgtcgcgtga

SEQ ID NO: 12045 - DNA, 3372 bp, Oryza sativa
  Clone ID: TFbOSC400780j.C1.o27.fg
atggcgcatgatccgaacctggggttcgcggattacttctcggcggcagatgcatcggcgtcgtcggtcacgacgctgatgccggcgatggacgaagcggcgccggagctgttcgggttgcaggccgggatggagcttctcggcgtgcgcggtctgggtatgagtatgatgcccggcgcggcaggcaaggtcgccgcgctggtggccgacgctggggacgacggcggcggcggctccaccatgcgcttcctcagcgagcagcaccaacagccgagccaggcgccgctgtcgctgtcgctgtgccgcccggacggcgtgctgcacctcggcggcgcggcgcggccgcagcaccaactggcgcccgcggcgccatggatgacgcaccacgacgcgtcgtcgtcggcgccgcaagtgcacggcgcgtggcacctgcgcagctcgaggttcctcctcccgacgcagcagctcctccaagaattctgcagcctccccgtggacagcaccaagcgcggcaacggcgccaaggcagcgacgcagcaagaagacggccgcggcgacgggtcgtcgtcgtcgtcggcctcgtggaccccgtcgccgcagatccaggccatggaagccctggagctgcagaggctcaaggacaagctctacatcatgctcgaagaggtggacaggaggtacaggaggtactgcgagcagatgagggcggtggccggggggttcgaggcggtggccggggagagggcggcgggggcgtacacggcggtggcggcgaggacgatatcgaggcacttccggagcctgagggatgggatcgtggcgcagctgcaggcggcgaggaaggcgctcggggagaaggacgtgagcgcggccgggacgacgcgggggcagacgccgcggctcagggtgatcgaccagtgcatcaggcaccacaagtcgctgcagggcgtcgccgccatggacagccacccgtggcgcccccagcgcggccttcccgaccgcgccgtcaccatcctccgtgcctggctcttcgagcacttcctgcacccgtatccaagcgacgtggataagcacatcctggctcgacagacgggcctctcacgtagccaggtgtccaactggttcatcaatgcgagggttcggctgtggaagccaatggtggaggagatgtacgtcgaggagatgaagggccaggacggcggcgacggcagcggtggacaggggagcctaaaccctaagcctacctgcagccacgcctccgaggcgcgcggcggccagcagctggtcgtcggcgatggcgacggcggcgaacagaagccgacgagggcgcagcttcgccacgacgccgggtcgctggcctccgtcgtcaacgtcgacgtcgcggccggcgcgggcggcgtggcccggctgcaccaggcggagaacttcggcatcatggaccacctcgacttcgacgcgtacgacgacagccaccaccagcagcagcacggcgggttcggcggcgtgtcgctgacgctcgggctgcagcagcacggctcccacggcggtggcggcgtgaacatcgcgttcggggcgccggggtccgcgcacggcggcgccgggttcttgtacccgggcgagcagatggcgcctgacgccatgcatccggggcacggccaccacgtcgtcggcggacagttcggcgtggccatggacggcgacgccgcctcgcacgcgcaagagcgaaatattatactggcaaaaatgtttacaaaaatatatcctgccgcacaagtggagagcggcaaggccttatttggcatgaaaggaggaggcggcgatcggcatcatcacaaggacgccattgtcatgcacgccgccggcaaggcgcccaagtgcaaggcttccttcttcctctgcagcctcctcctctactttctcctcccggtgctcgccctgtacgtcgttgccctcgccgtgtcgccgttctactcgggtagctcgtgcccggaggagagccttgccagtggcgacgttgcacatctcgcggccgccggcgatgctggcaacaggcgtaacgactcgtcgccgccgtctgatgacgccgcgccgaccgggctgggtcacattgtgttcggcattgccgcctcttcggagctctggaagagccggagggagtacatcagaacatggtggcggccggagcagatgagcgggttcgtgtggctggacaagccggtgtacgagttctactcgaggaacgcttccacggggcttcccggaatcaagatcagcgggaacacgaccaagttcccgtacacgcacggccgcggcagccggtcggcgctgcggatcacccgcatcgtgtcggagagcttccggctgggcctccccggcgcgcggtggttcgtgatgggcgacgacgacacggtgttcttcccggacaacctcgtggacgttctgtcccggtacgaccacacgcagccgtactacatcgggaatccgtcggagagccacatccagaacctcatcttctcgtacggcatggcgttcggcggcggcgggttcgccatcagccgcgccctggccgcgcagctggcgcacatgcaggacgggtgcatcgaccggtacccggcgctctacggcagcgacgaccgcatccacgcgtgcgtggcggagctgggcgtgccgctgacgcgccacctgggtttccaccagtgcgacctgtggggcgacgtgctgggcctcctgggcgcgcacccggtggtgcccctggtgacgctgcaccacctggacttcctgcagccggtgttcccgacgacgaggtcgcggacggcggcgctgaggcggctgttcgaggggcccgcgcggctggactcggctggcgtggcgcagcagtcggtgtgctacgacggcgacaagcagtggacggtgtcggtgtcgtgggggttcgcggtggtggtgacgcgcggggtgctgtcgccgcgggagatggagatgcccatgcgcacgttcctcaactggtaccgccgcgccgactacacggcgtacgccttcaacacgcggcccgtggcgcgccagccgtgccagacgccgcaggtgtactacatgcggcagtcccgcctcgaccgccgccgcaacaccaccgtcaccgagtacgagcgccgccgcgtcgcgcccgtcaagtgcggctggcgcatccctgaccctgccgcgctgctcgaccgcgtcatcgtcctcaagaagcccgaccccaacctctggaaaaggtctccgaggaggaattgctgcagggtgttgtcgtcacccaggcaagggaaggaccggaagatgaccatcgatgttggcgtctgcaggggcggcgagttcgccagaattgaggtagccaggtag

SEQ ID NO: 12046 - DNA, 3684 bp, Oryza sativa
  Clone ID: TFbOSC400992j.C1.o51.fg
atggagctcgtccccttcaagcccgaggccggggccctggtcgagtcgggcggcggggcccacggggactcgatcccggccatggtggcggcgcagcaggaactgctgcacgcgcaggtggaccagctccagctcctcgtcgtcgcgcagtgccgcctcaccggcgtcaaccccctcgcccaggagatggctgctggggcattgtctatcaagataggtaaaaagccaagggatttgttaaatccaaaggctgtcaagtccatgcagtcactttttgctatgaaggatactattggaaaaaaagaaactcgggaaattagcgcatcttttggggttactgttacacaggtgagggagttctttgcaagtcaacgtacgcgagtaagaaaatttgttcgcttatcacgtgagaaagccctgagaatagagtcatccaaggctcctgacaatgtatgctccataagcactgagcagacacctgttgacattgaggcacatgctcaagttattgagcctctgagaacattagaaccattggaggcgcaacaaatttctttgccgcatctggtggttcctcaaatctctttacaattgccggtggtcctgcagagctgtgcaatccctgttgccccaataggtgtaatgcaacccaccgaggctaagactaatcccgatcccattcaaaaggaaactaagcaagaggaagttgctggagttgagtcagaagataagaagtttttggaaagtatctttgttctaatgcggaaggagaatacattctctggacaggtcaaattgatggaatcaattctacaaataaacaatgtaactgttcttagttggttcttaacaatgggtggtttggccattgtatcgacgtggttgggccaagcagttactgaggagcaaacaacagttattcttgttgttttcaaggtgcttcttcatctcccattacataaagctctgccagctcatatgtcaactgtattgcaaactattaacaggttgcggttttataggacacaagacatatcaagcaaggcgaggaacctcctctccaggttgagcaaagtgcttgtaagaagtcaggcattgaagaaatctcagaaggacttaatctgtaaacaaaggataagtgaaattctccgtgatgagtcttggaaatctgaagttgatattactgaggacatccttgccttgactgatgatgcaagtgagagcagaatgcctgagcccagaaaaacgccattgctgctcactgcttctgcggacgaatcaaataaaaagagttctctgcagacaaaatccaaagagaaaaggaaagttctacttgtagaacatccaaatcggaaagctgctggcaagaatgttaaccctgtcagaagcacatctacgaacaatagtagaccgttatctgcagatgatatccaaaaagcaaagatgcgtgccatgttcatgcaggagaaatatggcaaggttgacacaagcaaagtgattgaaaaacctcatatgatggaaattcaaaaaccgtctggcttagttgattcaaatgtaccgcttgtgcccagaacccctcttacttcaatcattaaacaacctgttgaccctagcccatcaacctctaaacaaagtacactatctccacctgataagccagaaattgcagttagcttgaagctgaacgtaacagccaaagaaaactttatagagaaattggattccaagagagttatttggcagataccaccagcttggaacaagcatcctgctatcaaattgttggaagagcaggggatggcaattttctgtagtgatatgagaattgagaagttaccagtcattccccataaacaaacatggggcagctattaccataatttcaggcagttcattgcaacagttcctctttttgtaggaaggcttgcaaaggtttggatagaccctgcttggagtttaggtgctggagagaacagcaaagaatttgaggtccaaacccagagaaacaggcgtgagaaggaaaccttttatgctagtctaaaggacataccgttgaatccaaagggcccatgggatgtggaaatggactttgatgacagccttacaccggaaattccaattgagcagccaccagatgctgacgctatggaaacggatagcgtgagcacagcccctccaaacattgtggttcctgttgtggacaagcaaataggatcaacctcatcagtatctccagcagttgctgctggtgcgaacggtgcaacttctgaaccagatcttgagctgcttgcggtgctgctcaagaatccacaacttgtctttgctctaacttctaatcagggtgggaccctgccaagtgagcagaccgttgcacttctggacatgttgaagcagactggccttggactatcagagctggtaaatagcctggccaacaattctggggtccaaaaagagcccgaatctggtcctgaagctatccctgcttcgcttccatcgccaactcctccaaaagacctgatagccagggatggctggagttcagagttcccatcacaagtgaggacccaaaacttgcagcacgcccatttgccaaacagagcaaatgcacctcctgttgcaagcagcgtgcagcaaagtttctcaaatgttgtcagttcgttgccttcacaaccttatgcttcagcttctgctttgccggcacagactcgaactaatatgacatctctcccccagtcgatgatctccgtaaatccgtcaactcaacatgttgctcctatgaataatcttctgagcagagccacggtacaccagcacacccaatcatatgctttaacgtctgatcctgttgcagtggcggtccatcatcagccagcggtgaacaaactagcccatgaggttcagagcatctcacaccctgctgtatcacattcttcggtggctgaatcacatgcctcttacacatcatacacctggcaatctagtgttgctaccattgccgccactgggcgaaatgctacacctgatcgatgggctgcacctgcacgcactactaattcctttaacgctgccccatcaaattcaaaccatgtgacgtatcctaaccagaatgcttacagtaaccacagcacacaagctactacatacaattcttatggttcagctccagtctcgtcccactccctccacccagggcagggactggaccgaaatggctacactcacgcagcggagtaccagacgacaatggcgcgagacgccctatggcggaactcgcggtctcctgagcttggtgctggtgctgtgtatggtagtagctcacaaggctatgttcccgagccctcaaggcagtggaactacgggcagcagagctacaatcctgagccttattctaggcagtggagttctgggcaacaaagctacaacactgtcactgctgagccttccaggcagtggagctccgggcagcagagctacagcaacccagctgagccttcaaggcagtggagttcatcagcacatgcacaaccaagctacaaccctgagccttcaagaccctggaattcaggtcatcagagtcaaaaccctgaggcatcgaggcaatggagtcatcatcatggaaagcaagaacgttataatccgacagatggtagaaattcttatgatcaacattggaggagatga

SEQ ID NO: 12047 - DNA, 1074 bp, Oryza sativa
  Clone ID: TFbOSC401196j.C1.o32.fg
atggatacatatggatggatgatggaatggaaggtggacagacgttaccggcgataccgtgagcagatgagggcggtggaggtgtcgttcgaggcggtggccggcggcggcgcggcgcaggtgtacacgaagctggcgatgcgagccatgtcgcggcacttccggtgcctgagggacgcgctggtggggcaggtgcgcgcgctgaggaacgccatgggggagagccagagggacgccgccggcggcgtggcggcggcggcgcccggtgccaccaagggcgacacgcctcggctgcgggtgctggaccagtgcctgaggcagcagagggcgttccagcagtccggcgccgtcgacagcttcccgtggcgcccgcagcgcggtctgccggagcgcgccgtcgccgtcctccgcgcctggctcttcgagcacttcctccacccgtatccaaatgatgtggacaagcacattttggcgcgccaaacaggcttgtcaagaagccaggtttcgaattggttcatcaatgcaagggtgaggctatggaagcctatgatagaagacatgtacaaggaagaaacgaagccggaatcatctgatggcaacaacaaattaaaccctagcgcagccggcaacaaacagcagcatcgagatgatcccaagaagaattacacggcaacgacagcagaagccagcttagtacaacaaagcagctaccatctccaccttcgcagcagcggaaaccgtaactcctcctcgttgatgatccctgcagcagcatcaacatccatcgatcatcaccatgacagcagccaccagctgttgggcggccatagctattcttcagcagcaggattgcatcatggtcatggcggcgccgtgtcgcttactctagggctccagcagcagcagcagccatttgcggcgtcgatgatgcatcagcatcagcagcaccagcaccagcaccagcagcagcagtcattcatggtggaggcggcggaggaagaagaagatgacgtgctcccttacaggaacctcatggagtctcagttgctgcatgattttgcaggagctagctaa

SEQ ID NO: 12048 - DNA, 996 bp, Oryza sativa
  Clone ID: TFbOSC22451j.C1.o13.fg
atggcgttccactaccaggaccacgcgctggcgatggacgccgcggctgcggcggcggagacgggcggccaccaccaccctgggttcgtcggggcgggaggagttgtggggggaggaggaggaggagggtgggagcgggagaaggccgccatcgcggcgcacccgctgtacgagcggctgctggaggcgcacgtcgcgtgcctccgcgtcgccacccccgtcgaccagctgccccgcatcgacgcgcagattgcggcgcgccccccgccgctggccgccgccacggccgcagcggcggccgcggcggccggaggggcgccgtccggcggcgaggagctcgacctcttcatgacccattatgtattgctcctttgttcgttcaaggaacaactacagcaacatgtgcgtgttcatgcaatggaagcagtaatggcttgctgggaacttgaacaaactttacagagccttacagttgtgactcttactgcaggggcatctcctcgtgaaggttctggagcaactatgtctgatgacgaagacaatcaggttgatagtgagagcaacatgtttgatggaaatgatggatcagatggtatgggctttggccccttaatgctgacggagggcgagagatcattagttgagcgtgtacggcaagagctgaaacatgagcttaaacaggggtacagagaaaagcttgtggacattagggaagagatactccgaaagcgaagagctggaaaactcccaggagatacagcgtctactttgaaagcatggtggcaggctcactctaaatggccatacccaactgaggaggacaaggctcgcttggtgcaggaaacagggttgcaactaaaacagatcaataattggtttatcaaccaacgtaaacggaactggcacagcaatcctgcttcatcctcatcagacaaaagcaagagaaaaagaaaaagaagcaatgcaggtgatggcaaggccgagcaatcttggtag

SEQ ID NO: 12049 - DNA, 1041 bp, Oryza sativa
  Clone ID: TFbOSC401247j.C1.o8.fg
atggtggccagcaagcagctccactcgcagcgatgtggcggccactactgccagctgcaccaccaccggccggaggagatcgccggcgccggtgccgagagccaccggagggacgggtcgagcggctgcggcggcgctggtccgatggtcgtgctgaccctcgggtccggcgccgcggcggctgaagacgacggtggcggccgctcgcgctgctgctgcggtgccggtggcgccgcgccggcgacgatggtttccgcgttgcgtggttcgaggtacctgctgccggcgcaggagctgctccgcgaggcggtgtccgccgccgccgccagcgcgcgaggtggcgacgacgacgacgaggcggtggcgagcttcccgcacgacggcaagagcaccggcattggcggcggcggcggcggcgtccaagccaagctcctcagccttctcagcgagctggagagccggcacgagcactacttcggggagctgaggcgggtgtcggcgtcgttcgagccggcgctgggcgccggcgccacggccgggtacacggcgctcatggcgcaggccatgtcgcaccacttcggcagcctgcgccgcgccatactgcgcaagctcaggctccacgccgccgcggcggccaggacgaggtcggcgttgctgcggctggcccgggacgccatggaggaggacgacgagggcgacggcgaggaggaggaggaggtggtgaacagggtggtccggcggacgaagcaggcggcggcggcgagggcggagcaggcgtggaggccgctccggggattgccggaggacgccgtgggcgtgctccgggcatggctcttcgaccatttcctccacccgtatccgaatgacaacgagaagctcatgctggccgtggctacgggtctaagcagaacccaaatatcgaactggttcatcaacgcgcgagtgcggctgtggaagcccatggtggaggagatgtacaacgacgagttcgacgacgacgacgccggcagcggcggcggcggcgcttcgtcctcctcgtga

SEQ ID NO: 12050 - DNA, 921 bp, Oryza sativa
  Clone ID: TFbOSC400780j.C1.o16.gm
atggagatgggcgtggggtcgttcaccggcggcggaggaggcggggagtgctcgtcgtcgtcggcgacggcggcggctgctgcggcggctgcggcggcggcggcggcggcggaggcggaggagcggcagctgctcaagggggagatcgcggtgcacccgctgtgcgagcagctggtggcggcgcacgtgggctgcctgcgcgtggcgacgcccatcgaccacctcccgctgatcgacgcgcagctcgcgcagtccagcggcctcctccactcctacgccgcgcaccaccgccccttcctctccccccacgacaagcaggagctcgactccttcctcgcgcagtacatgatgctgctgtgctcgttcagggagcagctgcagcagcacgtccgggtgcacgccgtggaggccgtcatggcgtgccgcgagatcgagcaatccttgcaggacctaaccggtgcaactttggaggaagggacaggggcgaccatgtcggaggacgaggatgagacggcgccgatgctggagggcccgatggatatgggctcggacgggcacgacctcatgggcttcggcccgctcatgcccaccgactccgagcgatccctcatggagcgggtcaggcaagagctcaagattgagctcaagcagggcttcaagtcaaggattgaggatgtgagagaagaaatattgaggaagaggagggcaggaaagttgcctggggacaccaccaccatactcaagcaatggtggcagcaacactccaagtggccataccccacggaggatgataaggcaaagcttgttgaagagactggcctgcagctcaagcaaatcaacaactggttcatcaatcagagaaagcgtaactggcacaacaactcacagacatcaacccttaaatcaaagcgtaaaaggtaa

SEQ ID NO: 12051 - DNA, 614 bp, Oryza sativa
  Clone ID: TFbOSC900358j.C1.o14.hg
agcctgagcggaaggcgcggctggcgcgcgacctcggcctgcagccgcgccaggtcgccgtctggttccagaaccgccgcgcgcggtggaagaccaagcagctcgagcgcgactacgccgcgctccgccattcctacgactccctgcgcctcgatcacgacgcgctccgccgcgacaaggacgccctcctcgccgagatcaaggagctgaaggcgaagctcggggacgaggaggcggcggcgagcttcacgtcggtgaaggaggagccggcggcctccgacgggccaccggcggcgggatttgggtcgtccgacagcgactcaagcgcggtgctgaacgacgtggacgcggccggcgccgcgcccgcggcgacggacgcgctggctccggaggcgtgcacgtttctcggcgcgccgcccgccgcgggcgcgggcgcgggcgcagcggcggcggcgagccacgaggaggtgttcttccacggcaatttcctcaaggtggaggaggacgagacggggttcctcgacgacgacgagccgtgcggcgggttcttcgccgacgatcagcccccgccgctgtcgtcgtggtgggccgagcccacggagcactggaactga

SEQ ID NO: 12052 - DNA, 1785 bp, Oryza sativa
  Clone ID: TFbOSC400320j.C1.o15.fg
atgagcggcaatccatcgttctcgcagctcggtgcggtggacgccgccatgaacggcggctacttcatggcggcgagcggcaatggcgccgacgtgccgctgttccatccggccatggcgccgccgcatgatcacggcgggagcttcggctacggcgacgcggcggcggcggcgatggacgtcggcgcgcacttcgcggcggcgaacaacctcgtgctcgcgtccctggcgacccagctgttcggcgccgcgccggcggcggcggcgcacgggcatggcgactacctcggcgcgacgacgccgccggaggaggagatggggggcgggtacgacgtcgccgtcggcgacagctccggcggcgcggtgagcctcgcgtgcctcggccacggccagccgggcgacatggcggcggggtggtgctcgacgtcggcgaggaagccgagctgcaactggagcagcagcaacgccggtgtgcacggtggttcgtattacctcgccggggtgccggaggctgccggcttcgtgtccgcggcggcggcggcgagcgagctgtcgctgagcctgtgctccaagtcgtcctcggacagcatgctcaacgccggcggcgaccagtgctcgtcggcggcgagccgttccgggctgacgcagatgagcagggtggtggtggtggagcccgagccgccgctcgtaccgtactacccggcggcgaacttcgccgtggtggtggcgcggtcccgatacgccgcggtggcgcagcaggtgctcaacgacgccgtcggctgcgtgctgggcggcgtcgcggacgccgccgccgactcggccagcggcgtcgacagcggcagctcgaggccgtcgagctgctcggtggccggcggcgcgccgtcgtccgccgtgagctccaacaaccagctcatcgcctcctccggcgagcacacgcacggcggcggcgacgcttcggctcagcggctcaggagcgagctcctcaccatgctccagctggtgagctcgcccttctccacacgactcccgaggcatcagttcaagcaaatttcgtactaccatttcgaatcaaatttgaaaccatcttttgacgacgatacgaattcaaatgcgcagatggatcagaagtacaaccaatgcctcgacgagatccagagcacgacggcgaggttcaacaccctgacgcacgccacggcgcgcgccgccgggatgagcagcagcagcatctgcgcgccgttcgcgcaccgcgccgtgtcggcaatgtaccacggcctgaggcgccgcattgccggcgagatcatgtccgccgccgccgcggccggcaggccttgccgcggcggcgagtcgtcgtcggcggtgaccggcggcgagagggagcggagctgggagtcggcgttcatccagaagcactgggcggtgcagcagctgcggcgcggcgagcagcagtgctggcggccgcagcgcggcctcccggagaagtccgtcgccgtcctcaaggcctggatgttcgagaacttcctccgcccgtatccgaaagacagcgagaaggagatgctcgcagcaaggagcggcctcagcaggaaccaggtgtcgaattggttcataaacgctcgagttcggctatggaagccaatgatcgaggagatgtgcgaggagctgaagaggagctcgggtggtggtgctggaaatcaagctctagcaatggagcatatgaacagccaagatgtggtacaaaaatgtggtgctggtttatctgcatttgcagcactgaatccagctacctga

SEQ ID NO: 12053 - DNA, 375 bp, Oryza sativa
  Clone ID: TFbOSC401238j.C1.o6.fg
atgtcatcctctctctttcttcttcctcctctctttctttctctcttctctccccttcggctagccgcagggagcacgggctggggcggtagtgggcggggacaagagaggcggagggagctgaagcggcgccggcggcggcacacgctctccagcctcagcggcaagcgtggtgcgccatctgccgctgccgccgccgtcggcggcagcgacgacgaggactccgacgacggatcccgcaagaagctccgcctctccaaggaccaagccgccgtcctcgaggacaccttcaacaagcacaacaccctcaaccccaagcagaaggcggcgctggcgaggcagctgaatctgaagccgcggcaggtggaggtgtag

SEQ ID NO: 12054 - DNA, 606 bp, Oryza sativa
  Clone ID: TFbOSC900153j.C1.o1.fg
atggatggggaggaggacagcgagtggatgatgatggacgttggagggaagggcgggaagggcggcggcggcggcggcgcggcggacaggaagaagcggttcagcgaggagcagatcaagtcgctggagtccatgttcgcgacgcagaccaagctggagccgaggcagaagctgcagctcgccagggagctcggcctgcagcctcgccagctggagaagctggcggagatgctgcaggagccacgggggaagtacggcgataatgccggggacgacgcgcggtcgggcggcgtcgccggcatgaagaaggaggagttcgtcggcgcgggcggcgccgccacgctctactcgtcggccgagggtggcgggacgacgacgacgacgacggccaagttgatgccccacttcggcagcgacgacgtcgacgcggggctcttcctccggccgtcgtcgcagcatcatccgccgccgccgcacgccggtgccggcttcacgtcctccgagccggccgccgaccaccagtccttcaacttccactcgagctggccgtcgtccacggagcagacctgcagcagcacgccatggtgggaattcgagagcgagtga

SEQ ID NO: 12055 - DNA, 1857 bp, Oryza sativa
  Clone ID: TFbOSC400292j.C1.o1.fg
atgtccactagcagcaatccatcctatcaccagctgggcctcgacgccatcagctgctgcttcgtcgccggcggcggcggtgcagaggcggcggcgccgttctttggttttgggttcggggatgtggacggcgagttcttggtcgcctcgccggtggctgctgttggcgacgagctggcgtgcgccgtgcctctgcggcggccgcaggggagcgtgtcggaggaggaggtgaatgccgccgcggtcgccgccgccgcggccggtggcgcggagagctgcagcaccgtgcactcggtgctgggttcggtggagtttgggtgtggaacgtcgtcgggtgtcaccattgctcaggcgtcgaggatgggaaggctcgccggagaggcgccgtgcggcgacgccggcggcggcggctggatctatggagggtccggcattgcgccgttacatggtgcgtactacctgtccgggttctcctccggcgccggcgccgggttcttgagccctttcgccgcgagctccgtggcggcggcggcgcccgcggcgagcgagctgtcgctgcggctcggcgccaccaagtgttcgtccccgagcagcatggcgaacgcgtcgtcggaagtgagctgctccggcttaacccacgtgagcagcggaggcggcctcggctaccaccaggcagcagccgccggcgccggcgccgccctgttccaccccactcacggcgacgacgccgcagccgccgccgccggcgagctaaggcaagcgtaccactcgagggcgcctccgcatttctcgcaggtggtgtcgcggtcagcggtgctcgcgcacgtcgcgcaggagctgctcaacggcttcgtcgcctgcctgctgcaagacgtcgccgcggacgcggccagcggcgtcgacggcggcgaggcgagccaggcgctcctcgtcgggcttttcggcgaggatcacgacggcgccgacggaggatgcctcacccgggagcggcggtgcgaggtgggcggcggaggcgcagcgtctgaggaagctactccaactggtgagttcttggctcagttcctcgtcgaacacctaagaaaccgtttcttggtgcgaaccaatggcgatgagatgcaggtggacgagaagtgcaaccaatgcgtcgaggagatgcagagcacggcggcgaggttcaacagcatggtgcgctccaccggcggcggcggcggcgggctgacggcggcgttcgcggggcgggcggtggcggcggcgtacaggagggtgaggaggcgggtgatgggacagctggtggcggcggcgacggcgaggtcgtcgtcgtcggcggcggcggcggcgctggaggagaaggagcggagctgggagtcgtcgttcatccagaagcactgggcgatgcagcagctccggcgaggtgaccagcagtcgtggcggccgcagcgcggcttgccggagaagtccgtcgccgtgctcaaggcctggatgttcgagaacttcctccgcccgtatccaaaggacagcgagaaggacatgctggcggcgagaagcggcctgagcaggagccaggtctcaaactggttcataaacgcccgcgtccgactgtggaagccgatgatcgaggacatgtacgaggagctcaagaagacctccggaggaagcgatggcgcagcagagattgagcatcttagcagcaaagatgtgctcagtttagaaaggtcaaaaaagccatcacatttggctgttcagtgtgatggaaaacaccatgacagattcgcagtcactcagatggagggagtgtttgaagagaaggggattgaggagattgggaagatacgcaaaacgagggttgtaatattgtag

SEQ ID NO: 12056 - DNA, 556 bp, Oryza sativa
  Clone ID: TFbOSC8589j.C1.o1.np
ccgaaagcgtgcgcggagggaatgtgcggtgggagcggcggcggaagcaaagggggaggtgcggcgaccccttcgacgcggtggtgcccgacgccggagcagctgatgatcctggaggagatgtacaggagcggcgtgcgaacgcccaacgcggcagagatccagcaaatcacggcgcacctcgcctactacggccgcatcgagggcaagaacgtcttctactggttccagaaccacaaggcccgcgagcgccagcgcctccgccgccgcctctgcgcgcggcaccagcagcaaccctcaccgccctcctccacggtgcctccggctcccactgctgctgctgccggtgccgtcgtgcaggtgcaccccgcggtgatgcagctacaccaccaccaccaccaccatcacccatacgctgcggccgccgctgcccaaagtcatcacctgcagcagcagcagcagcagcaagctgagtggccggcggcggtggactactgcagcactgcatcggcgtcagcgtcggcaactgctgctgacatggcgatcccgccgtgct

SEQ ID NO: 12057 - DNA, 870 bp, Oryza sativa
  Clone ID: TFbOSC32301j.C1.o11.fg
atggatcacatgcagcagcagcagcggcagcaggtgggtggagggggaggagaggaggtggcggggaggggtggtgtgccggtgtgccggccgagcgggacgaggtggacgccgacgacggagcagatcaagatcctgcgggagctgtactacagctgcggcatcaggtcgcccaactcggagcagatccagcggatcgccgccatgctgcgccagtacggccgcatcgagggcaagaacgtcttctactggttccagaaccacaaggcccgcgagcgccagaagaagcgcctcaccacgctcgacgtcaccaccaccaccgccgccgccgccgacgccgacgccagccacctcgccgtcctctccctctcgcctacagcagctggcgcgacggctccctctttcccgggcttctacgtcggcaatggcggcgccgtgcagacggatcaggccaacgtcgtcaactgggactgcaccgccatggcagccgagaaaaccttcctgcaggactacatgggcgtgagcggcggcggcggcgccgccgcggcggccccgacgccgtgggcgatgacgacgacgactcgcgagcccgagacgcttccactcttcccagtcggcggcggcggcggcgacggcgcgcatcgtcacgccggccacggcggtttcccgtccaacttccagcgctggggttctgctgctgctaccaccaacaccattacggtccagcagcatttgcagcagcacaacttttacagcagcagcagcagccagctgcacagccaggatgggccggcagcaggcacatccctggagctcactctcagctcctactactgctcatgctcaccttaccctgcagggtccatgtga

SEQ ID NO: 12058 - DNA, 870 bp, Oryza sativa
  Clone ID: TFbOSC401125j.C1.o10.fg
atggatcacatgcagcagcagcagcggcagcaggtgggtggagggggaggagaggaggtggcggggaggggtggtgtgccggtgtgccggccgagcgggacgaggtggacgccgacgacggagcagatcaagatcctgcgggagctgtactacagctgcggcatcaggtcgcccaactcggagcagatccagcggatcgccgccatgctgcgccagtacggccgcatcgagggcaagaacgtcttctactggttccagaaccacaaggcccgcgagcgccagaagaagcgcctcaccacgctcgacgtcaccaccaccaccgccgccgccgccgacgccgacgccagccacctcgccgtcctctccctctcgcctacagcagctggcgcgacggctccctctttcccgggcttctacgtcggcaatggcggcgccgtgcagacggatcaggccaacgtcgtcaactgggactgcaccgccatggcagccgagaaaaccttcctgcaggactacatgggcgtgaccggcggcggcggcgccgcagcggcggccccgacgccgtgggcgaggacgacgacgactcgcgagcccgagacgcttccactcttcccagtcggcggcggcgccggcgacggcgcgcatcgtcacgccggccacgccggtttcccgtccaacttccagcgctggggttctgctgctgctaccaccaacaccattacggtccagcagcatttgcagcagcacaacttttacagcagcagcagcagccagctgcacagccaggatgggccggcagcaggcacatccctggagctcactctcagctcctactactgctcatgctcaccttaccctgcagggtccatgtga

SEQ ID NO: 12059 - DNA, 603 bp, Oryza sativa
  Clone ID: TFbOSC401161j.C1.o1.fg
atggaggctcttagcgggcgagtgggggtgaagtgtgggcggtggaacccgacggcggagcaggtgaaggtcctgacggagctgttccgagcggggttgcggacgccgagcacggagcagatccagcgcatctccactcacctcagcgcattcggcaaggtggagagcaagaacgtcttctactggttccagaaccacaaggcccgcgagcgccaccaccacaagaagcgccgccgcggcgcctcctcccccgacagcggcagcaacgatgacgatggccgcgccgcagcccacgagggcgacgccgacctcgtcctgcagcctcctgagagcaagcgggaggccagaagctacggccatcatcaccggctcatgacatgctacgtgagggatgtggtggagacggaagcgatgtgggagcggccgacgagggaggtggaaacgctggagctgttcccactcaagtcgtatgacctcgaggtggacaaggtccggtatgtgaggggcggcggtggcgagcagtgcagggagatctcgttcttcgacgtcgctgccggccgggatccgccgctggagctcaggctttgcagcttcggcctctag

SEQ ID NO: 12060 - DNA, 855 bp, Oryza sativa
  Clone ID: TFbOSC401921j.C1.o7.fg
atggaccgcactgcgactgcaagctgggaggtcatgagccggcgaggtgagcagcagcagcagctgatgatgcaagctccggccagccataatggtggcagcggcggcggcgagccggcgaggtcgcggtgggcgccgaagccggagcagatcctgatactggagtccatcttcaacagcggcatggtgaacccggccaaggacgagacggcgcgcatccgccgcctcctcgagcgcttcggcgccgtccgcgacgccaacgtcttctactggttccagaaccgccgctcccgctcccgccgccgcgcccgccagctccagcaagcctgcggcgccgccctccatcagctcccctccgccgccgccgccgccggagccggaggaggaggagattactatcaccaccaccaccaaccttcgtcttctcctttcctcatgcacggcggtggcggcggcggcgtggtcacttcgacgaccgcggcgccagcggtggcggcgtccggccacttcttggcggacgaggtcgacggcggcggcgacgacgacctcttcgccatctcccggcagatgggcctcatggctcgccacggcggcggcgaccaccattacagcagctacgcggacagcgacgccacccagctcagctaccaaccaaccgggacgatccaagtgttcatcaatggcgtcgcatacgatgtgccgagcggcggagcgctggacatggccggcacgtttggccgcgacgccatgctggtgcactcctccggcgaggtccttccggtggacgagcacggcgtgctcatcaacagcttgcagatgggggagtgctactacctggtttcaaaatcgatctga

SEQ ID NO: 12061 - DNA, 993 bp, Oryza sativa
  Clone ID: TFbOSC19014j.C1.o1.np
atcgtcgtcgtcagccatggctccatctctcatgcccatcctcctgctcccagctaattgacccacaaacatacaatgccaacattgttgcacgataagcatgcaactccagcaaatgggtatcttcctttgccatcacctcagcaacagcgattttgcggcagattgcagcaaaatcagaacaactatcccgcccggaaatcgaacaaaccaaacaaaaataagagaaatacactagaggatgatattggcggtggtggtgaagacgatgacgacgcgctggaagcactttttaagcagttggaagaagatctcaagaatgatgatttgtctgttgaggatgatgacgatggaatttcagaagaagatatggcaagatttgagcaggagttggcagaggcaatcggggatattgctgatgctgatgaatctggagagggttcgtcattaggctctgaggcttatgggaatgatgaaaaaacggatgaaatcaaacggccagagctgaaaaactggcaacttaagaggctggctcgtgctctcaaaataggtcgccgtaaaactagtataaagaatcttgcaggggaactaggcctggataggactttggtcattgaattgctccgaaatccacctccaaaacttctattcatgtctgattctttgcctgatgaagacccttctaaacctgaaatcaaggaaatagagccctctccagtagttgataacgctgatgtcactgaaaccaagccacagacggaacttcctgttcatgtcatgtgcgcagaatggtcttcacagaaaagattaaaaaaggtgcaactggagacattagaaagagtctactcccgaaccaaacgccctacaaatacaatgatcagcagcatagttcaagtgacaagccttccacggaagaccattgttaagtggtttgaggatagaagggaacaggatggggtacctgaccatcgagttgcattcaagagatcccta

SEQ ID NO: 12062 - DNA, 1545 bp, Oryza sativa
  Clone ID: TFbOSC33862j.C1.o2.fg
atggcggcgatggtgggggcgccgctcgccgtggccgcggccgccgccgcgccaggggcgcgagtgttcctggcacggccgctcctccgccgctcgccgcggggcgtcgcctgcgcccttcgccggaggccctccaagtacaagaataaaatccagaatgaggaggttgtagtagaggatgatattggcggtggtggtgaagacgatgacgacgcgctggaagcactttttaagcagttggaagaagatctcaagaatgatgatttgtctgttgaggatgatgacgatggaatttcagaagaagatatggcaagatttgagcaggagttggcagaggcaatcggggatattgctgatgctgatgaatctggagagggttcgtcattaggctctgaggcttatgggaatgatgaaaaaacggatgaaatcaaacggccagagctgaaaaactggcaacttaagaggctggctcgtgctctcaaaataggtcgccgtaaaactagtataaagaatcttgcaggggaactaggcctggataggactttggtcattgaattgctccgaaatccacctccaaaacttctattcatgtctgattctttgcctgatgaagacccttctaaacctgaaatcaaggaaatagagccctctccagtagttgataacgctgatgtcactgaaaccaagccacagacggaacttcctgttcatgtcatgtgcgcagaatggtcttcacagaaaagattaaaaaaggtgcaactggagacattagaaagagtctactcccgaaccaaacgccctacaaatacaatgatcagcagcatagttcaagtgacaagccttccacggaagaccattgttaagtggtttgaggatagaagggaacaggatggggtgacttttagtactctattagatcaaacccatgctttgccttactttaatcgaaatcgtgttgctattttcaatatggagaaatttcggagttcatcagaaggaaactatgtggaaacaggggagggaggtagcatctggggacctgcaaggctgcaacacagagatagtgagagaggagtggtggttttggtggtgcagatgatggctggcttgcaaagatcagcgacaacattcagaaggtccggttcgtcaggcctggtctgggacgagcggttcttgaccgaggacgcagaggcggccaaggccggcgatggcgatggcggtggcggcacggaggagccccagccggagctccggcattccaagagcgtcgggagcatcggcatgatgcgccgtgtcgctgccgacgacggcgacgacagcgagaagacgacgaagcagcagaggaagaagaagaagaagaagaagaaggacggtcagaaggaggacgacaaccgcagccagcaggtgttcaggaccaaggacatcgccccggacgtcgacccgccgtcgccgagggtgtccggctgcatcctctgctccatcttctccggctccggctcgtcgtcgtcggcgacgtcgcgccgcgccaagccgaggaagaagtga

SEQ ID NO: 12063 - DNA, 1806 bp, Oryza sativa
  Clone ID: TFbOSC401166j.C1.o11.fg
atggcgcacgatccgagcctagggtacgcggattacttcgcggcggaggtggatggcaccggcgccacggagttgtatgggttgcagcagcatcagcagggggttggggtggcggagatgttcggggtgagggggctcatgccggcagcgcacgcgcacgagcagagcaagggtgtgggcgcgctcgtcgtcggcggcggcggcgtcgatgatggaggcgcgacgacgctgccgacggtccacttcggcgggctcggcgagctgcaccaccaccaacaccggcagagccaggcgccgctgtccctctcgctccacaggccggaggcggccgcgacgtcgctgctgatgcagcagcagcagcagcacctccaccaccagccgtcgccgccggcgggcgcggcgtcgacgtggcagctgcagcagggtgcgtggcatctccgcggctcaaggttcctcctcccgacgcagcagctcctgcaggagttctgcagcctccccgtgaagagcaccaccagcccatcatcggcaagcaaggcaaccaaaccgccgcaagaagaggccgccagcggcggaggctcgtcgtcgtggaccgcgccgacgcagatccagtccatggacgcggccgagctgcagcggctcaagggcaagctctacaccatgctcgaagaggtggataggaggtacaggaggtactgcgagcagatgagggcgctcgcggcgtcgttcgaggcggtggccggggagagggcggcggcgtcgtacacgcggctggcgtcgaggacgatctcgaggcacttccggagcctgagggacggggtggtggcgcagctgcaggcggtgcggaagcagctcggggagaaggacacggcggtgcccgggatgaccaagggcgagacgccccgcctccgggtgctcgaccagtgcctccgccagcacaaggcctaccaggccggcatgctcgagagccacccatggcgcccccagcgcggcctccccgagcgcgccgtctccatcctccgtgcctggctcttcgagcacttccttcacccaagaatgtttgccggtttcgtgacgatgctcaagctctcaccgcggtacccaagcgacgtggataagcacatcctcgcgaggcagaccgggctatcacgtagtcaagtggcgaattggttcatcaacgcgagggtgaggctgtggaagccaatggtggaggagatgtacgcggaggagatgaaggacgaggagggcagtggacagtccacgcaggcgagcaacccgcagaaccctaaccctagcagctacacgtcggaggtgcgcggcggcggcggcggcggcgaggaccgcggcgagcagaagccgtcgcgggcgcagctgctgcacgacgccggctcgctggcctccgtcgtgagcatcgggcacggcggcgcgggacggacgatggtcgatcaccaccatcaccagagccttaattttggcacgatggaccagctcgacttcgacgcgtacgaggcggccggcggcgggcaggggttcggcgccggcggcggggtgtctctgacgctggggctgcagcagcagcacgcggacccgcacgacggcgtgaacgtcgcgttcgccgccgccgcggcgccgcccaattcgtccggtgtcgccgcggagtacctattcatgggcggcggcgagcatcagcagcagctgcctcaaaccgcccagttcggcgccgtcatggaaggcgacgccgcgtcgcactaccgtggcctcagcgccaccgccgccgggttccacctcctccacgacctcgccgggtga

SEQ ID NO: 12064 - DNA, 921 bp, Oryza sativa
  Clone ID: TFbOSC9739j.C1.o1.fg
atgatggccttaggcgtgccaccgcctccctcgcgcgcctacgtgtccggcccgctacgcgacgatgacacttttggcggtgatcgtgttcggcggcggcggcggtggctcaaggagcagtgccctgccatcattgtccacgggggtggcaggcgtggaggggtcggccacagggccctggctgccggagtctctaaaatgcgtctcccagccctaaacgccgccacccaccggatcccctccacctcgcccttaagtatccctcagaccctcaccatcacccgcgatcctccctacccaatgctgcctcgaagtcacggccaccggaccggcggcggcggcttctccctcaagtcctcgcccttctcgtcagtgggcgaggagagggttccggacccgaagccgcggcggaacccgcggccggagcagatccggatcctggaggccatcttcaactccggcatggtcaacccgccgcgcgacgagatcccgcgcatccgcatgcagctgcaggagtacggccaggtcggcgacgccaacgtcttctactggttccagaaccgcaagtcccgctccaagaacaagctgcgctccggcgggacaggccgcgcggggctcgggctcggcggcaaccgggcctcagagccgccggcggcggcgacggcgcaccgggaggccgtggcaccgtcgttcacgccgccaccgatcctcccgccccagccggtgcagccgcagcagcagcttgtctcgccggtggcggcgcccacctcgttgtcgtcatcgtcctccgaccgctcgtccgggtccagcaagcccgcgagggctacgttgacgcaggcgatgtccgtgacggcggccatggacctgctctcgccgctccgccgatcagctcggccacggcaagagcagcgccatgtctag

SEQ ID NO: 12065 - DNA, 305 bp, Oryza sativa
  Clone ID: TFbOSC9739j.C1.o2.np
atggagacagggatttttatacaggtttgggcccttgaattgtcagtcgacaacaggatagcctttctccttaaatccgtgcccggcgagatcaaagatagcactttcatctctcctgacagtatccggagacaccgtagggtactagccgtgcttatccctaaagtcaatattcggcgacgtgtcttggtgtatgtaggcttttatgttgtggcttctatatcgattgtgttgggttgtttccgtataagacatgatatgtgatgggtcctgccgagatttagtcaactactattaggtatgtg

SEQ ID NO: 12066 - DNA, 1659 bp, Oryza sativa
  Clone ID: TFbOSC413563j.C1.o7.fg
atggcctcaccgaacaggcactggccgagcatgttcaggtccaatcttgcctgcaacatccagcagcagcagcagcctgacatgaacggcaacggcagctcgtcctcttccttcctcctctcgccacctactgctgcgaccaccggcaacggcaagccctccttgctctcctcagggtgtgaggaggggacgaggaatccggagccgaagccgcggtggaacccgaggccggagcagataaggatactggaggggatcttcaactccgggatggtgaacccgccgcgcgacgagatccgccgcatccgcctgcagctgcaggagtacggccaggtcggcgacgccaacgtcttctactggttccagaaccgcaagtcccgcaccaagaacaagctgcgcgccgccggccaccaccaccaccacggccgcgccgccgccctgccgcgcgcgtcggcgccgccgtcgacgaacatcgtactcccctctgcagcggcggcggcgcccttgacgccgccgcggcgccatctcctcgccgcgacctcctcctcgtcctcctcctccgaccgctcctccgggtccagcaagtcggtgaaaccagctgctgccgcgctgctgacgtcagccgccatcgaccttttctcgccggcgccggcgccgacgacccagctgcccgcgtgccagctctactaccatagccatcccacgccgctggcacgtgatgatcagctcatcacctcgccggagtcgtcgtcgctcctcctgcagtggccggcgagccagtacatgccggcgacggagctcggcggcgtcctcggctcgtcgtcccacacgcaaaccccggcagcgatcaccacccacccatcgacgatctcacccagcgtgctcctcggcctatgcaacgaggcactagggcagcatcagcaagagaccatggacgacatgatgatcacctgctccaacccctccaaggtgttcgaccaccattccatggacgacatgagctgcaccgacgcggtgagcgccgtgaacagggacgacgagaaggcgaggctggggttactgcactacggcatcggcgtcactgctgctgcaaatccggcaccacatcatcatcatcatcatcatcatcttgcctctcctgtgcatgatgctgtctcggctgcagatgctagtacggcggccatgatccttccattcaccaccactgctgctgcgacgccgagcaacgtcgtcgctacaagctctgcactcgctgatcagttgcaagggcgtttgttccgagattggacgtgtgcatggcatccttcttctcaaaaagatgctttcaacatcgcctctctctctggcttggatttccgcatgcatagatatgctagctttttggcagtcataaacttgccagagggaggggcggcgccgccgccgccctcggcgacggtggtggcggtgagccgcgacgacgagacgatgtgcaccaagaccacgagctacagcttcccggcgacgatgcacctcaacgtgaagatgttcggcgaggcggccgtgctggtgcgctacagcggcgagccggtgctcgtcgacgactccggcgtcaccgtcgagccgctgcagcagggcgcgacctactacgtgctggtatctgaggaagctgtgcattga

SEQ ID NO: 12067 - DNA, 1524 bp, Oryza sativa
  Clone ID: TFbOSC400934j.C1.o31.fg
atggccgggtcgccgccctccctcctctccggctcctccgccggcagcgccggcggcggcggctactccctcaagtcgtcgcccttctcgtcagtgggcgaggagagggttccggacccgaagccgcggtggaacccgcggccggagcagatccggatcctggaggcgatcttcaactccggcatggtcaacccgccgcgcgacgagatcccgcgcatccgcatgcagctgcaggagtacggccaggtcggcgacgccaacgtcttctactggttccagaaccgcaagtcccgctccaagaacaagctgcgctccggcgggacaggccgcgcggggctcggcctcggcggcaaccgggcctccgcgccggcggcggcgcaccgggaggccgtggcgccgtcgttcacgccgccgccaccaatcctcccggcgccccagccggtgcagccgcagcagcagcttgtctcgcctgtggcggcgcctacctcgtcgtcgtcttcctcctccgaccgttcgtccgggtccagcaagcctgcgagggctacgtcgacgcaggcgatgtccgtgacgacggccatggacctgctctcgccgctcgccgcggcgtgccaccagcagatgctctatcaaggccagccactggagtcgccgccggcgcctgctcccaaagtgcacggcatcgtgccacacgacgagccggtcttcctgcagtggccgcagagcccctgcctgtcggccgtcgacctcggcgccgccattcttggcggccagtacatgcacctgccggtgcccgctccgcagccaccgtcgtcgccgggcgcggcgggcatgttctgggggctctgcaacgacgtgcaagcgccaaacaacaccggccacaagagctgcgcctggagcgccgggctcggccagcactggtgcggctccgccgatcagctcggcctcggcaagagcagcgcggcgtcgatcgccaccgtgtctaggccggaggaggcgcacgacgtcgacgccacgaagcacggtctgctacagtacggctttggcatcaccacgccgcaagtgcacgtggacgttacctcctcggctgctggcgttctgcctcctgttccgtcctcgccgtcgccgccgaacgccgccgtcaccgtcgcgagcgtggccgccaccgctagcctgactgattttgctgcaagtgctatatctgctggcgccgtcgctaacaatcagtttcaaggtctcgcggatttcgggctcgtcgccggcgcctgctccggcgccggagccgccgccgccgccgccgcgcccgaggcgggcagttccgtggccgcggttgtgtgcgtcagcgtcgcgggcgccgcgccgccgctcttctacccggccgcgcacttcaacgtgaggcactacggcgacgaggccgagctgctccgctacagaggaggcagccgcacggagcctgtgcccgtcgacgagtcgggcgtcaccgtcgagccgctccagcagggcgccgtctacattgttgtcatgtaa

SEQ ID NO: 12068 - DNA, 837 bp, Oryza sativa
  Clone ID: TFbOSC401231j.C1.o4.fg
atggacggcggccacagcccggacaggcatgcggcggcggcggcgggggagccggtgaggtcgcggtggacgccgaagccggagcagatactcatcctggagtccatcttcaacagcggcatggtgaacccgcccaaggacgagaccgtccgcatccgcaagctgctcgagcgcttcggcgccgtcggcgacgccaacgtcttctactggttccagaaccgccgctcgcgctcccgccgccgccagcgccagctgcaggcgcaggcgcaggcggccgcggccgccgcctcgtcgggatctcctccgactgcttcgtccggtggcctcgcgcctggccacgccggctcgccggcttcgtcgctcgggatgttcgcgcacggcgccgccgggtacagctcctcgtcgtcctcatcgtggccgtcctcgccgccgtcggtggggatgatgatgggggacgtggactacgggggcggcggcgacgacctgttcgccatctcgaggcagatggggtacatggacggcggcggcggctcgtcgtcgtcggcggccgccggtcagcatcagcagcagcagctctactactcgtgtcaacctgcgacgatgacggtgttcatcaacggagtggcgacggaggtgccaaggggaccgatcgatctgagatcaatgtttgggcaggacgtgatgctggtgcattcaacgggtgctcttcttccagccaacgagtacggcatcctcctccattctctccagatgggcgagagctacttcctggttaggatgcatacctgctgcctgcctaacatcggcttgcgactgcagccaccaagaaaacagtga

SEQ ID NO: 12069 - DNA, 86 bp, Oryza sativa
  Clone ID: TFbOSC14111j.C1.o1.gm
atgacggcggagtcgccggggggcgcaggcacctttcagctgacgggagcgtcattaactgttgaaccggcgtggactggtgactg

SEQ ID NO: 12070 - DNA, 711 bp, Oryza sativa
  Clone ID: TFbOSC407921j.C1.o3.fg
atgaggcttcaccatctgcatgtggcctacctggatcacaaagcgtcgtcgtcctcgtcgtctccggcgccaccatccatctccccgtcgtcgatccccggatcggccgccttccctgctttctccttcaaatgcctccgcccgctcgcgcccaagatctcgctgccggagccgaggaagatgatcgcgccgccggacttcgtcgtccctcgcgccagaaacgcttccaagctgctcaactacactgtgcaggtgccggcggcggggacgacgaggtggaacccgtcggcggagcagataaaggtgctggagatgctgtaccgcggcgggatgcggacgccgaactccgtccagatcgagcggatcacggaggagctcggcaagtacggccggatcgagggcaagaacgtcttctactggttccagaatcacaaggcccgcgagcgccagaagcagaagcgcgccgccctcctcaccctcagcacgctcgacccttccttgctgcccgctaccgctaacgaaaccaaagaggcaccggagaagaaggagaaggacgtggaagatggattggcgagctgcaagcggcggtgcaaggcgtggggtgacggcgccggcgatggagacgcggtggtggcgacggaggcggccggcggctgcaccgacgaagtgaccctggagctcttcccgttgcatccccagggaaaagcttaa

SEQ ID NO: 12071 - DNA, 789 bp, Oryza sativa
  Clone ID: TFbOSC407922j.C1.o1.fg
atgaggcttcaccatctgcatgtggcctacctggatcacaaagcgtcgtcgtcctcgtcgtctccggcgccaccatccatctccccgtcgtcgatccccggatcggccgccttccctgctttctccttcaaatgcctccgcccgctcgcgcccaagatctcgctgccggagccgaggaagatgatcgcgccgccggacttcgtcgtccctcgcgccagaaacgcttccaagctgctcaactacactgttagacacatcaaaccctacttgttcttgatcgatcgatcgatcaggttcatgatcgtgtatatatttggtttgcaggtgcaggtgccggcggcggggacgacgaggtggaacccgtcggcggagcagataaaggtgctggagatgctgtaccgcggcgggatgcggacgccgaactccgtccagatcgagcggatcacggaggagctcggcaagtacggccggatcgagggcaagaacgtcttctactggttccagaatcacaaggcccgcgagcgccagaagcagaagcgcgccgccctcctcaccctcagcacgctcgacccttccttgctgcccgctaccgctaacgaaaccaaagaggcaccggagaagaaggagaaggacgtggaagatggattggcgagctgcaagcggcggtgcaaggcgtggggtgacggcgccggcgatggagacgcggtggtggcgacggaggcggccggcggctgcaccgacgaagtgaccctggagctcttcccgttgcatccccagggaaaagcttaa

SEQ ID NO: 12072 - DNA, 1128 bp, Oryza sativa
  Clone ID: TFbOSC900018j.C1.o17.fg
atggagagcttcgccagtctcgcaggaggtggcagcagcagcaccacagctcggttgccggagctgatctcgccggagaacccggaccacatctcgccgcccccgttgctgtaccagctgctcgccggcccggagtcgtcggcgcggcagcatgggcatgatgggcatcaccacggcggcggtggcggcgaagcagcagcagcagctgtgcagggacaggtctcgccggcaggcgcggaggcggcggtcaaggccgagatcatgtcgcatccacagtactcggctctcctagccgcctacttaggctgcaaaaaggtcggggcgccgccggatgtactgaccaagctcacggctgtgccggcggcgcagcagctggacgaagccgacggccaccctcgtcgccggcacgagccacagcgtgatgacgacccggatcagctcgatcagttcatggacgcgtactgcagcatgctgacgaggtacagggaggagctggagcggccgatcctggaagccgcggagttcttcagcagggtggagacgcagctcgattcgctcgctgagagtaattgtgaaggcacgggatcatcagaggaagagcaagaccctagtgacaagcagctgaagcaccagcttctgaggaagtacggtggctcgttgggcgatctccggcaggtgttctccaagaggaccaagaaagggaagcttcccaaggaggccaggcagaagcttctgcactggtgggagctgcactacaagtggccctatccctccgtacgcacgcatcacatcccgtttgatcaattcaaccacattttctgcaccaaattaactcgtttgaaaatgcgtgaaatttacggggttgtgtatgagcaggagatggagaagatgacgctggcgcagacgacggggctggaccagaagcagatcaacaactggttcatcaaccagaggaagcggcactggaagccgacgccggtggcaggcacggccttcccgacgatggaagctgccggaggcggcttccgacactccggccacggcggcggccttgcggcggcggcggcgctgccgctgtacatgggcaggccgttcgttgtggacggcatgtaccggctcgggtcttga

SEQ ID NO: 12073 - DNA, 1322 bp, Oryza sativa
  Clone ID: TFbOSC900018j.C1.o27.gp
gttccattatgcaagaaaggaagcaaaacaaataaatacatagacttgcaattcctaaatatagttgaagcagagtatgcacaaccaaggcaaacaattgaacactactattgctattgctccattgtcaaccaatttgtccagaacatttcacagccagacacacaaaaggcaaaccagtttgatagtatatccctgcatgcttttgctcaccttctgttttgggaaccagaccttgatcttctgcttgggctcgatgttggcgaggatggataactcgcagagtaactgctggcggcgagagaatctgggcttggggcactcggcgtacacccgctccagcgcctccacctgacccggcgtgtagtgcacgtacttgccggagtccatcccggccttgtcgtacccgctgccgtcactgccgctgccgctccgcatcgggcatcgccaccgctgccgccatcctccactccggccaccaccaccaccaaagtttcccccttcgccaccttcaacacaacaacaacctgagagatttcgagcaaaagtgaaatcatccggagaggatgaggagaaaaaataacctgacatgtgagagggggaaacgaaagaaagaaagaagaaagagaaggaagggagaaatcgatagatggttgtgcgattgcaagcttgcttcctcctctcctctccgtcaggggatgcgtcgacctcggcggcgacggtcatggtgttccacgtagagaggagaggtcgagagttgagaggggaacggttgggaagctgcggaggagaggacggagaggcaacgcggcgaccgtacggcagtcctgcgcaggcggccggtccgacgccgccatgagggaagggcatcggcggcagacgcgcagccggctctgccgccaacgtaggtaccctcgccactgccgccacaagggaagggagggggcacgacggcggatccgccggcgtcgggcgccggatctgccctccccccgccaccaccgccgccgtcaccacaagtggatggagaaggaggaggggagcaccggcggcagctcgggcgggtgccgcctcctccctccccccgtggacgcaaccacaaggtcgaggaggccatcatggtagaggagggcagcacaggaggcatggtggagggcggcaatgttgtcgtccccttgctccgtcgtctttgtaaacgccggcgccgtccttgcccccggccgggaggaggaggccgcatggattggccggggatggggatggcggattggccgggaggaggattgggcagagagatgttgcgtgttggggatgggttggca

SEQ ID NO: 12074 - DNA, 660 bp, Oryza sativa
  Clone ID: TFbOSC100557j.C1.o1.fg
atgaatcaaaatgaatatccttgtctcaaattgaacgacagtaattgtgaaggcacgggatcatccgaggaagagcaagacacgagctgtcctgaggctgaggagatcgaccctagtgacaagcagctgaagcaccagcttctgatgaagtacggtggctcgttgggcgatctccggcaggcgttctccaagaggaccaagaaagggaagctccccaaggaggccaggctgaagcttctgcactggtgggagctgcactacgacaaatggccctatccctccgtacgcacgcatatatatgcttcccatttgatcaattcaaccacatttttctgcaccaaactcgatcttatgaaaatgcgtgaacttctcgggtgtacatgtgtgtatgagcaggaggtggagaagatgacgctggcgcagacgacggggctggaccagaagcagatcagcaactggttcatcaaccagaggaagcggcactggaagccgacgccggtggcaggcatgaccttcccgacagtggaagctgccggaggcggcttccgacactccggccacgacggcggccttgcggcggcggcggcggcggcggcgctgccgctgtacatgggcagctggccgttcgttgtggacggcatgtaccggctcgggtcttga

SEQ ID NO: 12075 - DNA, 2337 bp, Oryza sativa
  Clone ID: TFbOSC31211j.C1.o5.fg
atggtatttggcctcaactgtccagctaagcagattgtatacgtggagaagaaaagaagatggggcccatgtattcaccagctccgcgcgtcctcgtttggctccgagagcctcgtcagaaaaacagcttttttaatcgcatttgcacatgagaaagcaggacacagagagaagggggagaagctgaccaaaaaagatatccgatcgattggaattggaatggatctgggagcggcgtcggcggtggcggtgtcctccagcggcgggcggcgggcgacgggcgaaatcggccagcgacaggtggaatcggctggagagttagggctcacagacaagcagctgcagatgtggttctgccaccggcggttgaaggaccgtaaaccaccgccgaagcggcagcagctggaggaggaggttcatgtgccagttatggcgccgcctcctgtgctgccaccaccgctgccacacagcgagctaacaatggctcctggtgggatgtatggcgagcagttgctgccctcctcttcccgtagaggaactggccggccatcagccattcttgatatgtctgatcttcagtgcctccccctactcacgagccacgcgacattgaagctgattgattgtattcctcatcaagggaaagcatggcagattgtacagcttgatgcacttgacgagaggatggagcactttccggggttggaggatttctacgaggagaagcaccgggccccacagattgccagcggagagcgcttgaagacccttcgagtcagaggtcacacggcgcacatactgttcgacgaccggtacgtcccgtacctacggcgggctaagctcttggcgttcgtgaccatggcgcagcgaccggtgcctctgtacaacgccgctgctctgacggccctagtggaccggtggcgtccagagacacacaccttccacctaccgtgcggggagctgacggtcactctggaggacgtcgccatgatcctgggtcttcctatccggggtcaggcggtcacaggtgacacagcgtcggggaactggagggagagggtcgaggagtaccttggtctggagcctccagtggcacctgatggtcagaggcagacaaagacatcaggggttcctttgagttggttgcgagccaactttggtcagtgtcccgctgaggcagacgaggctacagtacagcgatactgcagggcgtacgtgctgtacatcttcggcagtattctgttccctgactctggtggagatatggcttcttggatgtggctgccgttgctcgcggactgggacgaggcgggtaccttcagctgggggtcggctgccctagcctggttgtaccggcaactctgtgatgcttgccgaaggcaaggcggggacgcgaacctagcaggctgtgtttggttgctacaggtttggatgtggatgaggcttccagttggtcggcccatgtggaggacccatcaggcttggccgcaccaggatgcagaccgacgtcccactgtagctcacctgtgggaatcggtcccatctccagtagtaggccgcaggaatttggcgtactaccactacacaaacgagatggactacctacagccagaacatgtggtgtggatgccatatcaggcacaggaagtgctcgagctagaactgaatcccatgtgccatatagaggatgcgttgaagaccctacggtgcccactgatctgcttctatgcagtggagttccagatgtgccaccgcagactacggcagcgatgtcggaagttggcagcaaggctcggctgcaggtcgactgatgtggtcgaacatgctcatgcccaccaagagggggatgaagaaggggaggtgggtgacgaggagggcgagcaagacaaagaggcggaggaaggagatgaggaggaagaaggggatgaggacagagaagaggaggcggatgagctcggtccctcgcagctagaggacgcaccagagtcgtcacagccggatatctcgcagcccggcccgtctcgaccacgaagccggcgggctccttcgcaggactggaggtacacccccgacgtgcctcgtcctcgcactagagcgccagtgcacctggcgctgaggtcccagcccagccatccagaaggcttgctgggctgggccacggccgaaacggccaagtcccacctcagcgccaggttggctggcgctgagtttcccaatgtcagcgccattttggctggcgctgaggtcccagcccgcaagccatccagaaggcttgctgggcagggccacggccgaaacggccaagtcccacctcagcgccaggtgggctggcgctga

SEQ ID NO: 12076 - DNA, 1050 bp, Oryza sativa
  Clone ID: TFbOSC401214j.C1.o9.fg
atggatcccggccgcgtcgtgttcgactccggcgtggcgcggcgggcgtgccccggcggcgcgcagatgcttctcttcggcggcggcggcagcgccaacagcggcggcttcttccgaggcgtgccggcggcggtgctggggatggatgaatcgcggtcgtcgtcgtcggcggcgggggcgggggcgaagcggccgttcttcacgacgcacgaggagctcctggaggaggagtactacgacgagcaggcgccggagaagaagcggcggctgacggcggagcaggtgcagatgctggagcggagcttcgaggaggagaacaagctggagccggagcggaagacggagctcgcccgccgcctcggcatggccccccggcaggtcgccgtctggttccagaaccgccgcgcccgctggaagaccaagcagctcgagcacgacttcgaccgcctcaaggccgcctacgacgccctcgccgccgaccaccatgccctcctctccgacaacgaccgcctccgcgcgcaggtaatctcattaaccgagaagctgcaagacaaggagacgtcgccgtcgtcggcgaccatcaccaccgcggcgcaggaggtcgaccagccggacgaacacacggaggccgcgtcaaccaccggcttcgccaccgtcgacggcgcattggcggcgccaccgcccggccaccagcagccgccgcataaagatgatcttgtgagcagcggcggcaccaacgacgacggcgatggcggcgcggccgtggtggtcttcgacgtcaccgagggcgccaacgaccgcctcagctgcgagtcggcgtacttcgccgacgccgcggaggcgtacgagcgcgactgcgccgggcactacgccctctcgtcggaggaggaggacggcggcgcggtcagcgacgagggctgcagcttcgacctccccgacgccgccgccgccgccgccgccatgttcggcgccgccggagttgtgcaccacgacgccgcggacgacgaggaggcgcagctcggcagctggaccgcctggttctggagctga

SEQ ID NO: 12077 - DNA, 1089 bp, Oryza sativa
  Clone ID: TFbOSC900339j.C1.o7.fg
atggagctggggttgagcttgggggaggctatggcggatgctgggagggagctggttcttgggcttgggatggggaggagggaggaggcggcggaggcggggaggagggatcatgaggtgaggagggagctggagttcgggtcgatgtcgagcaggtgcggtggttcttcgccggagccgacggtgcggctcacgcttctgcccatggtgcccggccttggcctcccatggccgccgccgccgccgccgtcgtccgagagcaggcatttggaggcgtcgacgcggggattcgacgtgaaccgcccgccgtcgtccggcggcggcggcggcggcggcggcgcggaggaggagcaggacgacgtggccggggcggcactctcgtcgtcccccaacaacagcgccggatccttcccgatggatgacttctccgggcacggcctcggcggcaacgacgcggcccctggcggtggcggcggcgaccgctcgtgctcccgcgccagcgacgaggacgacggcggctccgcgcgcaagaagctccgcctctccaaggagcagtccgcgttcctcgaggagagcttcaaggagcacagcaccctaaaccccaagcagaagctggcgctggcgaagcagctcaacctccggccgcgccaggtggaggtgtggttccagaaccgccgcgccaggacgaagctgaagcagacggaggtggactgcgagtacctgaagcggtgctgcgagacgctgacggaggagaaccggcggctgcagaaggagctcgccgagctccgggcgctcaagacggtgcaccccttctacatgcacctcccggcgacgacactctccatgtgcccctcctgcgagcgcgtcgcctccaactccgccccggccaccgcctcctccgccgcaacatcgtcgacggccgcgccgcccgcggcaccctcatccggcggcattgcggccacctcctcctccgccgccgccgccgcggcgccggaccacaggccgtcgtcgttcgccgcgctgttctcgtcgccgcgtggcttcccgctatccgtagccccgcaggcgcagccgccgacgagctcgtga

SEQ ID NO: 12078 - DNA, 873 bp, Oryza sativa
  Clone ID: TFbOSC400630j.C1.o3.fg
atggagagcgactgccagttcttggtggcgccgccgcagccgcacatgtactacgacacggcggcggcggcggtggacgaggcgcagttcttgcggcagatggtggccgcggcggatcaccacgcggccgccgctgggagaggaggcggcgacggcgacggcggcggcggcggcggcggtggcggggagaggaagcggcggttcacggaggagcaggtgcggtcgctggagacgacgttccacgcgcggcgggccaagctggagccgcgggagaaggcggagctggcgcgggagctcgggctgcagccgcgccaggtggccatctggttccagaacaagcgcgcccggtggcgctccaagcagatcgagcacgactacgccgcgctccgcgcccagtacgacgccctccacgcccgcgtcgagtcgctcaggcaggagaagctcgccctcgcagaccaggttcgtgcgccattgccgaccaatcatcagctatacctgctgcatacgtgcacgcatggtgacaatgcgcgctttgccttcttgcaggtggatgagctgagggggaagctgaacgagcggcaagaccagagcggcagctgcgacggcggcggcgccgaaggggacgacgacgacaagaggaatagcgtgatgaacgcgagcagcagcggcctcgtggaggaggactacgtgagctgcctcgcggtgccggtggtggacgtctcggaggacggctcggcggcgtgcggcgggtcgtcgtacgagtacgaccatcacctagactacttgggcggcggccagctgcccgatccgttctgcggcatgccggatctgtgggagatatggccaatggtggaatggaacgcagtagcatga

SEQ ID NO: 12079 - DNA, 2616 bp, Oryza sativa
  Clone ID: TFbOSC11879j.C1.o12.fg
atgagcttcggtggcatgttcgatggcgccggctccggcgtcttctcctacgacgccggcggcggcggcggcggcggcggagtacacaactcccgcctcctccctacgccgcccgtccccaagcccggcggcgggttcgccgctcccggcctctctctcggcctgcaaactatggacggtagccagctcggcgacgtgaaccggtcgcttgccatgatgggcaacggcgggagcggcagcggcggcgacggcgactcgctgggacgcggccgggaggaagagaacgacagccgctccggcagcgacaacctggacggcgcctccggcgacgaactcgacccggacaacagcaacccgcgcaagaagaagaagcgttatcaccgccacaccccgcagcaaatccaagaactcgaagccgtgttcaaggagtgtccacatcctgacgagaagcaacggatggagctcagccggcggctcaacctcgagagccgccaggtcaagttctggttccagaatcgccgcacccagatgaagacgcagatcgagcggcatgagaacgcgctgctgcggcaggagaacgacaagctgagggcggagaacatgacgatccgggaggcgatgaggaacccgatgtgcgcgagctgcggcggcgcggcggtgctcggcgaggtgtcgctggaggagcagcacctgcgcatcgagaacgcgcggctcaaggacgagctcgaccgcgtctgcgcgctcgccggcaagttcctcggccggccaatctcgagcatctcctccccgggcccgccgtcgctgcaggcgtgctccggcctcgagctcggcgtcggcagcaacggcgggttcgggctcggcgcgctcggggcctcggcggcgatgcagtccatccccgacctgatgggcggctcctccggcctgacgggggggcccgtgggctccgccgccatgcgcctacccgcgggcattggcggcctcgacggcgccatgcacgccgcggcggccgacggcggcgccatcgaccgcgccgtgctcctggagctcgccctcgcggccatggacgagctcgtcaaggtggcgcagatggacgagccgctctggctccccagcctcgacggcgggttcgagacgctcaactacgacgagtaccaccgcgcgttcgccagggtggtcggccagtgccccgccggctacgtctccgaggcgacgcgcgagtccggcatcgccatcatcagcagcgtcgacctcgtcgacagcctcatggacgcgccacggtggtcggagatgttcccgtgcgtggtggcgagagcgagcaccacggacatcatctccagcggcatgggcggcacgcgcagcgggtcaattcaactgatgcacgcggagctgcaggtgctgtcgccgctggtgccgatacgggaggtggtgttcctgcgtttctgcaagcagcacgccgagggcctctgggcggtggtcgacgtctcggtcgacgccgtcctccgccccgaccagaacggcggcggcgggtcgtcgtcgtcgtcgtacatgggctgccgcctcctccccaccggctgcatcgtgcaggacatgaacaatggctactccaaggtcacgtgggtggttcacgcggagtacgacgagacggcggcgcaccagctctaccggccgctgctccgctccggccaggccctcggcgcccgccgctggctcgcctcgctccagcgacagtgccagtatctcgccatcctctgctccaactccctccccgcccgcgaccacgctgcgataacgccggtggggaggaggagcatgctgaagctggcgcagcggatgacggacaacttctgcgcgggggtgtgcgcgtcggcggcgcagaagtggcggcgcctggacgagtggcgcggcgagggtgggggcggcggcggtggcggcggcggggacggggaggacaaggtgcggatgatggcgcggcacagcgtgggcgcgccgggggagccgccgggcgtcgtgctgagcgccaccacgtcggtgcggctccccggcacgctgccgcagcgcgtgttcgactacctccgcgacgagcagcggcgcggcgactgggacatccttgccaacggcgaggccatgcaggagatggaccacatcgccaagggccagcaccacggcaatgccgtctccctcctccgtccaaatgccacaagcgggaaccagaacaacatgctgatcctccaggagacgtgcaccgactcatcgggctccctcgtcgtctacgctccggtggacgtgcagtcgatgcacgtcgtcatgaacggcggcgactccgcctacgtctccctcctcccctccggcttcgccatcctccccgacggccacaacaatggcgcctcgccgtctccggcagaggtcggcagcggcgcctcgccgaactccgccgccggtggcggtggcggtagcaacaacaccgggtcgctggtgacggtggcgttccagatactcgtcaacaacctgccgacggcgaagctcaccgtggagtccgtcgacaccgtcagcaacctcctctcctgcaccatccagaagatcaagtcggcactgcaggccagcatcatctcaccatag

SEQ ID NO: 12080 - DNA, 1056 bp, Oryza sativa
  Clone ID: TFbOSC400138j.C1.o4.fg
atggccagcaatggcgccgccgccggcgccatggccccgttcttcccgcccaacttcctcctccagatgcagcagcctctccccctccaccaccagcacctccaggaccacgcccatggcggccacggcggccaccacctcctccctcctcctcctccctccctctcccccttcctccccgacctcgccatggacgcgccgccgccgccaatgtacgaggcgagcggcggcgatggcggcggcggaggggcggcgtcggaggatgaggaggatgggtgtggagggggagggggtgggggtggtggggagaagaagaggaggttgagcgtggagcaggtgaggacgctggagcggagcttcgagtccgggaacaagctggagccggagcggaaggcgcagctggcgcgcgcgctggggctgcagccgcggcaggtggccatctggttccagaaccgccgcgcgaggtggaagacgaagcagctcgagaaggacttcgacgccctccgccgccagctcgacgccgcccgcgccgagaacgacgccctcctctccctcaactccaagctccacgccgagatcgtggcgctgaaggggggagcggcggcggcggggggaggagggagcagctgcaggcaggaggcggcgtcggagctgatcaacctcaacgtcaaggagacggaggcgtcgtgcagcaaccgcagcgagaacagctccgagatcaacctcgacatctccaggccggcgccgccgccgccgccgccgccggccaacgagagccccgtcaaccgaggcatcccgttctacgcctccatcggccgcggcggcgcaggcggcgtggacatcgaccagctgctcctccgcggcggccactcgccgtccccggctgccgtgacgacgccgccgccgcccaagatggagctcgggattacaggcaatggcggcggcgcggacgccgccgccgccggcgcgggcagcttcggcggcctgctctgcggcgccgtcgacgagcagccgccgttctggccgtgggccgacggccaccaccacttccattaa

SEQ ID NO: 12081 - DNA, 2616 bp, Oryza sativa
  unsure (1)..(2616): unsure at all n locations
  Clone ID: TFbOSC900153j.C1.o15.fg
atgagcttcggtggcatgttcgatggcgccggctccggcgtcttctcctacgacgccggcggcggcggcggcggcggcggagtacacaactcccgcctcctccctacgccgcccgtccccaagcccggcggcgggttcgccgctcccggcctctctctcggcctgcaaactatggacggtagccagctcggcgacgtgaaccggtcgcttgccatgatgggcaacggcgggagcggcagcggcggcgacggcgactcgctgggacgcggccgggaggaagagaacgacagccgctccggcagcgacaacctggacggcgcctccggcgacgaactcgacccggacaacagcaacccgcgcaagaagaagaagcgttatcaccgccacaccccgcagcaaatccaagaactcgaagccgtgttcaaggagtgtccacatcctgacgagaagcaacggatggagctcagccggcggctcaacctcgagagccgccaggtcaagttctggttccagaatcgccgcacccagatgaagacgcagatcgagcggcatgagaacgcgctgctgcggcaggagaacgacaagctgagggcggagaacatgacgatccgggaggcgatgaggaacccgatgtgcgcgagctgcggcggcgcggcggtgctcggcgaggtgtcgctggaggagcagcacctgcgcatcgagaacgcgcggctcaaggacgagctcgaccgcgtctgcgcgctcgccggcaagttcctcggccggccaatctcgagcatctcctccccgggcccgccgtcgctgcaggcgtgctccggcctcgagctcggcgtcggcagcaacggcgggttcgggctcggcgcgctcggggcctcngcggcgatgcagtccatccccgacctgatgggcgggtcctccggcctgacgggggggcccgtgggctccgccgccatgcgcctacccgcgggcattggcggcctcnacggcgccatgcacgccgcggcggccgacggcggcgccatcgaccgcgccgtgctcctggagctcgccctcgcggccatggacgagctcgtcaaggtggcgcagatggacgagccgctctggctccccagcctcgacggcgggttcgagacgctcaactacgacgagtaccaccgcgcgttcgccagggtggtcggccagtgccccgccggctacgtctccgaggcgacgcgcgagtccggcatcgccatcatcagcagcgtcgacctcgtcgacagcctcatggacgcgccacggtggtcggagatgttcccgtgcgtggtggcgagagcgagcaccacggacatcatctccagcggcatgggcggcacgcgcagcgggtcaattcaactgatgcacgcggagctgcaggtgctgtcgccgctggtgccgatacgggaggtggtgttcctgcgtttctgcaagcagcacgccgagggcctctgggcggtggtcgacgtctcggtcgacgccgtcctccgccccgaccagaacggcggcggcgggtcgtcgtcgtcgtcgtacatgggctgccgcctcctccccaccggctgcatcgtgcaggacatgaacaatggctactccaaggtcacgtgggtggttcacgcggagtacgacgagacggcggcgcaccagctctaccggccgctgctccgctccggccaggccctcggcgcccgccgctggctcgcctcgctccagcgacagtgccagtatctcgccatcctctgctccaactccctccccgcccgcgaccacgctgcgataacgccggtggggaggaggagcatgctgaagctggcgcagcggatgacggacaacttctgcgcgggggtgtgcgcgtcggcggcgcaaaagtggcggcgcctggacgagtggcgcggcgagggtgggggcggcggcggtggcggcggcggggacggggaggacaaggtgcggatgatggcgcggcacagcgtgggcgcgccgggggagccgccgggcgtcgtgctgagcgccaccacgtcggtgcggctccccggcacgctgccgcagcgcgtgttcgactacctccgcgacgagcagcggcgcggcgactgggacatccttgccaacggcgaggccatgcaggagatggaccacatcgccaagggccagcaccacggcaatgccgtctccctcctccgtccaaatgccacaagcgggaaccagaacaacatgctgatcctccaggagacgtgcaccgactcatcgggctccctcgtcgtctacgctccggtggacgtgcagtcgatgcacgtcgtcatgaacggcggcgactccgcctacgtctccctcctcccctccggcttcgccatcctccccgacggccacaacaatggcgcctcgccgtctccggcagaggtcggcagcggcgcctcgccgaactccgccgccggtggcggtggcggtagcaacaacaccgggtcgctggtgacggtggcgttccagatactcgtcaacaacctgccgacggcgaagctcaccgtggagtccgtcgacaccgtcagcaacctcctctcctgcaccatccagaagatcaagtcggcactgcaggccagcatcatctcaccatag

SEQ ID NO: 12082 - DNA, 1833 bp, Oryza sativa
  Clone ID: TFbOSC101881j.C1.o2.fg
atggccggcgctagatctgctccaagtgtcgctgccgcccccttacccatgccgctcccgaggcccagcagcagcggatccactctccagaagctcgttggccctgccgccccttcccttgcgccgttgacgctgagagccgcgtttgtctccttccccgcgctgcttccgaggcccggcactagcggatccgccctcccaaggcctgcccgcgccggattccctcctcggtgccccctctcccatgcctctactgccgcccccttccccacgcagccaccctttccctcatcattgccattgcccagctcgacccgctttggccagccagatccactagcagggaggttgggtcgccagatccggaagccctctcttatgcgaggcggtactgggcggcggtggagagagaagggacgccggagggaggagggagaagggtgggagagaggtgtagagagaagggaggcggaaggaccgagggaagagggagagagccgaagggagtttggtgggtgttggattttaattgcgtcaaaatttattttgcagtggcgtcctttacctaccgttagcgaaaacccgatttttgctggtggacacttaagaggagtaaaacccatgagctttgggaatcttggaggaggaggaggagcaggggggagcggcaaggcggcggcgtcgtcgttcctgcagctgccgctgtccacggcggcggcggccaccgcgtactacggcacgccgctcgccttgcaccaggcggcggccgcggctggcccgtcgcagtaccacggtcacggtcacccccaccacggcggcggccaccaccacagcaagcacggcggcgccggtggtggggagatctcggcggcggaggccgagtccatcaaggccaagatcatggcgcacccccagtactccgccctcctcgcagcctacctcgactgccagaaagtcggagcgccgccggaggtgctggagaggctgaccgccacggcggcaaagctggacgcccgccctcccggccgccacgacgcgcgcgacccggagctcgaccagttcatggaggcgtactgcaacatgctggccaagtacagggaggagctgacgcggccgatcgacgaggccatggagttcctcaagagggtggagtcgcagctcgacaccatcgccggcggcgcccatggcggcggcgccggctcggcgcgcctcctcctcgccgatggtaaatctgaatgtgttggttcttctgaggatgacatggacccaagtggccgcgaaaacgagccgcctgagatcgacccgcgcgctgaggataaggagctcaagtttcagcttctgaagaagtacagtggctacttgagcagcctaaggcaagaattttccaagaaaaagaagaaaggaaagctgcctaaggaggccaggcagaagctgcttcactggtgggagctgcactacaagtggccttacccctcagagacggagaagattgcgcttgcggaatcgacaggactagatcagaagcagatcaacaactggttcatcaaccagaggaaacggcactggaagccatcggaggacatgccgttcgtcatgatggaaggttttcacccacagaatgctgctgcattgtacatggatggcccgttcatggcagatggaatgtaccgcctcgacggatggttcgaattaaaatcgaaattacttgtgaaattgctggacctggatgttctacttcctagagctgtgaattttatagtttctggatttggtaatcaggcatgcttggtgaagcatttagaaattatgtatacatttccagatgataattaa

SEQ ID NO: 12083 - DNA, 687 bp, Oryza sativa
  Clone ID: TFbOSC401329j.C1.o51.fg
atgggggccacttctccgtcaggcctggagctcaccatggctgtccccggcctcagctcctctggttcagaaggggccggttgcaacaacaacaacgccggtggcggctgcaacatgagggacctggacatcaaccagccggcgagcggcggcgaggaggaggagttcccgatgggcagcgtggaggaggacgaggaggagaggggcgtcggtgggccccaccgccccaagaagctccgcctctccaaggagcagtcccgcctcctcgaggagagcttccgcctcaaccataccctcacgccgaagcaaaaggaggccttggcgatcaaactgaagctgcggccgaggcaggtggaggtctggtttcagaaccgtagggcaaggacgaagctgaagcagacggagatggagtgcgagtacctgaagcgctgcttcgggtcgctgacggaggagaaccgccggctgcagcgggaggtggaggagctgcgggcgatgcgggtggccccgcccacggtgctctcgccgcacaccaggcagccgctcccggcgtccgcgctcaccatgtgcccccgctgcgagcgcatcaccgccgccaccggcccgcctgccgtgcgcccgccgccgtcgtcagccgccgccgccgccccctcgcccttccaccctcgccgcccctctgcggccttctag

SEQ ID NO: 12084 - DNA, 984 bp, Oryza sativa
  Clone ID: TFbOSC21192j.C1.o3.gm
atggagcagaaagatgaagccgagatggaggaggtggacgaggaggaggaggaggaggtcgacgaagacatggccggcgggcacgcggcgcagtcgccgtcgccgtcgtgcgggctgggcgagaagaagcggcggctggcgctggagcaggtgcgcgctctggagcggagcttcgacacggacaacaagctggacccggaccgcaaggcccgcatcgcgcgcgacctcggcctgcagccgcgccaggtcgccgtctggttccagaaccgccgcgcccggtggaagacgaagcagctcgagcgcgacttcgccgccctccgcgcccgccacgacgccctccgcgccgactgcgacgccctgcgccgcgacaaggacgccctcgccgccgagattcgggagctgagggagaagctgcccaccaagccggcggacacggcggcatcggtgaaggtagaagccggcaatgacgcggcggccggcgccgcggccgccacggtgtgcaaggacggctcgtcggacgacagcgactccagcgtggtgttcaacgacgaggcgtcgccgtactccggcgcggccttcattggattcggcccgtcgttcttggtcgacgacgcgtcggcggcaaccgtgggctgctcgtcgtcgctccccgcgctcgagtccaaatggcacggtccgtactccgacgactcgtgcaaaggcggcgtctatggcttcacggaggaatggctcgctgcctgctccggcgagatggccggcaacgacgccgccggcttcttctccgacgagcacgcctccaacctcaacttcggttgggatcgcctcatctccttcagctttggctcaacgatgcccaggatccacctcggcatggatggataccgctacgccaagtctgagctctcccatgatcatggtggcataagagaggagggggatgtagtggtggcggcagccggcagtgcttggtttggcactgcctag

SEQ ID NO: 12085 - DNA, 1035 bp, Oryza sativa
  Clone ID: TFbOSC412751j.C1.o2.fg
atggagtccggccggctcatcttcagcacggcgggctccggcgccgggcagatgctcttcttggactgcggcgctggcggcggcggcgtcggcggcggggccatgttccatcgaggggcgagaccggtgctcggcatggaggaaggagggcgcggcgtcaagcggcccttcttcaccacccccgacgagctcctcgaagaggagtactacgacgagcagctcccggagaagaagcggcgcctcacgccggagcaggtgcatctgctggagaggagcttcgaggaggagaacaagctggagccggagcggaagacggagctggcgcggaagctagggctgcagccgcggcaggtcgccgtgtggttccagaaccgccgcgcgcgctggaagaccaagcagctcgagcgcgacttcgaccgcctcaaggcgtcgttcgacgccctccgcgccgaccacgacgccctcctccaggacaaccaccgcctccactctcaggtcatgtcgttgaccgagaagctgcaagagaaggagacgacgaccgagggcagcgccggcgcggccgttgacgtcccgggcttgcctgcggcggccgacgtgaaggtcgccgtcccggacgccgaggaaccggcgctggaggaggcggcggcggcgttcgaggagcagcaggagcagcaggtgaaggccgaggacaggctgagcacgggcagcggcgggagcgcggtgtgtgaacacggacgcgccaactgggtggtcgggtgcggccggcagcatctcgccgccgtggacagcagcgtggagtcgtacttcccgggcggcgacgagtaccacgactgcgtgatgggccccatggaccacgccgcggggggcatccagtcggaggaggacgacggcgccggcagcgacgagggctgcagctattacgccgacgacgccggcgtcctcttcgccgaccacggccaccaccaccaccaccaacacgcggacgacgacgaggaggacggccagcagatcagctgctggtggatgtggaactag

SEQ ID NO: 12086 - DNA, 1032 bp, Oryza sativa
  Clone ID: TFbOSC900058j.C1.o14.fg
atggagtccggccggctcatcttcagcacggcgggctccggcgccgggcagatgctcttcttggactgcggcgctggcggcggcggcgtcggcggcggggccatgttccatcgaggggcgagaccggtgctcggcatggaggaaggagggcgcggcgtcaagcggcccttcttcaccacccccgacgagctcctcgaagaggagtactacgacgagcagctcccggagaagaagcggcgcctcacgccggagcaggtgcatctgctggagaggagcttcgaggaggagaacaagctggagccggagcggaagacggagctggcgcggaagctagggctgcagccgcggcaggtcgccgtgtggttccagaaccgccgcgcgcgctggaagaccaagcagctcgagcgcgacttcgaccgcctcaaggcgtcgttcgacgccctccgcgccgaccacgacgccctcctccaggacaaccaccgcctccactctcaggtcatgtcgttgaccgagaagctgcaagagaaggagacgacgaccgagggcagcgccggcgcggccgttgacgtcccgggcttgcctgcggcggccgacgtgaaggtcgccgtcccggacgccgaggaaccggcgctggaggaggcggcggcggcgttcgaggagcagcaggagcagcaggtgaaggccgaggacaggctgagcacgggcagcggcgggagcgcggtggtggacacggacgcgcaactggtggtcgggtgcggccggcagcatctcgccgccgtggacagcagcgtggagtcgtacttcccgggcggcgacgagtaccacgactgcgtgatgggccccatggaccacgccgcggggggcatccagtcggaggaggacgacggcgccggcagcgacgagggctgcagctactacgccgacgacgccggcgtcctcttcgccgaccacggccaccaccaccaccaccaacacgcggacgacgacgaggaggacggccagcagatcagctgctggtggatgtggaactag

SEQ ID NO: 12087 - DNA, 753 bp, Oryza sativa
  Clone ID: TFbOSC401108j.C1.o35.fg
atggagtgggacaaggccaaggcgtcctccggcgaggcggtggacgacaggggcggaggggaaggagggctcgggtacgtgaaggtgatgacggacgagcagatggaggtgctccggaagcagatctccatctacgccaccatctgcgagcagctcgtcgagatgcaccgcgccctcaccgcgcagcaggactccattgcaggaatgaggcttggtaatctgtactgtgatcctctaatggttcccggaggtcacaagatcacagcaaggcagcgatggacaccaaccccaatgcagttgcagattcttgagaacatctttgaccaaggcaatggaacaccaagcaagcaaaagataaaggacataacagcagagctctcacagcatggccagatctcagagacaaatgtctataactggttccagaacaggcgggcacgatcgaaacggaagcaagctgctttaccaaataataatgcagaatctgaagctgaagcggatgaggagtccccaactgacaaaaaacccaaatcagataggccgcttcaccagaacatagccatgagagatcacaatagcgaaaggatctcggagatgcaccactttgacacggagcatgagcaaatccgtcgtatgatgtatgcatccaatgacagtagctcgcgatcgtcaggcagtttgggccagatgtccttctacgacaatgttatgtcaaatccaagtacctcctacaaacacccttgcttcatttga

SEQ ID NO: 12088 - DNA, 963 bp, Oryza sativa
  Clone ID: TFbOSC900132j.C1.o22.fg
atggcggcttcgtcggaggtgtcgatcgacccagatcagtggttctatatatatagcttggaacgcgttgcttacgtgtgtgaacgtgtaggctcaccggtgatggaggaggccgagctgcggcggcggcggcggaagaggccgttcctgacgacgacgcacgacgagctggagctccagatggaggacctcgtcgacgagctgtacggcgtcgacgagcaggggtcgtcgtcagcggcggcgaggaagcggcggctgacagcggagcaggtgcgagcgctggagcggagcttcgaggaggagaagcggaagctggagccggagcggaagagcgagctggcgcggcgtctcgggatcgcgccgcggcaggtggccgtgtggttccagaaccgccgcgcgaggtggaagacgaagcagctcgagctcgacttcgaccgcctccgggccgcccacgacgagctcctcgccggccgcaccgcgctcgccgccgacaacgagagcctccgatctcaggtgatcctattaaccgagaagctgcaagctaatgggaagtcaccgtcaccgtcgccggcgccggcggagcaaaccgccgtgccagccgcacctgaaagcgccaagtcgtttcagctcgaagaaggtcgccgcctctacgacgccgccgggagcaccaccaccaccaacggcggcggcggcggcgtcgcgatgccggcggcgcgcgtggcggcggcaagagcggccagcaacgacagccccgagtcctacttcgccggcgctcgctcgccgccctcgtcgtcggaggacgactgcggcggcgccggcagcgacgacgactacccctcttcctccgtcttactcccggtcgacgctacgctcgtcggcgacgccttcgagcacgccgtggcggcgacggtggcggcggatgaggaggcgccgctaaacagctgggagtggttctggaattga

SEQ ID NO: 12089 - DNA, 744 bp, Oryza sativa
  Clone ID: TFbOSC418226j.C1.o10.fg
atgatggagagggccgaggacctgcgcctgagcctcagtctcagctcgccgcttattgctcctcgtactcaccatgtcgccatgctgttccacgctcctccagagaaaagattcctggagatgccgctgctccctgctgcgaagcggagcgaggtcgtcgcggcagaagaggagcgcgcgggcctgcgcggcggcggcggcagcgacgaggaggacggtggctgcggcatcgacggctcacgcaagaagctccggctttccaaggaccagtccgccgtgctcgaggacagcttccgggagcaccccaccctcaaccccaggcagaaggcaactttggcgcagcagctcgggcttcggcctcggcaggtcgaggtgtggtttcagaacagacgcgcaaggacgaagctgaagcagacggaggtggactgcgagttcctgaagcgctgctgcgagacgctcacggaggagaaccggaggctgcagaaggaggtgcaggagctgcgagcgctcaagctcgtctcgccgcacctctacatgaacatgtccccgcccaccacgctcaccatgtgcccctcctgcgagcgcgtctccaacaccaataacaactccagcgccgccgccgccgccgaccgccgcggcatcaggactactactgccgcaggcggcggcagcgtcgtcgacaccgccgccgacgggggcatcctctgccaccgcccgatcgccgtccggccgcagcagtcatga

SEQ ID NO: 12090 - DNA, 936 bp, Oryza sativa
  Clone ID: TFbOSC422332j.C1.o24.fg
atggagatgatggttcatgggaggagagacgagcagtatggcgggctcaggctcgggcttgggcttgggctcagcctcggcgtcgccggtggtgcagccgacgacgagcagccgccgccgcgccgtggtgccgccccgccgccgcagcagcagctgtgcggctggaacggcggcggtctcttctcctcgtcttcctccgatcatcgggggaggtcggcgatgatggcgtgccacgacgtcatcgagatgccgttcctgcgggggatcgacgtgaaccgtgcgccggcggcagagacgaccacgacgacggcgagggggcccagctgcagcgaggaagacgaggagcccggcgcgtcctcccccaacagcacgctctccagcctcagcggcaagcgcggcgcaccatctgccgccaccgccgccgccgccgccgccagcgacgacgaggactccggcggcggatcccgcaagaagctccgcctctccaaggaccaagccgccgtcctcgaggacaccttcaaagagcacaacaccctcaatcccaagcagaaggcggcgctggcgaggcagctgaatctgaagccgcggcaggtggaggtgtggttccagaacaggagggcgaggacgaagctgaagcagacggaggtggactgcgagctgctcaagcgctgctgcgagacgctcaccgacgagaaccgccgcctccaccgcgagctccaggagctccgcgccctcaagctcgccaccgccgccgccgcgccgcaccacctctacggcgcccgcgtcccgccgcccaccaccctcaccatgtgcccctcctgcgagcgcgtcgcctccgcagccaccaccacccgcaacaactccggcgccgcccccgcgcggccggtgcccacccgcccgtggccgccggcggcggcgcagaggtcgtcggcgtag

SEQ ID NO: 12091 - DNA, 2922 bp, Oryza sativa
  Clone ID: TFbOSC900395j.C1.o10.fg
atggggatggtacgaaagataggccgagctggtcgtgaggcagacgcctcctcctcccccgagctcctccccggtccagcccagccagccagccggaccagccaggacggttcccttccacctactgtaacaccattgaagcgcctcaatattcgtgtggagcaagccgctgacgccgcccccaccgtcggatccgcggtcgggccccacatccgccgttcactgggccgccggacccaccgcccacgccgcggccagtggctacgcgctgcattaacgcccgcctccataacctcccccctcctcatcccggatctacgcgtgcgtggggcgaaagacactgaccgtgggcccttcggctaccgtggggcccagcgtcatggactggctaggctagggagctctgaatcgggttgtgaggcgtgtgggaggggcggggtagatccaaggaagaggactttctcgagtttacgccgtggtgttttgcttcggcgaggaggcggcggcatgagctttgggggcctctttgacggcggcggcgggggaggcatgcagttccctttcgccagtggcttcgcgtcctcgccggcgctctccctcgcgctggacaacgccggcggtggcatcggcgggcggatgctcggcggcggcgctggcgctggttctagcgcgggcggcgcgatgacgagggacactgaggcggagaacgacagccggtcgggaagcgaccatctcgacgccatctcggccgccggcgaggacgacgtcgaggacgccgagcccagcaactcccgcaagaggaagaagcgataccaccgccacacgccgcagcagatccaagagctcgaagcgctgttcaaggagtgcccccatccggacgagaagcagcgcgccgagctcagcaggaggctctccctcgatgcgcggcaggtcaagttctggttccagaatcgccgcacgcagatgaagacgcaactggagcggcacgagaacgcgcttctcaagcaggagaacgacaagctgcgcgccgagaacatgacgatccgggaggcgatgcgcagcccaatgtgcggcagctgcgggagccccgccatgctcggggaggtgtccctagaggagcagcacctgcgcatcgagaatgcgcgcctcaaggacgagctcaaccgcgtgtgcgccctcgccaccaagttcctaggcaagcccatctccctcctgtcgccgccgcccttgctgcagccgcacctctcgctgcctatgcctaactcgtcgctggagctagcgatcggaggcatcggtggcttagggtctctcggtacactacccggctgtatgaatgagttcgccggaggcgtgtcgagcccgatgggcacggtgatcacgcctgcgcgcgcaaccggggctgctataccatcgctggtgggtaacatcgacaggtccgtgttcttagagcttgcaatcagcgcgatggacgaacttgtcaagatggcacagatggacgatccattgtgggttccggcactgcctggttctcccagcaaggaggtgctcaactttgaggagtatcttcactccttcctaccgtgcattggcatgaagcctgccggctacgtctctgaggcctcgagggaatccggtctagtcatcatcgacaacagccttgcccttgtagagaccctcatggatgagagacggtggtctgacatgttctcgtgcatgattgctaaggcaacagtgcttgaggaggtgtctaccggcattgcaggaagcagaaatggcgcgttgctgctgatgaaggctgagctacaggtgctctcacctctagtaccaattagggaggttacatttctccggttttgtaagcagctggctgagggtgcatgggcagtagttgatgtgtccattgatggtttagtgagagatcataattctggaacggcacccacaggtggaaatgtgaagtgtaggagggtaccttccggctgtgtgatgcaagacactcccaatgggtattgcaaggtcacatgggttgagcatacggaatacgatgaggcatcagtgcaccagctctaccgtccactccttcggtctggtctcgcctttggcgccaggcgttggcttgcgacgctgcagcgccaatgcgaatgccttgccatcctcatgtcctctgctacagtgacagcaaatgactcgactgctatatcgcaagagggcaagcgaagcatgctgaagctggcacgccggatgacggagaacttctgtgctggggtgagcgcatcgtctgcacgtgaatggagcaagctggatggtgcgaccggtagcatcggggaggacgtgcgcgtgatggcacggaagagcgtgagcgagcctggagagccaccgggcgtggtgctgagcgcggccacctcggtgtgggtgcccgtggctccggagaagctcttcaacttcctgcgcgatgagcagctgcgtgcggagtgggacatcctcagcaatggaggccccatgcaggagatgacccagatcgccaaggggcagcgggatgggaactcggtttcactcctcagggccagtgctgtgagtgccaaccagagcagcatgctgatacttcaggagacgtgcaccgacgcttctggctccattgttgtgtacgctccggtagacatcccggcaatgcagcttgtcatgaatggtggcgactccacctatgttgctctgcttccatccggattcgccatcctgcccgatgggcctcgcatcggcgccaccgggtacgagacgggcggctctctgctcaccgtggcgttccagattcttgtcaacaaccagcccaccgccaagctcaccgtggaatcggtcgagaccgtgaacaatctcatctcctgcaccatcaagaagatcaagacggcgctgcagtgcgacgcctga

SEQ ID NO: 12092 - DNA, 2568 bp, Oryza sativa
  Clone ID: TFbOSC417639j.C1.o20.fg
atggcagcggcggcggtggggggaaggggggagaggctgtcgtcctcctccccgacggcggcggcgccgcaggtggacgccgggaagtacgtccggtacacgcccgagcaggtggaggcgctggagcgggtgtacaccgagtgccccaagcccagctcactccgccgccagcagctcatccgggagtgccccatcctcagcaacatcgagcccaagcagatcaaggtctggtttcagaatcgcagatgccgggagaagcagcgcaaggaggcctcccggctgcaaactgtgaaccggaagctgaatgcgatgaacaagctgttgatggaggaaaatgaccggctgcagaagcaggtgtcccgtctcgtctacgagaacggctacatgcggactcaactgcacaatccttctgcagccaccacagatacaagctgtgagtctgtggtgacaagtggtcagcaccatcaacagcaaaacccagcagttctgcatccgcaaagggatgcgaacaacccagcaggtcttctcgctattgctgaggagaccttggcagagttcatgtcgaaggcgacaggaactgctgtcgaatgggtgcaaatggttgggatgaagcctggtccggattccattggaatcatcgctgtttcgcacaattgcagtggcgtagcagcacgagcttgcggcctggtgagccttgagcccacaaaggttgcagagatcctcaaggatcgcccctcttggtaccgtgattgccgatgcgtagatatcatccatgttatccctacgggtaacggcggaaccattgagctaatctacatgcagacatatgcaccgacaactttggcggcaccacgcgacttttggactctccgctacacaagtggacttgaagatgggagtcttgtgatctgtgaaaggtcattgactcagtccactggtggcccatctgggcctaacactccgaattttatcagagccgaggtacttcccagtggttatctgattcgaccatgtgagggaggtggctccatgatttacattgttgatcatgttgatttggatgcttggagtgtgcctgaggttcttcgaccgctctatgaatctccaaagatccttgcacagaagatgaccattgcagcattgcgacacattaggcaaattgcgcatgagtcaagcggtgaaatcccctacggtgctggtcgccagcctgctgttttcaggaccttcagtcaaaggctcagcagaggtttcaatgatgctgttagtggatttccagatgatgggtggtctttgttgagcagtgatggtagtgaggacattacaatttcagtaaactcgtctccaaacaagcttgttggatcccatgtcagcccgaaccctctgttttctactgttggaggtggcatcttgtgcgcaaaggcatcaatgctacttcagaatgtacctcctgctctacttgtgcgatttctgagggagcatcgttctgaatgggctgatcctggtgttgatgcttattctgctgcttctttgcgagccagcccatatgcagttccaggcttaaggaccagcgggtttatgggcagtcaggttatactacccctcgctcataccttagagcatgaagagttcttggaggttattaggctcgaaggacatggtttcagccatgatgaggtgcttctatcacgggatatgtaccttctacagctttgcagcggggttgatgagaatgctactagtgcatctgcacagcttgtctttgctcctattgacgaatcttttgctgatgatgcaccacttttaccctcaggattccgtgtgataccactagatacaaaaatggatgggccatctgcaacacgcacgctcgaccttgcatccgcccttgaggttggaccaggtggagcttcgcgtgcttcagttgaagcatctggcacatgtaacagatcagtcctgaccattgctttccaattctcatacgagaaccaccttcgtgagagcgtggcggcaatggctaggagttatgtcagagctgtgatggcatccgtgcagagggtggctgtggcaatagctccttctcgacttggaccccagatcggaatgaagcaccctccagcctctcctgaggcgcttacacttgctagctggattggtaggagctatagggctcacaccggagcagatatccgttggtctgataccgaagatgccgattctcccctggcgctcctgtggaagcacagcgacgcaatactgtgctgttctctgaagcctgctcctatgttcaccttcgccaacaatgccggcctcgacatccttgagacgacgctggtcaacctccaggacatctcgctcgagatgatcctggatgacgagggccggaaggcgctgtgctcggagttccccaagatcatgcagcagggtttcacctatctccctggaggcgtctgcaagtcgagcatggggcggcaggcatcgtatgagcaggcggtggcgtggaaggttcttagcgacgacgacgcgccgcactgcctcgccttcatgctcgtcaactggaccttcatgtga

SEQ ID NO: 12093 - DNA, 771 bp, Oryza sativa
  Clone ID: TFbOSC413762j.C1.o6.fg
atggaaggagaggatctaggttcatggcttggtctcgggatcggcggcggcggttacgcatacggcggcgacgattgccggaggtcaccgtcgtctccgtcgccggtgcagatgttgttctcccagcatgtcaaggaagagatcacgaggggatatgatcatggccgtgatgaagaacaagcttcagggagcaagatcatgaagggagagagaggtgcaaggctaagggtgatgaggtccatcaggaacagcggcggcgacggtagccgctcgcgtgtactgagcctcggcgacgacggcggcgatggcggcagcggcggcggcggcggtggcggcacgaggaagaagctccagctcaccaaggagcagtcgaccttgctcgaggacagcttccgcgtccacaacattctttctcatgctcagaagcacgagctcgctcgtcagctgaaactgaagccgagacaggtcgaagtgtggttccaaaatagaagagccaggacgaagctgaagcagactgaggtggactgcgagttcttgaagcgatgctgcgagagcctgaccgaggagaacaagcagctcaagcatgagctcatggagctgcgtcggctggcttcgccggcggcggcggcggccggctcgcagctctacgtccagttcccgagggcggcggcggcggcgatggtgaacgtctgcccgtcctgcgagaaggtcaccgtgatgggcggcggcggcggcgagacgggaaagagctcctccagctatagctcttaa

SEQ ID NO: 12094 - DNA, 2250 bp, Oryza sativa
  Clone ID: TFbOSC900292j.C1.o25.fg
atgcagagcttgttggatggacaccaccatcagctgccatcactgctgcagcagcaccacaatggacaccatctgcttgatcagcaccagcagcatcagcatcagcttcccccacaggcgacgacgacgagcgagagcgacggccgtgcccctcgcgacgagctggagatgagcaagtccggtggcagcgacaacctggagagcggcggtggcggtggcggaggtggctccggtggtgatcaggaccccaaccagcgcccccgcaagaagcgctaccaccgccacacccagcaccagatccaggagctcgaggccttcttcaaggagtgcccccaccctgatgacaagcagcgcaaggagctcagccgcgagctcggcctcgagcccctccaggtcaagttctggttccagaacaagcgcacccagatgaagacgcagcatgagagacacgagaacaatgcgctgcgcgcagagaacgagaagctgcgggcagagaacatgaggtacaaggaggcgcttgccaacgcgtcctgccccaactgcggcggtccggccgccatcggcgagatgtccttcgacgagcaccacctccgcctcgagaacgcgcgcctccgcgacgagattgacaggatctccgccatcgccgccaagtacgtcggcaagcccgccgcggccgtctcggccgcgtacccgccgctgccgccgtcgaacaggtcgccgctcgatcatatgggcattcccggcgctggcgccgacgtgttcggcgccgacttcgacaagccgctcgtcatcgagctcgccgtggccgccatggaggagctcgtcaggatggcgcagctcggcgagccgctctgggcgccggcgctcggcggcgaggcgctcggcgaggaggagtacgcgcgcacgttcccgcgcgggctagggcccaagtcgccggagctccggtcggaggcgtcgagggagacggcggtggtgatcatgaaccacgtcagcctcgtggagatgctcatggacgtcgggcagtggacggcgctcttctcgagcatcgtgtcgcgcgcggcgacgctggaggtgctctcgacgggcgtcgccggcaaccacaacggcgcgctgcagctcatgtccgccgagttccagatgccgtcgccgctggtgccgacgagggagacccagttcctgcgctactgcaagcagcaccccgacggcacgtgggccgtcgtcgacgtctccctcgacgggctccgcgccggcgccgggggcggatgccagccggcggcggcgcgcggccaccggcgccgcccctccggctgcctcatccaggagatgccgaacggctactccaaggtgacgtgggtggagcacgtggaggccgacgaccagatggtgcacaacctgtacaagccggtggtgaactccggcatggcgttcggcgctcgccggtgggtggcgacgctggagcggcagtgcgagcgcctggctagcgccatggcgagcaacgtggcgtcctcgggcgacgccggcgtgatcacgacgtcggaggggaggcggagcatgctgaagctggcggagcggatggtggcgagcttctgcggcggcgtgacggcgtcgacgacgcaccagtggacgacgctctccggcagcggcgccgaggacgtccgcgtcatgacgcgcaagagcgtcgacgaccccggccgccctcccggcatcatcctcaacgccgccacctccttctggctccccgtcccgccttcccgcgtcttcgacttcctccgcgacgactccacccgcagcgagtgggacatcctctccaatggcggcgtcgtccaagaaatggctcacatcgccaatggccgcgaccacggcaacgccgtctccctcctccgcgtcaacaacgcgaactcgaaccagagcaacatgctgatactgcaggagtgctgcacggacgcgacggggtcgtacgtgatatacgcgccggtggacgtggtggcgatgaacgtggtgctcaacggcggcgacccggactacgtggcgctgctgccgtcggggttcgccatcctccccgacgggccggacggcggcggcgggtcgctgctgacggtggcgttccagatactggtcgactccgtgcccaccgccaagctgtcgctcggctccgtcgccaccgtcaacagcctcatcgcctgcaccgtcgagcgcatcaaggccgccatcaccggcgacaacggcgtcgcgccgccatgcccacggtga

SEQ ID NO: 12095 - DNA, 720 bp, Oryza sativa
  Clone ID: TFbOSC400277j.C1.o16.fg
atgagccgtgaggaggatgagaagctgctgttcccttcgttcgccttcccggcggagtgcttcccggaagccgccacctccggtggcgagcagaagaaggctcggcagcggcggaggaggaaggtgaagccggaagcggcggcagcgttggctggagagagcggaggggatgagcaggcgaagaagcggcggctgagcgacgagcaggcgcggtttctggagatgagcttcaagaaggagcggaagctggagacgccgcgcaaggtgcagctcgccgcggagctgggcctcgacgccaagcaggtcgccgtctggttccagaaccgccgcgcccgccacaagagcaagctcatggaggaggagttcgccaagctccgctccgcccacgacgccgtcgtcctccagaactgccacctcgagaccgagttgctgaagctgaaggagaggctggcggatgtagaggaggagaaggcgaagctagcagctgtcgccgcggcgacgaccggcggcggtggtggcggcggcggcggcagcagcagcccgacctcgtcgtcgttctccacggtgacgtaccacccggcgctggcggggcagttcggcgtggaggcggcggccgaggaggccgacctcacctacatgagtgagtacgcgtacaacagctacatgctggagttggcggcggccggctactgcggcggggtctacgaccaattcagctga

SEQ ID NO: 12096 - DNA, 714 bp, Oryza sativa
  Clone ID: TFbOSC401489j.C1.o8.fg
atggactccgtcgtcgacggcggcctcgacacgcgcctctctctcgccgtcggctgctgcccgccgcggaggaggccggtgttgctgttcggtgaggtgctcccgtcgccggagaagaaggtggcggcggcggcggtggtggctgctgggaagcgaggccgagagcagaggggtgaggctgaggctgaagctacgacgacgaggcagcggcggagctgcaagaagggcaggagggggaggggagacgacgatgacgacgacggtgatcgccggagcccgagcggcggcggcggtgacgaggaaggcgcgagcaggaagaagctccggctcaccggcgagcaggccacgcttctcgaggacagcttccgcgcccacaacatcctctcccatgcggagaagcaggagctggcggggaagctggggctgagcgcgaggcaggtggaggtgtggttccagaacaggagggcgaggacgaagctgaagcagacggaggccgactgcgacctgctccgccgctggtgcgaccacctcgccgccgacaacgcccgcctccgccgcgacctcgccgagctgcgccgctcctcctcctcgccgccggtgtccggcctcgccgtggccacgcccgtcgtctgcccctcctgcgcccacgacgacaagcgccgcctcgccttcgccaccgccgccgccgccgccggcgacatggccagtaactga

SEQ ID NO: 12097 - DNA, 933 bp, Oryza sativa
  unsure (1)..(933): unsure at all n locations
  Clone ID: TFbOSC900242j.C1.o3.np
atggaggatctgtacagcatccacccgggaatctcccgcggcggcggtgggggaggaggaggtgcnnnnnnnnnnnnnnnnnnnnnnnnnnnnnnnnnnnnnnccccggcggatcccccaccgccggcgacgacggcggcggcggcggatctgacggagctgatgaaggcgcagatcgccggccacccgagctacccttccctcctctccgcctacatcgaatgccgcaaggttggtgcgccgccggaggtgaccacgctgctggaggagatcggccgggaggggcgcggcggcggcggcggcgcgacagccggcggggaaattggcctcgatccggagctcgacgagttcatggagacgtactgccgggtgctggagcggtacaaggaagaactcacacggccgttcgacgaggcggcctccttcctcaccggcatccacacccagctcgcctccctctgtggcggcgcgccgccgcccaccgacaactccgatgaaatggtggggtcttcagaggatgagccgtgctcaggagacgccgatgcagcagattttgggcaagaacacagctcccgcttggctgaccatgagctcaaagagatgttgctcaagaagtacagtggctgcctcagccgcctccggtccgagttcttgaagaagaggaagaaagggaaactaccgaaagacgcgcgatcggcacttatggactggtggaacacacattaccgttggccttaccccacggaagaggataaggtgaggctggccgcgatgactggcctcgacccgaagcagatcaacaactggttcatcaaccagaggaagaggcactggaagccatcggaggacatgcggttcgcgctcatggagggggtcaccggaggatcctcctccgggacgacactgtacttcgacaccggcacaattggtcca

SEQ ID NO: 12098 - DNA, 807 bp, Oryza sativa
  Clone ID: TFbOSC400269j.C1.o52.gm
atggcgcaagatgatgaggacgtgggtctagctctgggcctctccctgggctccggcggccacaggcggcagagagaaagtagagacgaagcgccgtcgtcggcggcggcgtccctgctgacgctgaggctcccggcagagagcggggggcagccgcaggtggtggtgaagagggaggtggtgcgggcggaagaggaggagtacgaatacgagtacgagagggcgctctactcgtcgtcggctgcggcggcggacgacgacgagggctgcaacagccggaagaagctgaggctgagcaaggagcagtcggctctgctggaggatcgcttcaaggagcatagcactctcaaccctaagcaaaaggttgctttggcgaagcagctaaacctgaggccaaggcaagttgaggtgtggttccaaaacagaagagccaggacgaagctgaagcagacggaggtggattgcgagcttctgaagcgctgctgcgagacgctgacggaggagaaccgacgcctccatcgtgagctccagcagctcagggctctgacccactccaccgccgccggcttcttcatggccaccaccctccccgtccccgccgccacgctctccatctgcccctcctgcgagcgcctcgccaccgccgccgccgccggagcttcccccaccgccgccgccgaccgcaccaacaagcccaccgccccgcacttgttcagccctttcgccaacgcgcacggcaaggacgggcagtgggcgtgggcggtcggcaaggacggcgacgtggacggcggcgctcaccggcgctga

SEQ ID NO: 12099 - DNA, 966 bp, Oryza sativa
  Clone ID: TFbOSC416036j.C1.o10.fg
atgggcgatgaagaagacctggagcttgtgcttggagtaagagcaactagaagagatgaacaggatgaccagacaacatgcacacaatcatcagaagaagctatggagggagaagaagatgaaactcgccctcatggcgaggctcctgtcgagagcttgagcttccctctgtttgtatcctctgcagagaccggcagtgcgaattcagagatgtgcacacgtggttttgatgtgaacactcggccagcagacggaggcgcagaggcagggaggccttcgtcaccatcttctatgcaggaggcatccacgagacagcaggtagctgatcaggaagctgcagacgatgaggataacggcggtggtggcgcgaggaagaagttgaggctatccaaggaacagtcctcgtttctggaggatagtttcaaagaacacagcaccctgactccgaaacaaaagagtgatttagctaatcggctcaaccttcgaccgcgccaagtggaggtctggttccaaaacagaagagctaggacgaagctgaagcagacggaggtggactgcgagcatctgaagcgctgctgcgagaggctgacgcgggagaaccggcggctgcagagggaggtggccgagctgcgtggcactctccgaaccaccacgtcgtcgtacccgccgctgtacggcctccaccacctaccagctgctgccggcacggtgttccgggtgtgcccttcatgtgagcatagcaaggtcgttgctgcggcagcttctgagagcttctctccgcgcgtcttcgccggcggcggcgcccctgccgccatcaccgctgccgccgccgtgccgtctccgggcgctggctcaccgccgtcgtcgtccgccgctttgttcggcgccagacggcctcattttggccccttcgccgccgccgtcatcccgccggtgctccgccgccagccatcggcgacgtcgtga

SEQ ID NO: 12100 - DNA, 1194 bp, Oryza sativa
  Clone ID: TFbOSC13680j.C1.o2.fg
atggagctggggttgagcttgggggaggctatggcggatgctgggagggagctggttcttgggcttgggatggggaggagggaggaggcggcggaggcggggaggagggatcatgaggtgaggagggagctggagttcgggtcgatgtcgagcaggtgcggtggttcttcgccggagccgacggtgcggctcacgcttctgcccatggtgcccggccttggcctcccatggccgccgccgccgccgccgtcgtccgagagcaggcatttggaggcgtcgacgcggggattcgacgtgaaccgcccgccgtcgtccggcggcggcggcggcggcggcggcgcggaggaggagcaggacgacgtggccggggcggcactctcgtcgtcccccaacaacagcgccggatccttcccgatggatgacttctccgggcacggcctcggcggcaacgacgcggcccctggcggtggcggcggcgaccgctcgtgctcccgcgccagcgacgaggacgacggcggctccgcgcgcaagaagctccgcctctccaaggagcagtccgcgttcctcgaggagagcttcaaggagcacagcaccctaaaccccgtaagcttctcttcctctcatcgatcgaacaccatggcgtcgtcgtcgtcgtcgtcgtcgtctcgctctcctaacgttgcgtctcggttgcgttgtgtcgcgagcagaacagaagctgcgctggcgaagcagctcaacctccggccgcgccaggtggaggtgtggttccagaaccgccgcgccaggacgaagctgaagcagacggaggtggactgcgagtacctgaagcggtgctgcgagacgctgacggaggagaaccggcggctgcagaaggagctcgccgagctccgggcgctcaagacggtgcaccccttctacatgcacctcccggcgacgacactctccatgtgcccctcctgcgagcgcgtcgcctccaactccgccccggccaccgcctcctccgccgcaacatcgtcgacggccgcgccgcccgcggcaccctcatccggcggcattgcggccacctcctcctccgccgccgccgccgcggcgccggaccacaggccgtcgtcgttcgccgcgctgttctcgtcgccgcgtggcttcccgctatccgtagccccgcaggcgcagccgccgacgagctcgtga

SEQ ID NO: 12101 - DNA, 378 bp, Oryza sativa
  Clone ID: TFbOSC100841j.C1.o3.fg
atggacaatggatctcaacaagagtcctctgatctgcatgtgcatcacctccccatcgcaagcatcatcggagtagaggatcgcacagaggaggctgatgatgcagctgtagattaccatgatgatagtagtgaaggccaggatgaggtatcaaacaaacgtatgaaacgtcacactgatgaccaaataaagcatttggaaagtgtgtttgagaggtgcacctatctaggagggaatcaacgtgtacagttggccaagaaacttggcatggaggaaaggcaagtaaaattttggttccagaaccgacgcactcggaagaaggtggcaacctgggtggataagatacaattgtcagttagaaatggagggtctccttga

SEQ ID NO: 12102 - DNA, 2556 bp, Oryza sativa
  Clone ID: TFbOSC401894j.C1.o34.fg
atgcagttcccgttctccggcgctggcccgggcgtcttcacgtcatcgccggcgctctccctcgcgctggcggacgcggtggcaggccggaacagcggcggcggtgggaagatggttaccgcggcccatggcggcgtcggcggaggaggaggaggaggacgcgcgaaggcgagggacgcgttggaggtggagaacgagatgagccggtccgggagcgaccacctcgacgtcgtctcttgcggcgacgcgggcggcggcggcggcgacgacgacgatgacgaggacgccgagcacggcaacccgcccaagcgcaagaagcggtaccaccgccacacgccgcagcagatccaagagctggaagcgatgttcaaggaatgcccccacccagacgagaagcagcgcgccgagctgagcaagcggctcggcctcgaaccccggcaggtcaagttctggttccagaatcggcgaacgcagatgaagatgcaactggagcgacacgagaactcgctgctgaagcaggagaacgataagctgcggtccgagaacctgtcaatccgggaggccacgagcaacgcggtgtgcgttggctgcggcggcccggcgatgctcggggaggtgtccctggaggagcaccaccttcgcgtcgagaacgcgaggctcaaggacgagctcagccgagtgtgcgcgctcgccgccaagttccttggcaagtccatctctgtcatggcgccaccgcagatgcatcagcctcatcctgtgccaggctcgtcgctggagcttgcggttgggggtatcggttcgatgccatcagccacgatgcccatctcgacgatcactgattttgctggcgccatgtccagttcaatgggcacggtgatcacgcccatgaagtctgaggctgaaccatcggcaatggctggcattgacaagtccttgttcttggagctagcaatgagtgcaatggatgagctagtcaagatggctcagatgggggatccgctatggattccaggtgcctccgtaccttcctcgccggcaaaggagagtctaaacttcgaggagtacctaaacaccttcccaccttgcatcggggtgaagcctgaagggtatgtatcagaggcatctagagaatctggcattgtcatcattgacgatggcgccgcgcttgtggagaccctcatggatgagtttgaattcttgcgacagcgacggtggtccgatatgttctcatgcatgattgccaaggcatcaaccactgaggagatttctactggtgttgctgggagtagaaatggtgcattgcttcttatgcaggcagagctacaggtgctttctcctcttgtgcctattagagaggtgaagtttctcaggttctccaaacagctggctgatggtgtatgggctgtagtggacgtttcggctgatgaattgatgagggatcagggcattacttctgcatcctcgactgcaaacatgaactgccgaaggctgccttctggttgtgtgctgcaggacactccaaatgggtttgttaagtatttagttcaaatatcagtattttctgaagtctataatctctctattgatcagtttctggatctgcctcctgctttcatggtcacatgggttgaacatacagaatatgatgaggcatctgtgcacccgctctaccggcctcttctccggtctggtcttgcccttggtgcagggcgatggatcgcgacattacagcggcagtgcgaatgcttggcccttctcatgtcttctattgcattgccagagaacgactcatcagctatccatcctgaaggtaaacggagcatgttgaagttggcaaggaggatgacggacaacttctgtgcaggggtgagcacatcatctacccgtgaatggagcaaactggttggattgacaggcaacattggggaggatgtgcatgtaatggcgcggaagagtgtggatgaacctggaacgccgccaggtgtggtgcttagtgctgctacatctgtgtggatgcctgtgatgcctgaacggctcttcaacttcttgcacaacaaggggctgcgtgctgaatgggatatcctcagcaatggtggccctatgcaggaggtgacaagcattgccaaggggcaacagaatggcaataccgtatgtctactgaaggctagttcttctgttccccttaccaaaaatttcactgtgcagcccaccaaagacaagcagaacagcatgctgatcctacaggagacgtgtgcagacgcatccggttcaatggttgtgtatgctcctgtagacatcccagcaatgcaccttgtcatgagtggtggggattcgtcatgcgtcgcccttcttccatcaggttttgccatcctgcctgctgggcctagcatcggcgcagatcacaagatgggcggttcattgctcaccgttgcattccagatacttgccaacagccagcccagtgctaagctcacggtggagtcagtcgagaccgtgagcaaccttatctcctgcaccatcaagaagatcaagacggcgctgcattgcgacgtgtga

SEQ ID NO: 12103 - DNA, 2373 bp, Oryza sativa
  Clone ID: TFbOSC400544j.C1.o1.fg
atgaacggcgagcttaaacttatggcttcctatgtgagcaagcttaagttcatcttgcaaaaagatcagcagcaggagccccatactgcgaaccttctagtcctacttgggagtagcaatcaggacaaaagaaatggcctctcacagggagaaaacagaatggacacttgtaccagaaagaagccaagaagataccaactcctcaccatgcaacaaaaagaaacgcttaatcgtgcatttcaatcatgtccgaaccctgatagaaatgacttgaagaagttggccaaggaactaaacatgactgagacccaaatcaaatattggttccagaactgcaggacaaagatgaagaaattcaagaacaatgaggagcgcaaactactgcagaaggagaatgaggagctaaagaaggagaatgcagagttgagaaataggatgaagaactcaacatgccgcgcttgtgacctccctttgttccatatagattgccgtcattgggagaatccaatgctcaacaagggtaatcatggcgttacaagtaatctcattcctcaggcagtgtcatccttgctccccagctcaagtggttttgtagcttcaggctccaatcttagtagcaatgctgtgctcatgcccgtatctgccatgccatcatcagttttgcagcctgctccagccgtctctggtgccaattttcccatcttgcacaatctatctgccaatgcaaatgatggctatacggaaaaaaacgtacttcttgatctggcgaaccgtgcaatggaagagttctttagtctaatgaaggagaatgagtctcttcttgtcaaaaaaaaggagaatgggcctctctggctcccacacatggatattctgggagtcgaatcacttaactaccaggaataccttgcaaaatccaggacgattggacaaaaacctgttgacttcaaagtggtcgtcaccagggacactgccattgtcaatggtagctgtgttgacctcgtcaaaagccttttggatgctaaccgctggagagagttgtttccaggcatcgtggcaagtgcaaacaccaccaagatcatctctactgggccctctaacttgcacgacgggttgcttcaattgaaaaatttgcagatgcgtgcagagctccaggtaatgtcacctgaagtcccagtttgcgatgtgacattcttgaggcagagtgtgcagtttggaagtggactgtggtgtgtggttgatgtgtctattgataccatccttcctggagagagtaaaacagctcagtccagtgtgcagaccagcagtacagctgccagacgcatggaagtcaggctgttgccatcaggctgtgttattgaagaaatggagaatggctattccaaggtgacctggatggtgcatgcagcttatgatgagagagcagtgccagtgctttatcattcacttctccgctctgcaaaagcccttggtgcgtgccgctgggtagcatcactccagagacacagccagttcctttccggcctgcacaaatacatcttttgtcctgacagcacaatgacagaagtggtgatgcgaagaaaagtcctgtacctggtgaagcagatgacgagcagcttcacaggcctatttgcgtcgatgtctaaggccacgctgcaagatggtgatgatactcacttcgcgcatcagatagttggtggtgcaacaggtgaacctgccggactgctgctgagcgccaccacaaccatatggctccccggcgtgaacccgaggcacgtgtatgaccacctgcgtgatgagcagtgccatggtgaatggcgctgcctcctcggtgagcagctgcatcagggcaatgccttgccgtatggtgcccccctgaatggtgagaccgtgccagagttctatcgcatggtgaacgggctgcatgaagggcatgctatctccctgatcagccccagagaaatgggtggtaacataagcaacactctgctcctgcaagaggcaagaactgatctttctggctccctcatagtttacgccaggacagatgtgaacaccgtgcattccatcatgaacagtggcctcaaccctgccaccgtcttcctcgtatcctctggatgtgccattcttcctgattgcctggaatcattccctctacacccagctgcaactgcagatcaggccggcacctccagtgccgctatcgctagcaggagcgaaaccggtgggtcattcgtcaccgtcacttaccagatgtttttcagcagccaaggtggcgcagcacctgccagctcatcaattcatcaaggccgtgatgcgctcaagaaagccaccgacattttcaaggtggtcctcgacactctcaccgtggcatag

SEQ ID NO: 12104 - DNA, 1173 bp, Oryza sativa
  Clone ID: TFbOSC401896j.C1.o7.fg
atggccagcaatggcatggcgtcctccccttcctccttcttccctccgaacttcctcctccacatggcgcagcagcaagcggcgccgcctcacgacccgcaagaacaccaccaccaccaccaccatggccaccatggccaccaccatgagcagcagcagcagcagcagcatcaccaccacctgggtcctcctccgccgccgccaccgcacccgcacaacccgttcttgccgtcctccgctcaatgcccgtccctccaagaattccgaggcatggcgccaatgctggggaagcggccgatgtcgtacggcgacggcggcggcggcggcgacgaggtgaacggcggcggcgaggacgagctgtcggacgacgggtcgcaggccggggagaagaagcggcggctgaacgtggagcaggtgcggacgctggagaagaacttcgagctcgggaacaagctggagccggagcggaagatgcagctcgcccgcgcgctcgggctgcagccgcgtcaggtggccatctggttccagaaccgccgcgcgaggtggaagacgaagcagctggagaaggactacgacgcgctcaagcgccagctcgacgccgtcaaggccgagaacgacgcgctcctcaaccacaacaagaagctccaagccgaggaacggagatccatgtgggtttcagtgttggcagaaaggttgttggaatcggtgcctttctcaccaccacgaatagtggcgctgaaggggagggaggcggcgtcggagctgataaacctgaacaaggagacggaggcgtcgtgcagcaaccgcagcgagaatagctccgagatcaacctcgacatctcgcgcacgccgccgcccgacgccgccgcgctcgacaccgccccgaccgcgcaccaccaccaccatggcggcggcggcggcggcggcggcggtggcggcatgatcccgttctacacctccatcgcccgccccgccagcggcggcggcgtcgacatcgaccagctcctccacagctcgtcgggcggcgccggcggacccaagatggagcaccacggcggcggcggcaatgtgcaggcggcgtccgtcgacacggccagcttcggcaacctgctctgcggcgtcgacgagccgccgccgttctggccatggcccgatcaccagcacttccactga

SEQ ID NO: 12105 - DNA, 888 bp, Oryza sativa
  Clone ID: TFbOSC401695j.C1.o34.fg
atggccatcatccatgacacctctgatcaacaagaggacaacatgaggtcgtacatggacggcggcggcgcggcggcgtacgaggaggaggaggaggaggttgaggacgacgacggcggcggcggcggcggcggcggcggcggcggtggggggctcggggagaagaagcggcggctggcggcggagcaggtgcgggcgctggagcggagcttcgaggcggacaacaagctggacccggagcggaaggcccggatcgcccgcgaccttcgcctccaccctcgccaggtcgccgtctggttccagaaccgccgcgcgaggtggaagaccaagcagatcgagcgcgacttcgccgccctccgctcccgccacgacgccctccgcctcgagtgcgacgccctccgccgcgacaaggacgccctcgccgccgagatcgccgacctccgggacagggtggacggccagatgtccgtcaagctggaggccgtggccgcggacgaacaccagccgcctccgccgccgccgccgccgccactggcgtataacagcaaggtggtggacggctcgacggacagcgactcgagcgcggtgttcaacgaggaggcgtcgccgtactccggcgcggccatcgaccaccaccaccaccaaactccggcgagctacgacacggcggggttcacctccttcttcgcgccatccaccacgctcacctcgtccctctccttcccttccatgttccacgcgtcatcgcatttcgatggccaccaagaactcctcgtcggcggcggcggcgccggcgcagtggccgacgccgacctcggaggcgccggattcttcgccggcgacgagcacgccggcggcctctcctggtacggcgccgagggttggtag

SEQ ID NO: 12106 - DNA, 2601 bp, Oryza sativa
  Clone ID: TFbOSC401909j.C1.o27.fg
atggccggggccgcctcctccgccgacgcgctcttcgcctcgccgctcatccccaaccccgctctcgccggcttcatgtcctcctccgccgccatgcccttccaccacttctccaacgccgccgccaccttaatacctaaggaggaggggttgatgggcggcctccatgtggccaaggacgaggggatggacctcgagatggacatggagctcagtggcggctccggcagcgcccacctcgacggcctcctcagcttcgccgacgtcgacgacgaccacaagccgcagcacagcggccatgaccagccgcccgacgccgcccagcccagcggcgccgcggggggcaacgccaagaagaagcgctaccaccgccacacggcgcaccagatccagcagatggaggcgctgttcaaggagtgcccgcatccggacgacaagcagcggctgaagctgagccaggaactgggcctcaaacctcgccaggtcaagttctggttccagaatcgccggacccagatgaaggcgcagcaggacagggcggacaacgtgattctgcgcgcggagaacgagaacctcaagagcgacaacttccgcctccaggccgccatccgcaacgtcgtctgccccaactgcggccacgccgccgtcctcgccgacatgtcctacgaggagcagcagctccgcatcgagaacgccaggctcaaagacgagcttgaccgcttggcctgcatcgccacccgctacggcggcggcggcggacggcagccggtgctgtcgacgtcggccctgagctgcatctcggcgccgccgccggtcctcatgccaccgctcgacctcgacatgaacgtctactcgcggcacttcgccgagcaggcgccggtcatgggctgcggcgacctcatcccgccacccgtcgtgccgcagcacgatggcgcggcggcgtacatgggcgccatgatggcgcccgtgcaggagcaggacaagcagctggtggtcgacctcgccgccacggcggcggaccagctcgccaggatgtgccgcgccggcgagccgctgtgggtgcggcagcgtggcgcggaggtgatggccgtggaggagcacgcgcggatgttcagctggccggtggacggcgcgaagcagggagacggcggcgcggtggcgagggcggaggggacgcgtgacaacgcggtggtcatcatgaacagcatcaacttggtggacgccttcctcgatgcgaacaaatggatggagctgttcccgtcgattgtttgcaaggcaagaacaatccagatcataaaccacggagctgcgtctggtcacctcggcagtggaactctcctcttgatgcaagcagaggtgcagttcttgtcgcctctggtggcggcgcgcgaggtggtgttcttccgttactgcgtgcacaacgccgacgaggggagctgggcgatcgtggatttcccggcggaagggtttgaggaggggctcctccaagcctcggtggtcaggtgccggcggcggccgtccggctgcatcatccaggacatgcccaatggatactccagggtggtgtgggtggagcacatggagatggtcggggaggagaagccgctgcagccggtgttcagggactacgtcgccagcggcgccgccttcggggccacgcgctggctctccatcctccagcgccagtgcgagcgcctcgccagtgagctcgcccgtaacatcgccgacctcggagtgatccgcacccctgaggcaagaacaaatatgatgaagctgtcgcagcggatgatcaccactttctgtgctaacatcagtgcttctggaacccaatcttggacggccctctcggattcaacccaggacactatcagggttacaactcggaagaacactgagcccggacagcccagcggtgtcatcctcaccgctgtctccacaagctggcttccttttacccatcagcaggtgtttgagcttcttgcagatgaacaacagcgctgccagcttgagattttgtcaaacggcggctcccttcatgaggtggcacatattgcaaatggatcacatccaaggaattgcatctctcttcttcgcattaacgctgcaagcaactcgtcacagaatgtggagctcctgctgcaggagagcagcacccaccctgatggtgggagcctggtggtgttcgcgacggtggacgtggacgcaattcaggtgacgatgagcggcgaggatccttcctacatccctctcctccccctgggcttcgccatcttccctgccaccagcccatcacctgctgctgcacccaccatcagctcaagcaccaccaccaccactggcaatggcaatggcgaaaccagtagcactcctccaagaaacagcagcagcaacaacaacaatgcagatgagctgctgcctcccaatggctgcctcctcaccgtcggcatgcaggtgctggccagcgccgtaccttctgccaagctcaacctctcgagtgtcactgcgatcaacagccatgtctgcaacgccattcaccagatcacagctgcactcaaaagttcagcaggtggtgctgggggtgagccggcgtccgatcagtag

SEQ ID NO: 12107 - DNA, 2838 bp, Oryza sativa
  Clone ID: TFbOSC401024j.C1.o1.fg
atggattcgtccggcgatggaggggacgagggagcgggagctgcgccggctggggtggaggaggagagccctgccccggcgtcggctccggctccggctccggcttccgcttccgctcccgttcccgccgccgttggtggtggagcaggcgcctctggatccagcgggaaggtgaagcgcgtgatgaagacgccctatcagttggaggttctcgagaggacatacacagaggatccgtatccaaatgagacgatgagagcggagttgtctgtgaagttagggctgacggacaggcagctgcagatgtggttctgccaccggcggttgaaggaccgtaagccaccgccgaagcggcagcagctggaggaggaggttcctgtgccggttatggcgccgcctcctgttctgccaccaccactgccacacagcgagctaacaatgggtactggtgggatgtatggcgagccgttgctgtccccctcttcccggagaggaactggcagaccatcggctgttccgaggatttctgcatcagaggttgcgcggagatattatgagccaccacaagttatgctacctccgttggcaccaatgcagctcacacgagctgagcaccgggtgattgattctgtggaacgactgataggggagccgctccgggaggatgggccagtgcttggtgtcgagtttgatcctctccctcctggcgcatttggggcgcctattgttccagagcaacagagacagcctttccgatcttatgaggccaaaatgttttctgggcatgatacaaagcacattaaggcatctgcattcttgcctagcatagatccttttgttccaagtacagtttctgggaagagaaagtccatgacaggaagttcttcccatcttggttcacgggcagttcgtgaataccaatttattcctgaacagtcaagtgatatatatgagaggacgacccagtcacgatactatgatgttttaactgaagcttcggattcaaggatgtcgacaggatcacgattcctccatggtgttgaaaaggcacctggctatacattccatggacaaatttctggttctagccatttatctctacatggcaggccaccagttttttcatcgggatcaacagattatgagatggatccatctaatatcaattctagttctgttccaaatgaaagccagtatggaattcctcaggttgctggatttgaaaactccgttgcaccctcagacagaatggtttatcatgatgacgatgcttttcgaatggaaagaaagcgcaaacatagcgaggaagtgaagattgcaaaggaagttgaggctcatgaaaaacgaatcagaaaggagctcgagaagcaagatatgttgaacagaaagagagaagaacaagtgcggagggaaatggagagaaatgatcgtgaaagaaggaaagaagaggagaggttgttgcgtgaaaagcagaaggaagaagagagattccaaagggaacaaaggcgtgaacacaagcgaatggaaaaatatttgctgaagcagtccttaagagctgaaaaaataagacaaaaggaggagcttcgtaaggagaaagaagccgcaaggcagaaggctgccaatgaaagggctacagcacgtagaattgcacgggagtatatggagctcatggaagatgagcgcctagaactaatggaactggtttcacgaagcaaagggttgccctctatgctatctcttgatagcgacacgttgcagcagcttgattcattcagaggaatgctgagacaatttcctagtgaaattgtgagattgaaggtgccattttcaataaaaccatggacaagctctgaagataatattggaaaccttttgatggtgtggaagttcttcattacctttgcggatgttcttgggattccgtcattcacgcttgatgagtttgtgcagtctcttcatgattatgattcaaggttgttgggagaattgcatgttgctctgctgaaatccataataaaagatattgaggatgttgcccggactccttcagttgcttcagggatgactgctaatcctggaggtggtcatccacaaattgttgaaggggcatacgattggggcttcaacatacttgcctggcagcgacacttgaatttgcttacatggcctgaaatattgcgccagtttggtttatctgctggtcttggaccacagttaaggaaaaggaatgctgaaaatgtcaataatcatgatgataatgagggtcgtaatggtgaggatgttatttccatactgagaagtggctcagcagctgtaaatgctgctgctaaaatgaaagaaagaggctacggtaatcgccgcaggtctcgacaccgtctgacacctggaactgtaaagtttgctgcgttccatgtgttgtcacttgaagggagccaaggtctcacgatattggaagttgcagaaaaaatacagaaatctggactgagagaccttacaacaagcaagacacctgaggcatctatatctgctgcactgtcaagggattcaaagcttttcgaaaggactgcaccttcaacatactgtgttaaaactccatacagaaaagatcctgctgattcagaggctgtgttggcagcagcacgtgaaaaaataagggtgtttcagaacactatttctgagtgtgaagaagtggagaaggatgtggatgatgctgagagggatgaagattctgagtgtgatgatgctgacgatgatcctgatggtgatgaagtgaatattgaggaaaaagatgtcaagacttccctggttaaggcacaagatggtggcatgcaagcttga

SEQ ID NO: 12108 - DNA, 810 bp, Oryza sativa
  Clone ID: TFbOSC401651j.C1.o19.fg
atgagaagtccagcagcgcttctcccggtggttgcagatggtggtggtggtgttggggtggaggaggagatggatgtggacgaggacatggcgatgtgcggcggccgcggcggcggcggcggggagaagaagcggcggctgagcgtggagcaggtgcgcgcgctggagcggagcttcgagacggagaacaagctggagccggagcggaaggcgcggctggcgcgcgacctcgggctgcagccgcgccaggtcgccgtctggttccagaaccgccgcgcgcggtggaagaccaagcagctcgagcgcgactacgccgcgctccgccaatcctacgacgcgctccgcgccgaccacgacgcgcttcgccgcgacaaggacgccctcctcgccgagatcaaggagctgaaggggaagctcggcgacgaggacgccgcggcgagcttctcgtcggtgaaggaggaggaggacccggcggcgtccgacgccgaccccccggccaccggcgcgccgcagggctcgtccgagagcgactcgagcgcggtgctgaacgacgcggagatccttccacacaagccagcgccggcggccgccgccgacgccgcggcctcggaggagacggaggcggtggtgaccggcgccgcgctgctccaccacgccgaggtgttcttccacgggcagcttctcaaggtggacgacgacgaggcggcgttcctaggcgacgacggcgcggcgtgcggcggcttcttcgccgacgagcatctcccgtcgctgccgtggtgggccgagcccaccgagcaatggacgacctag

SEQ ID NO: 12109 - DNA, 2661 bp, Oryza sativa
  Clone ID: TFbOSC401367j.C1.o6.fg
atggacgcgagcaagtacgtgaggtacacgccggagcaggtggaggcgctggagaggctgtactacgagtgtcccaagccgagctcgctgcggcggcagcagctggtgcgggagtgcccggcgctggcgaacgtggacccgaagcagatcaaggtgtggttccagaaccgccggtgccgggagaagcagcgcaaggagtcgtcgcggctgcaggcgctcaaccgcaagctcaccgccatgaacaagctcctcatggaggagaacgaccgcctccagaagcaggtctcccagctcgtctacgaccacggccgccacggcgtcgccgccgccgggatgatgcggcgagttcctgccttccctcctcaggccgccgccgccgccggccaccagctcgccaccgccaccgacaccagctgcgagtcggtcgtcaccagcggccatcatcatcagcagcagcagcacaacgtcgtccagccgccgccgcgcgacgcaagcccagctgggctgatgtcgatcgcggaggagacattgacggagtttctgtccaaggccaccggaaccgccgtcgagtggctccaaatgcctgggatgaagcctggtccggattccattggaatcatcgccatctcgcatggctgcgccggcgtcgccgcgcgagcttgcggcctcgtcggcatggagcccgctaaggttgccgaaatactcaaggatcggccgctgtggctgcgcgattgccggtccatggatgtggtgaacgtgctccctgctggcgccaacggcaccatcgagctgctctacatgcaggcaagaacacacaagcctgaaaattctgaacctgaacctgaaattctgaagctgaaatttgtattcgatcttcagctctatgctccgacgacgctggcgccggctcgcgacttctggctgctgcggtacacctccattctcgacgatggaagcttagtggtgtgtgagagatcactcagtagcaagcaaggaggcccaagcatgccacttgtccagccttttatcagaggtgagatgcttcccagtgggttcttgatccggcctagcgatgttggaggcagcgtgatacacatcgttgatcatatggacctcgagccttggagcgtgcctgaagttgtacgacctttgtatgaatcttctgccatggttgcgcagaagatctcgatggcggctttgcgctacctgaggcaggttgcacacgaagatacacgttctgtgatcacaggatggggaaggcagcctgcggctttgcgtgctctgagccaaaagctcaccagaggattcaatgaagctctcaatgggcttgccgatgatggatggtccgtgatcgagagcgatggcgtcgacgatgtttgcatctctgtcaattcatccaaagtgatcggttgcaatgcaacattcagcagtggactccctattgtcagtaccggtgttctttgtgccaaggcatccatgctgttgcaggatgtctctcctccatcactactgcaatttttgcgcgaacaccggtcacagtgggccgacagcaatttagacgcattcttcgcctccacgatgaaaccaaacttctgcaatttacccatgtcccgtcttggaggattcagtggtcaggtcatacttcctttagcacacacgtttgaacctgaagagttcctggaagttatcaagctaggaaacgccagcaactaccaagatacactggtgcaccgtgatctgttcctcttgcagatgtacaatggagtagaggagagcagtgcaggaacatgttcagagctcatctttgcgcccatcgacgcatcgttcagtgatgattccccactgctgccttccggtttccgcatcatcccaatcgattctcctctcgacacgtcgagcccgaactgcacgttggatctcgcgtccacgctcgaagccgcgacgccacggagcaggatcagcggcgtcaatggcggcggcggcggctgtgctgctgctgcggcgagctctagctccaaggcggtgatgacgatcgcgttccagttcgcgttcgacggccacctgcaggacagcgtggccgccatggcgcggcagtacatgcgcaacatcatctcgtcggtgcagaggatcgccgtggcgctctcgtcctcccgcctcgtccctcccggcgccggcgccgccgccgcgcagctctcaccggtgactccggaggcggcgacgctgcccagatggatttgccagagctacagatttcattttggagatgaactcatcaaatctgtagatgcaaacagcagcaatgaatcgattctgaaagcagtttggcatcatccgagtgccatactctgctgctctctcaaggcgatgccagtgttcacatttgcaaaccagtctggcctcgacatgctcgaaacaactctggtggcgctccaagacatgacgctggagaaagttttcgacgatcaagggaggaagaacctgtgcacagagctccccaacatcatggagcaggggatggcgtgcatggagggaggggtgtgcgtgtcgagcgttgggagggcggcgtcgtacgagaaggcggtggcgtggaaggtggtcgacggcgacggcggcggcgcccactgcatctgcttcatgttcatcaactggaccttcctttga

SEQ ID NO: 12110 - DNA, 1577 bp, Oryza sativa
  unsure (1)..(1577): unsure at all n locations
  Clone ID: TFbOSC13680j.C1.o1.np
atgtgtattaaacccctgttcaggaccagccagggtatccttgacagcagcgacgaaaccaacttcgacaagacagctcccactatgaagatctttagctctggtgtgggggaaagagagcaagattgagtactacccactgtactcagcaagacataccggaagaggagggttcgcccctgtccccagcaggcaacgggcagcccccctttcatgctgcggtgaatccggaagccgatcaaccggacaccccggccgacccaactccatcacgcccaccctcgcctgggtacgtcggctagaggaaagctacactataagcccagccgttgcccacgctggcttgtggtaagtacggtaagttcttccagggcatcccgcgaaccggtccttaatcgccatgggcacgactaacaaaaccatgcacccacagcccaccatcatgacttgccttgctctcgtactgatgagaccacagcaacgacttcgaggaaccgcggatcgacgaaacggccgaaatctacgcgacaaacaaagcacacaagcaaaacatgttataagactactgaaacaggaaacaaaaccatttttaatggattctatacatttttatgaatttactaagacttgaatggacttaatcggagctcggatgaattagttatgatttttagaagattatctatgtttttactataaaagaaaaactcttaatcaatttattgcgcaataactcatcccaggactgacgtcagcacaagggggcggcgccgacatgcgggccccacgggtcagcggctcgagagagagtgagggagggacgcaggcacgtgggccccactggcagtggcacaaggcgggaggggttgcggctggcaggcgggccccaccggccgggctccaaaagggggggggggggtggcacctggctcggctcggctccgagccgaccggccggccatggggtggcggcgcgcgcggagctggcggcgggacatggttaccggcggcggagcgggagtcggaggcgacggctggaagcggcggcgggggaggcggcggcggccgacgcggaaggcggcggcgtcggccgaaggcgacggcgagtgcgtggagaggggcggcgcaaacgagagagatgggaaaagggaggagaggggatcctcaccggcgagcacggcggccggcgcgaaggacgaaggcggcggcgatgacccgacgagcgtangggcagacgggcggcgagagagaggtgttccggcggcgggattggatggggatgcggctgccggggtagctttggcggcggcgaagctaacggcggcggcggattggctcggcggcggctctagcggtggcggcgtgcggccagagcacggcggcgagcggcggcgctagaggagatcggcgcgagcgcggtagagggcgtgcgagagcgtggcgaaaaggggaaaagggagagggggacgcggggaagctttataggggctcgggagggggtgtcgccggccgaccggggctttttcctttcctccgggtcacgtgcggcctcgtcaaccggtcaaaccccgccatta

SEQ ID NO: 12111 - DNA, 795 bp, Oryza sativa
  Clone ID: TFbOSC418063j.C1.o13.fg
atgaccaacgcaggaagcacccccaccattgatgatggatatggaggggttgggatggaggcggagggggacgtggaggaggagatgatggcgtgcggcggcggcggggagaagaagcggcggctgagcgtggagcaggttcgcgcgctggagcggagcttcgaggtggagaacaagcttgagcctgagcggaaggcgcggctggcgcgcgacctcggcctgcagccgcgccaggtcgccgtctggttccagaaccgccgcgcgcggtggaagaccaagcagctcgagcgcgactacgccgcgctccgccattcctacgactccctgcgcctcgatcacgacgcgctccgccgcgacaaggacgccctcctcgccgagatcaaggagctgaaggcgaagctcggggacgaggaggcggcggcgagcttcacgtcggtgaaggaggagccggcggcctccgacgggccaccggcggcgggatttgggtcgtccgacagcgactcaagcgcggtgctgaacgacgtggacgcggccggcgccgcgcccgcggcgacggacgcgctggctccggaggcgtgcacgtttctcggcgcgccgcccgccgcgggcgcgggcgcgggcgcagcggcggcggcgagccacgaggaggtgttcttccacggcaatttcctcaaggtggaggaggacgagacggggttcctcgacgacgacgagccgtgcggcgggttcttcgccgacgatcagcccccgccgctgtcgtcgtggtgggccgagcccacggagcactggaactga

SEQ ID NO: 12112 - DNA, 591 bp, Oryza sativa
  Clone ID: TFbOSC900340j.C1.o3.fg
atgaccaacgcaggaagcacccccaccattgatgatggatatggaggggttgggatggaggcggagggggacgtggaggaggagatgatggcgtgcggcggcggcggggagaagaagcggcggctgagcgtggagcaggttcgcgcgctggagcggagcttcgaggtggagaacaagcttgagcctgagcggaaggcgcggctggcgcgcgacctcggcctgcagccgcgccaggtcgccgtctggttccagaaccgccgcgcgcggtggaagaccaagcaaacacttgcaagcgactcaagcgcggtgctgaacgacgtggacgcggccggcgccgcgcccgcggcgacggacgcgctggctccggaggcgtgcacgtttctcggcgcgccgcccgccgcgggcgcgggcgcgggcgcagcggcggcggcgagccacgaggaggtgttcttccacggcaatttcctcaaggtggaggaggacgagacggggttcctcgacgacgacgagccgtgcggcgggttcttcgccgacgatcagcccccgccgctgtcgtcgtggtgggccgagcccacggagcactggaactga

SEQ ID NO: 12113 - DNA, 879 bp, Oryza sativa
  Clone ID: TFbOSC410830j.C1.o4.fg
atggctcaggaggacgtcggtcacctgagcgacgccggcctggcgctgggcctgtccctcggcgggggaggaggagggacgaccgacgcggcggcggcgcaccgtggcggctgccggcggccgtcgccgtcgtcgcagtgcccgccgctggagccgtcgctgaccctgagcttgcccgacgacgcggcggccggcgcggccgcgaccgcgaccgcgaccgcgtccggcgggggcggccctgcgcacagcgtgtcgtcgctgtccgtcggcgcggcggcggcggcggccgtgaagagggagcgcgcggaggaggccgacggcgagagggtgtcgtcgacggcggccgggcgtgacgacgacgacgacgggagcacccgcaagaagctccggctgaccaaggagcagtccgcgctcctggaggaccgcttccgggagcacagcacgctcaacccgaagcagaaagtcgctttagcgaagcaactgaacctcaggccaaggcaggtggaggtctggttccaaaacagaagagcaaggacaaagctgaagcagacggaggtggactgcgagttcctgaagcgctgctgcgagacgctcaccgaggagaaccgtcggctgcagcgcgagctgcaggagctccgcgcgctcaagttcgccccgccgccgccgtcctcggcggcccaccagccgtcgccggcgccaccggcgccgttctacatgcaactcccggccgccacgctcaccatctgcccgtcctgcgagcgcgtcggcgggcccgcgtccgccgccaaggtcgtcgccgccgacgggaccaaggccggccccggccggaccaccacccaccacttcttcaaccccttcacccactccgccgcctgctga

SEQ ID NO: 12114 - DNA, 2142 bp, Oryza sativa
  Clone ID: TFbOSC400884j.C1.o2.fg
atggatttcggcgacgaacccgagggctccgacagccagcgccgccgcaagcgctaccaccgccacacgcctcgccagattcagcagctcgaggcgtacgcgttttctctatttttttttctgctgttgttcttctatgtgttgttggctttcgtccgccatggcggcggcgccatggatggagggatgaaatggatgttcaaggagtgcccccacccggacgagaaccagcgggcgcagcttagccgggagctcgggttggagccgaggcagatcaagttctggttccagaatcgccggacccagatgaaggcgcagcacgagcgggcggacaactgcttcctccgcgccgagaacgacaagatccggtgcgagaacatcgccatccgcgaggccctcaagaacgtcatctgccccacctgcggcggccctcccgtcggcgaggactacttcgacgagcagaagcttcgcatggagaacgcccgcctcaaggaagagctggaccgcgtgtcgaacctgacgtcgaagtatctcggccggccgttcacgcagctgccgccggcgacgccgccgatgacggtgtcgtcgctggacctgtccgtgggcgggatgggcgggccgtcgctggacctggacctcctcagcggtggctcgtcggggatcccgttccagctgccggcgcccgtgtccgacatggagcggcccatgatggccgagatggccacgcgcgccatggacgagctgatccgcctcgcgcaggccggcgaccacatctggtccaagagccccggcggcggcgtgtccggcggcgacgcccgcgagaccctcaacgtcgacacctacgacagcatcttctccaagcccggcggctcgtaccgcgcccccagcatcaacgtcgaggggtcccgcgagtccggcctcgtgctcatgagcgccgtcgccctcgccgacgtgttcatggacacgaacaagtggatggagttcttcccaagcatcgtgtccaaagctcacaccattgatgtgctcgtgaatggcatgggagggagaagcgagtccttgattctgatgtacgaggagctgcacatcatgacgccggccgtcccgacccgggaggtgaacttcgtccgctactgccggcagatcgagcaggggctatgggccatcgccgacgtctccgtcgacctgcagcgcgacgcccacttcggcgcgccgccgccgcgctcccgccggctcccttcggggtgcctcatcgctgacatggccaatggctactccaaggtgacctgggtcgaacacatggaggtggaggagaagagcccgatcaacgtgctgtaccgtgacctcgtgctgagcggcgccgcgttcggggcgcaccgctggctcgccgcgctccagcgcgcgtgcgagcgctacgcctccctcgtcgcgctcggcgtcccgcaccacatcgccggtgtgacgccggaggggaagaggagcatgatgaagctgtcgcagcggatggtgaacagcttctgctcgagcctgggggcgtcgcagatgcaccagtggacgacgctgtcgggctccaacgaggtgagcgtccgcgtcaccatgcaccggagcacggaccccggccagcccaacggcgtcgtcctcagcgccgccacctccatctggctccccgtcccctgcgaccacgtcttcgccttcgtccgcgacgagaacacccgctcccagggcttgaatgcgagccagaacagcatgctgatactgcaggagagctgcacggacgcgtcggggtcgctggtggtgtactcgccgatcgacatcccggcggcgaacgtcgtgatgagcggtgaggacccgtcgagcatcccgctgctgccgtcggggttcaccatcctccccgatggccgcccgggctcggcggcgggggcgtcgaccagcagcgcggggccgctcgccgccgcgcgcggcgggggcggcgggggcgctggcggcgggtccgtcgtcaccgtcgcgttccagatcctcgtcagcagcctgccgtcgtcgaagctcaacgccgagtctgtcgccaccgtcaacgggctgatcaccaccaccgtcgagcagatcaaggccgcgctcaactgctccgcccatggccaccacccctga

SEQ ID NO: 12115 - DNA, 510 bp, Oryza sativa
  Clone ID: TFbOSC5271j.C1.o1.fg
gccttcttcaaggagtgccccccccctgatgacaagcagcgcaaggagctcagccgcgagatcggcctccagcccctccaggtcaagttctggttccagaacaagcgcacccagatgaagacgcagcatgagagacacgagaacaatgcgctgcgcgcagagaacgagaagctgcgggcagagaacatgaggtacaaggaggcgcttgccaacgcgtcctgccccaactgcggcggtccggccgccatcggcgagatgtccttcgacgagcaccacctccgcctcgagaacgcgcgcctccgcgacgagattgacaggatctccgccatcgccgccaagtacgtcggcaagcccgccgcggccgtctcggccgcgtacccgccgctgccgccgtcgaacaggtcgccgctcgatcatatgggcattcccggcgctggcgccgacgtgttcggcgccgacttcgacaagccgctcgtcatcgagctcgccgtggccgccatggaggagccc

SEQ ID NO: 12116 - DNA, 1029 bp, Oryza sativa
  Clone ID: TFbOSC400615j.C1.o41.gm
atggaccgatacggcgagaagcagcagcagcagcagatgtttgcctcctacgtggacgcctccctcctagcagccagcggtgaggtgcagggcgagaggccgagagcgcggaggaggaggaggcgtggggcgaggtgcgttggcggcggcggcggtggtggcgaggtggacggaggggacccgaagaagcggcggctgagcgacgagcaggtggagatgctggagctgagcttccgggaggagcggaagctggagaccgggcggaaggtgcaccttgcctccgagctcgggctcgaccccaagcaggtggccgtctggttccagaaccgccgcgcccgccacaagagcaagctgctcgaggaggagttctccaagctcaagcacgcccacgacgccgccatcctccacaaatgccacctcgagaacgaggtgctgaggctgaaggagaggctggtggtcgccgaggaggaagtgaggcggctcagatcagcggcggggagccacacggcctccggagaaggcggagacatcatgggcttaggcggcagcggcgcctgcgtcgccgggagcccgagctcgtcgttctcgacgggtacctgccagccgccgagcttcggcggcggagatcacctcggagacgatgacctggtgtatgtcccggagtacggcggctacgctgataacagtgtggttgagtggttcagcctggaagtgatagtagtcaacggtggaaccacctcccgagcttttgggaagaggaccatggcggctccaccactaatagtggtgcaggtgtgggatcatgacttggatgtatgtcgacagcaagagaaggtggcaagggaagatggttatcgattttgtcacccgatagccatatccgtctcaagtgtgagtgtgagtggtccaaataagtccggcactctagactccgaagctgaccatgtcaactgttggctcggggccaaggtgaagccccgtgtgcatggacccggacaataccatgctcgacctcaagtatgcctctag

SEQ ID NO: 12117 - DNA, 2181 bp, Oryza sativa
  Clone ID: TFbOSC400998j.C1.o6.fg
atgggggatgaatgggagacttggatagctgcagatatgggccaaaacaaaggggccttaataaatgatggggagcagagaatgagtattccagcaagagaattatttgcagcaattgaggccgactcaggcttgttgcctgtgaacagtagcaacactaatgaaaaaaggaagaggcgtctacagaggctcactggcaaacagtcggaggtacttgaggggtttttcagcatctgtgggcatcccgatgatggacaaaagaggcatctgagtgagacaacaggtcttggtttagatcaagtgaagttttggtttcagaataaaagaacacaagtaaagactatgtgctggaaggaagagaactataagttgtcggtggagaatgaaattctgagggatgagaacaggagagttaagatagctcactgcactgctgtatgcctcacttgctgtaattcatcagtacagaaccagcttgccgttgagatggaaaggttaatggggcagagtgagtggctgcaacaagagattgcacggtcgaatggaacacccccggctgcaaaccttgcctttcaacttaattcatcagcagactatgtattttcagggcaacatgaccaacaaatgattgctgaactagccaaaaacgcaatgcacgcattgattattttggccgaatcccatgtcgctctatggtttcccgtccctggctgttcttatgaagtattgaacaagatggcttatgaccaagcatatcctggggataacagtgcaaacgccattggattcaagacagaggctactcgtgcagtttctatggtgatgatggactacaaaagcgttgtggatttcctcatggatccttacaactaccgaactttctttcctgaagttatttccggggcagtaaccaacaggatctacacgtggcctaccagtgatggttataatggggttatacaactgatgactgtcgagatgatgttcccatcgcccctggtaccggctaggaaatgcacattcctgcgctattgtaatgtgctgaacgaaggattagtggtcgtcattgatgtgtcattggacgatggcagtatcttctccaaatgccgtaaaatgccatcagggtttctgatccaatccataaggccaaacagctgcaaggtcactgccatagagcacgtccttgcggatgacaccggtgttcatgagctctaccagccttgtatgaatggactcgtcttcggagctcggcgctgggtggcgaccatggcgcggcagtctgcacgcatgagagatgttcatcacaacaagacagctccgcaagtcagcacgaaggggaggaagaatctaatgaagctagcggacgacctgctcgcgagcttcgccggcggcatcgccgccactggcggaggaacgtggaccgtcgtgatcggcgccggcacggagaaggacatcagggtcgcgtacaggaggaccaccgagggcagcagcagctacaacgcgatcctgtccgtcaccgcgtccctgcgtctgccgctgcccatgaggaaaaccttcgatctgctcaggaaccttactcaccgctgcaagtgggacgtcctggtgcacggcagcgtggtgaaggaggaggtcaccatcgccagaggcgtcgggaacgacgacactgtcaccgtcctccactgcaagcgcgccggcagggaggacaggggaaggaccatgatcctgcagaacaacgggtacgacgcgtcgggctcgttcatggtctactcccagatcgacagcgagctgatgaacaccatggtcctgagccccagcgacctgccgcccgggcggggcgggccgtccctctaccccaccggcttctcccttctccctgacgtcgaggctgcccaggacagcagcggcatcgccctcggcgaggttgggggaactctcatgaccatgggcttccagattccggtgaagctcgccagtggggatcgcatgtattcccggtctgcggcatcggcaatcaggctcatgactgacaccattgccctcgtcaagaagacgctgatgaacgagcattctggtatctacgggggagaaaagggaggtccgtgtgcagataaaaatcaagaacatgcgaaggggattcatcggctccgatcaccctgcatctcccagaatttgctgaattaa

SEQ ID NO: 12118 - DNA, 924 bp, Oryza sativa
  Clone ID: TFbOSC34011j.C1.o2.fg
atggatctcggcctcagcctcggcctcggcctcgcctcgcagggcagcctcacctcctccaccaccaccacctcctcccccggcgccggatcatcctccccgtgggccgccgcgctcaactccatcgtcggcgacgtgaggcgggatcaggccgcggcgcatgctgccgcggcggtgggggttggggttgggggcgaggagatgtaccaggggagggcgtccacgtcgccggacagcgcggcggcgctgtcgagcgcgagcgggaagagggagagggagctggagcggtcgggatccggggttgacgacgacgacggcgcggacggcgccggcgggcggaagaagctcaggctgtccaaggaccaggccgccgtgctcgaggagtgcttcaagacgcactccactctcaaccccaagcagaaggtggcgctggcgaacaggctggggctgcggccgcggcaggtggaggtgtggttccagaaccggagggcgaggacgaagctgaagcagacggaggtggactgcgagtacctgaagcggtggtgcgagcgcctcgccgacgagaacaagcgcctcgagaaggagctcgccgacctcagggcgctcaaggccgcgccctcgccggcgtccgcgtccgcgatgcagccctcctcctccgccgccgccacgctcaccatgtgcccctcctgccgccgcgtcgccaccgccggcgcgccgcaccagcctaaccaccaacaatgccatcccaaatctaacaccaccatctcctcctcctccaccgccgccgccgccgtcgccgtcgccggcggcaacgtgctgcccagccactgccagttcttcccggccgccgccgccgccgccgaccggacaagccagagcacgtggaacgccgccgcgccgctcgtcaccagagagctcttctag

SEQ ID NO: 12119 - DNA, 501 bp, Oryza sativa
  Clone ID: TFbOSC11877j.C1.o1.fg
atggatggggaggaggacagcgagtggatgatgatggacgttggagggaagggcgggaagggcggcggcggcggcggcgcggcggacaggaagaagcggttcagcgaggagcagatcaagtcgctggagtccatgttcgcgacgcagaccaagctggagccgaggcagaagctgcagctcgccagggagctcggcctgcagcctcgccaggtcgccatctggttccagaacaagcgcgcgcggtggaagtccaagcagctcgagcgcgagtactccgccctccgcgacgactacgacgccctcctctgcagctacgagtccctcaagaaggagaagctcgccctcatcaagcaggcacgcacatcgtcgtcctcatcgattcttgatcgctttctttcttgcttgccttttgcatcgattctgacgcgtgatcggtgcgttcttgcagctggagaagctggcggagatgctgcaggagccacgggggaagtacggcgataa

SEQ ID NO: 12120 - DNA, 3327 bp, Oryza sativa
  Clone ID: TFbOSC401616j.C1.o2.fg
atggcggcggttcggaagatggcggccaatggcctcgcagcaaaaagggagaatacagggacaaagaaatctcccctgcaaatccagatgctggagagattctactctgaggtacaataccctcagtcggaggacattgcagagtatgcaacatctgttggtttgacttacaatcaggtcagaatatggtttaaggagcggaggaggaaagagaggagagaaacggaatctttaggggcgcatatggaaaagcaacttagtgcaagatcaaatgggttcagatgcagcagcagcaggtcttcctcttttagccggtctaccatgtaccgtactgtgaatttacagccagaggacgaccgttatgttgacaagggtatgagcttcacaggagagaaacacacactccgatcacaagttctgtttcccaaggattatatcctgaggaaagtcttccgcaaggatggtccacctcttggaagcgaatttgatccccttccccatagtgcacctggccatctcagagatactacagacgaccatttctaccagaaccaaagagtaataaagaagagaaagattgtggagcctaccactcagagatcttccctgccatgtggggacaatggtcctgtgaggaaacatggagccgggaaaggtctaatgacagtgtggcatgcaatgtattcccatagtagcaaaattcaagatggatctaattttattgatgaaactggttgcttgaggtccttgagaccattagatgattgtggcagaatagaggattgcgatgatggaaagctaattcaggtgccaagtagcagagttactgatccgaagaagcatcctccaatggaatgccatctttcagttgatgaatcacaatccccagtgctacaggctaaccaagtgactttagttgatgatgaggagcttgaactccgtgaattgcaagcaggtcctaacccattgagatgttcagctcacctttcttcaagtgggagacatggctgccctctttgtaaagatttactttccaggtttcctccatcaagtgtcaagatgaaacagccattctccacaagaccttgggggtcatcaccagaaatggtgaaaaagcttttccaggttgtccggtttatctacaatcgttttggttatatggatgtccatcccttcacacttgatgagttggcacaggcatttcatgacaaggttagggaacaggagtttgatatgaatttttggatcaagtctctgaattctcttacctgggttgaaatactacgtcaagttttggttgcttctggttttggttcgaaacatcatatgctgaatcgggatttttttaataaggagaaaaatcaaatggttaaatatggtttacgtcctcgtacactgaagggtgaattgtttgcactattgtctaagaaaggtagtggtggcttaaaggtatcagaacttgccaaatcacctgagattgttgatcttagcatctccagcacagaaatagagcagctgatctattcaactctttctagtgatatcacattatttgagaagattgcgccttctgcatatcgtctccgtgtagatcctcgaattaaaggaaaggaagactctggatcagataccgaggactctggaagtgttgatgatcacagtgatgctagcagtggtgctgatgaatctgatggttcacatgagatgagtttttctgagcatgaacatagaatccttagaagaaagtggaaaaatggtcatgaaaatgtgaatagatgtagtgaaattgatgaaagttattctggagaacgatggcttctggggttgatggaaggcgagtactcagacttaagcattgatgagaagttggattgcttggttgctttaatggatgttgtttctggtgctgattctgctccaagacttgaggaaccatcaagagtcgtgcctagcataccgagagcacagccgcatgtgtcaggtgggaaaataaagaaatcgacaagaaacatttgtcaatctagtgatgagtgctttaatgcatcaggaagcatgtatggtttggattcttctatgcatgagcagtcaagaagcctgagaagtcgtgattatgttgcttactctggaaggaatgatacgtctacaggagttgctcatcaaccacaagttgttctcttaggatccgaccgtaggtataataattattggctcttccttggaccttgtagagcagatgatccaggacatcgtagggtgtacttcgagtcatcagaagatggtcactgggaggttattgattcaccacaggagttactttccctactagcttcgctagacagcagaggtactagggaagcttatcttcttgcgtcaatgaaaaagagacagacatgcctttttgaagccatgaaaaagcattacgaaaatagagatgcagttcaacctgcaatgccatctgatacatctcactctgagacaagtagtggagatggagcttcacccaagctaagtagtggagatggagcttcgccaacatcagacattgacaatgcttctgtccccacaaatccagctgagaatatgataaatgcatcatctgcaatagcaattgaagttgggaggagaggtgatgagaaaatattgaagtgggaaagatctcaaacatttgataaatggatctggacttctttctattcttgcctaactgctgttaagtgtggcaagaaatcattcaaggaatcactagttcgctgtgaaagttgtcatgatttgtattggagagatgaaaagcattgcagaatatgccactctacttttgaagttagctttgatcttgaagaacgatatgctatacatgtggctacatgcagggatcctgaagatgtgtatgatgtgccaaatcataaagttctgccttcacagctacaagcacttaaggcagccattcatgctattgaggcacacatgcctgaagcagcgtttgctggtttgtggatgaagtcttcgcacaagctgtgggttaagcggctgcgacgaacgtcatctttggcagagcttttacaggttcttgttgattttgtgggggcaatggatgaggattggctgtacaaaagttcatcatctgtaagcttttgttcgtatttggatgacattgtcatatacttccaaacaatgccacaaacaacatcagcagttgcactgtgggttgttaaattggatgccctcatcacgccttatttggaaagagctgattctgacagagcattgggcgaagagtctgtgcagacaagaacgcgagcatgcggtgagatagctaggaatcgatga

SEQ ID NO: 12121 - DNA, 637 bp, Oryza sativa
  Clone ID: TFbOSC401000j.C1.o17.np
agcagcagcaccagttcttgatgccaccgcctgcgccggtggtgccgccgcagctgtgcatgccggcgatgatggcggacgagcagtacatggacctgggcggtggcggggcggcggcggcgccggggaggggcggggccggggagaggaagcggcggttcacggaggagcagatacggtcgctggagtccatgttccacgcgcaccacgccaagctggagccccgcgagaaggcggagctggcgcgcgagctgggcctgcagccgcggcaggtggccatctggttccagaacaagcgcgcgcggtggcgctccaagcagctcgagcacgactacgccgcactccgctccaagtacgacgccctccactcccgcgtcgagtccctcaagcaagagaagctcgctctcacccagcggcgcgagctgattatgcttccgggaggcgaggacggcggcaagcaccgcggcgccaccgccgacgaggaggccgccgcgaccgcggcctcgctgaacgacctatgcgccaccgccggggatgcgggggggctccccgcgctggcgccgttcccgagggcggcggctcgtcctcgccgtcgtgcacagcgccgcactgctcgtggtggccgtgctcctctccg

SEQ ID NO: 12122 - DNA, 675 bp, Oryza sativa
  Clone ID: TFbOSC34011j.C1.o4.fg
atggcggagcaggaagtgatcaggcgtgatgatgtggttgcggcgacggcggcggaggatgagaggttcgcgtgctcacccggcagcccggtgtcgagcggcagcgggaagcgaggcagcggcagcggcagcggcgacgaggtcgacgacgccggctgcgacgtcggcggcggcggcgcgcgcaagaagctgcggttgtccaaggaccaggccgccgtcctcgaggagtgcttcaagacgcaccacaccctcactccgaagcagaaggtggcgctggcgaagagcttgaacctgcggccgcggcaggtggaggtgtggttccagaaccgccgcgcgaggacgaagctgaagcagacggaggtggactgcgagcacctcaagcggtggtgcgaccagctcgccgacgacaaccgccgcctccacaaggagctcgccgagctcagggcgctcaaggccacgcccacaccgcccgccgccgcgccgccattgaccaccctcacaatgtgcctctcctgcaagcgcgtcgccaatgccggcgtgccctcgccggcggcggcgatattccccggccacccccagttcttgtgcggattcagagatcacgccggagcagcgtcgtcgtcgtacggcggcgcatcatctggactcgcgaaggcggtcagggcggcgaggtag

SEQ ID NO: 12123 - DNA, 870 bp, Oryza sativa
  unsure (1)..(870): unsure at all n locations
  Clone ID: TFbOSC410031j.C1.o13.gm
atggccggcgggcacgcggcgcagtcgccgtcgccgtcgtgcgggctgggcgagaagaagcggcggctggcgctggagcangtgcgcgctctggagcggagcttcaacacggacaacaagctggacccggaccgcaaggcccgcatcgcgcgcgacctcggcctgcagccgcgccaggtcgccgtctggtttcaaaaccgccgcgcccggtggaagacgaagcatctcgagcgcgactttgccgcccttcgggcccgccacgacgcccttccgcgccgaatgcgaccccctgggccgcgacaaggacgccctttcccgccgaggtacgcgcccaccgctaagccggcaatgacgcggcggccggcgccgcggcccgccacggtgtgcaaggacggctcgtcggacgacagcgactccagcgtggtgttcaacgacgaggcgtcgccgtactccggcgcggccttcattggattcggcccgtcgttcttggtcgacgacgcgtcggcggcaaccgtgggctgctcgtcgtcgctccccgcgctcgagtccaaatggcacggtccgtactccgacgactcgtgcaaaggcggcgtctatggcttcacggaggaatggctcgctgcctgctccggcgagatggccggcaacgacgccgccggcttcttctccgacgagcacgcctccaacctcaacttcggttgggatcgcctcatctccttcagctttggctcaacgatgcccaggatccacctcggcatggatggataccgctacgccaagtctgagctctcccatgatcatggtggcataagagaggagggggatgtagtggtggcggcagccggcagtgcttggtttggcactgcctag

SEQ ID NO: 12124 - DNA, 533 bp, Oryza sativa
  Clone ID: TFbOSC6947j.C1.o1.fg
atggctcaggaggacgtcggtcacctgagcgacgccggcctggcgctgggcctgtccctcggcgggggaggaggagggacgaccgacgcggcggcggcgcaccgtggcggctgccggcggccgtcgccgtcgtcgcagtgcccgccgctggagccgtcgctgaccctgagcttgcccgacgacgcggcggccggcgcggccgcgaccgcaaccgcgaccgcgtccggcgggggcggccctgcgcacaacgtgtcgtcgctgtccgtcggcgcggcggcggcggcggccgtgaagagggagcgcgcggagaaggccgacggcgagagggtgtcgtcgacggcggccgggcgtgacgacgacgacgacgggagcacccgcaagaagctccggctgaccaaggagcagtccgcgctcctggaggaccgcttccgggagcacagcacgctcaacccgaagcataaagtcgctttagcgaagcaactgaacctcaggccaaggcaggtggaggtctggttccaaaacagaagagcaag

SEQ ID NO: 12125 - DNA, 903 bp, Oryza sativa
  Clone ID: TFbOSC401481j.C1.o34.np
atggaggatctgtacagcatccacccggggatctcgcgggtcggcggcgcggcgagcgaggcgtccggcgtgggcgtcgtcgtcggcggcggcggcgggtcgtcgtcgtcggatctgacggagctcatgaaggctcagatcgccggtcacccgcgctacccgaccctcctctccgcctacatcgagtgtcgcaaggtgggagcgcctccggaggtggcgtcgctgctgaaggagatcggccgggagaggcgcgccggcggcggcggcggcggcgccgggcagatcggcgtcgaccccgagctcgacgagttcatggaggcgtactgccgggtgctggtgcgctacaaggaggagctgtcccggccgttcgacgaggcggcgtctttcctcagcagcatccagacgcagctcagcaacctctgcagcggcgccacctcgccgccggccaccaccgccacgcactccgatgaaatggtggggtcctccgacgaagaccagtgctcgggggagactgatatgctagatatagggcaagagcaaagctcccgcttagctgaccacgaactcaaggaaatgcttctgaagaagtacagtggctgcctcagccggctccggtccgagttcctgaagaagcggaagaaagggaagctaccaaaggacgcacggtcggcactgcttgaatggtggaacacacactaccgctggccatatcccacggaagaagataagctgaggcttgcagcgaggacaggtcttgacccaaagcagatcaacaattggttcatcaaccagaggaagaggcactggaagccatcggacgggatgcggttcgcgctcatggagggcgtggcgggtggatcgtccgggacgacgctctacttcgacactggcacaattggacca

SEQ ID NO: 12126 - DNA, 2346 bp, Oryza sativa
  Clone ID: TFbOSC2844j.C1.o3.fg
atggagaggagggagattttccaagttgctgatcttgcacacatattgagagggaaacctgtagatcatcttcaacagccaaacttgctggataatcaccagttccagcaagcgttccagcatcagcagcagcagcatcatctccttgaccagatcccggcgacgacggcggagagcggcgacaacatgatccgcagccgtgcgtccgaccctctcggcggcgacgagttcgagagcaagtccggcagcgagaacgtcgacggcgtctccgtcgacgaccaggaccccaaccagcggccgcgcaagaagcgctaccaccgccacacccagcatcagatccaggagatggaagcattcttcaaggaatgtccacacccagatgataagcagcgcaaggagctgagccgggagctcggcctggagcctctccaagtgaagttctggttccagaacaagcgcacccaaatgaagaaccagcatgagaggcacgagaactcgcagctgcggtcggataacgagaagctccgggccgagaacatgcggtacaaggaggccctgagcagcgcctcctgccccaactgcggcggccccgccgccctcggcgagatgtccttcgacgagcaccacctccgcatcgagaacgcccgcctccgcgaagagatcgataggatatcggcgatcgcggcgaagtacgtggggaagccaatggtgccgttcccggtgctgtcgaacccgatggcggcggcggcgtcgcgggcgccgctggacctccccgtggcgccgtacggcgtgccgggcgacatgttcggcggcggtggcgccggggagctgctgcgcggggtgcagtcggaggtcgacaagccgatgatcgtggagctcgccgtggcggcgatggaggagctggtccgcatggcgcagctggacgagccgctctggagcgtcgcgccgccgctcgacgccacggcggcggcgatggagacgctcagcgaggaggagtacgcgcgcatgttcccccgagggctcggccccaagcagtacgggctcaggtcggaggcgtcccgcgacagcgccgtcgtcatcatgacgcacgccaacctcgtcgagatcctcatggacgcgaatcagtacgcggcagtgttctcgaacatcgtgtcgagggccatcacgctggaggtgctgtccaccggcgtcgcggggaactacaacggtgcattgcaagtgatgtcagtggagtttcaggtgccatcgccactggtgccaacgagagagagctacttcgtgagatactgcaagcagaacgcagacgggacatgggccgtcgtcgacgtctcgctggacagcctccgccctagccccgtcctcaaatgtcgccgccgtccgtcaggctgcctcatccaagaaatgcccaatggctactccaaggtgacgtgggtggagcatgtggaggtggacgacaggtcggtgcacaacatctacaagctgctggtgaactccgggctggcgttcggcgcgcggcggtgggtcggcacgctggaccgccagtgcgagcgcctcgccagcgtcatggccagcaacatccccaccagcgacatcggcgtgattacgagctcggaggggaggaagagcatgctgaagctggcggagaggatggtggtgagcttctgcggcggcgtgacggcgtcggtggcgcatcagtggacgacgctgtccggcagcggcgccgaggacgtccgcgtcatgacgaggaagagcgtcgacgaccccgggaggccccccggcatcgtcctcaacgccgccacctccttctggctccccgtccctcccaagcgcgtcttcgacttcctccgcgacgaatcctctcgcagtgagtgggacatcctctccaatggcggtatcgttcaagaaatggcccacatcgccaatggccgggatcagggcaactgcgtctcacttcttcgcgtcaacagctcgaactcgaaccagagcaacatgctgatcctgcaggagagctgcacggacgcgtcggggtcgtacgtcatctacgcgccggtggacgtggttgcgatgaacgtcgtgctaaacggcggcgacccggactacgtcgcgctgctgccatcgggcttcgccatcctgcccgatgggccggcgcacgacggtggcgacggcgacggcggcgtcggcgtcggctccggcgggtcgctgctgacggtggcgttccagatactggtggactccgtcccgacggcgaagctctcgctggggtcggtggcgacggtgaacagcctcatcgcctgcacggtggagcgcatcaaggcggccgtctccggcgagagcaatccgcagtag

SEQ ID NO: 12127 - DNA, 3681 bp, Oryza sativa
  Clone ID: TFbOSC400964j.C1.o114.fg
atggcggggaacgagtggatcaatggctacctggaggcgatactggacagcggcggcgcggcggggggaggtggaggcggcggaggaggtggtggtggaggtggaggtggcggtggaggtggagggggagggggagtcgacccgaggtcgccggcggcgggggcggcgagcccgcgtggcccgcacatgaacttcaatccgacgcactacttcgtggaggaggtggtgaagggcgtcgacgagagcgacctccaccggacgtggatcaagctggagcttgagggaatcctgaggatttctgcacggaggaaggagcaggagcaggtgcgccgcgagacttcggaggaccttgcagaggatctgtttgaaggcgagaaggcggacaccgtcggtgaattggcacagcaagacactcccatgaagaagaagttccagaggaacttctcagagctcaccgtcagctggtccgacgagaacaaggagaaaaagctgtacattgtgctcatcaggtcttataccgcttactttactcattggtgccattctgtatatgccactaaattgcaaaattttactgagttcctttattctttgttctactttagtcttcatggtctagttcgtggcgataacatggaacttggtcgggattcagatactggaggacaggtgaaatatgttgttgaactcgcaagagcacttgcaatgatgcctggcgtgtacagagtggatctgtttactcgtcaagtgtcatctcctgaagtggactggagctatggggagcctactgaaatgttaacctccggttccactgacggagagggaagcggtgagagtgctggtgcgtacattgtgcgcattccgtgcggtccaagggacaagtacctccgtaaagaggccctgtggccttacctccaagagtttgtcgacggagctctcgcgcatatcctgaacatgtccaaggctctgggggaacaggttagcaatgggaagctggtcttgccatatgtaatccatggccactatgccgatgctggagatgtcgctgctcttctttctggtgcgctgaatgtgccgatggttctcaccggtcattcacttgggaggaacaagctggagcagatcatgaagcaagggcgcatgtcgaaggaggagattgactcaacttacaagatcatgaggcgcattgagggtgaggagctggccttggatgcagcggagcttgtcataacgagtacaaggcaggagattgatgagcaatggggactgtatgatggctttgatgtcaagctagagaaagttttgagggctcgtgcgaggcgcggagttagctgccacggccgttttatgcctagaatggtggtaattcctcctgggatggatttcagcagtgttgtggttcctgaagataccagcgatggagatgatggcaaagactttgagattgcctcgccgaggtcactgcccccaatctgggctgaggtgatgcggtttttgaccaatccccacaagccaatgattctggctctgtcaagacctgatccaaagaagaacatcaccacccttgtcaaagcatttggagaatgtcgcccactgagggaacttgcaaacctaattctgatcatggggaacagggatgacatcgatgagatgtccgctggcaatgcaagcgtcctcaccactgtcctgaagctgatcgacaagtatgatctgtacggaagtgttgcattccccaagcatcacaagcagtcagacgtaccggagatttatcgcctcacagggaagatgaagggcgtcttcatcaatcctgctcttgttgagcctttcggtctcaccctgatcgaggctgcggctcacggtctcccgatcgtcgccaccaagaacggcggtccggttgacattaaaaatgctctgaacaatggactgctggtagacccgcatgaccagcacgccattgccgacgcgctgctgaagctggtggcggacaagaacctgtggcaggagtgccggaagaacggcctgcgcaacatccagctctactcgtggccggagcattgccggacatacctcaccaggatagccggatgccggatcaggaacccgcgctggctgatggacacgccggcggacgcggccgccgaggaggaggaagccctggaggactcgctcatggacgtccaggacctctcgctgcgcctgtccatcgacggcgagcgggggtcatccatgaacgacgcgccatcgtcggacccgcaggactcggtgcagaggatcatgaacaagatcaagcggtcgtctcccgcggacacggacggcgccaagattccggccgaagcggccgccaccgccacctccggtgccatgaacaagtacccgctcctccgccgacgccgcaggctgttcgtcatagccgtggactgctacggcgacgatggcagcgccagcaagaggatgctgcaggtgatccaggaggtgttcagggctgtccggtcggactcccagatgtccaggatctccgggttcgcgctgtcgacggcgatgccgctgccggagacgctcaagcttctgcagctgggcaagatcccaccgaccgacttcgacgcgctcatctgcggcagcggcagcgaggtgtactaccccagcacggcgcagtgtgtggacgccggggggaggctgcgccccgaccaggactacctgctgcacatcaaccaccggtggtctcacgacggcgccaagcagaccattgccaagctcgcgcacgacggatccggcaccaatgtcgaaccggacgtggagtcctgcaacccccactgtgtctccttcttcatcaaagaccccaataaggtgaggacgatcgatgagatgcgggagagggtgaggatgcgtggcctccgatgccatctcatgtactgcaggaatgcaacaaggcttcaagttgttcctcttctagcatcgaggtcacaagcactcaggtatcttttcgtacgctggggcctgtctgtgggaaacatgtatctgatcgtcggggagcacggcgacaccgatcacgaggagatgctgtcagggttacacaagacggtgatcatccgcggcgtcaccgagaagggctcggagcagctggtgaggagctcagggagttaccagagggaagatgttgtcccatccgagagccccttgattgctttcacaaagggtgatctgaaggccgatgagatcatgcgtgctctcaaggaggtcaccaaggctgccagtggcatggattggcagaggccattgtgcaagactgcttattggttccaatcaagagtgtatactaacatggaagaaaaggaggaaatgaccatgctttcccttggagttggagctgctagcaagcactcaatatccaacagaaaattcagactgaaagaagtgacagatcacaaattcaaccttggagatcaagatcataacagtggccatgtgaggaagaagctaaggcttagcgaagaacaattgactgtgctggaaaatatgtatgaagctggcagcaatctcgaccaagcactaaaacaagggcttgcggagaagctgaacataaaaccacgccaagttgaagtctggtttcagaacagaagagcccggaccaaacataagcagatcgaagaagaatgcaagaaccgaggtggttggagggcctaa

SEQ ID NO: 12128 - DNA, 3084 bp, Oryza sativa
  Clone ID: TFbOSC401539j.C1.o51.fg
atggaggtagcagaggccggcgtcgacggcgtggcggggaggcggcagcaggaggaggcgtccggcgcggcgccgttcggcaggtcctcgtcgctcatcggcgccgcgggattcgacggcgcgctgagagttgagcacttgtttggcttcttgccttcttccccgatcgtgtctcccgagctcaaggaccttcgctcccagctgcaccagacggcggactgctgcgagaaggcgttcctcgacaccgagaagaagaagctaattctggagagcacgaaaggttacatctgcgacgcgattgtagcggtgattgatcatttggggaccgtctcatccaagctcgagcaacagctgcaggagaagattgagatcacacaaacagagaaaaagctcaacttcttgaagcagaggctcctgacatgtgaacagtatgcaattactctcaaactattgaccgtacgtggggacaatgatgccattcagtatcatcgccgttacctctcgcaatctactggaggaaccaaagaggaaaatggtgctaactccaggaaagatgatgtaaaatttgtggagtacaacagcccaaccatacctggagcaattcttactttcaagccatatgatattcagtcaaccattgggagagaacgttcggtggcaactacagactctgaaagcccaacaacggatgcaaagagttcattctctttcagagcagaggacgttcccattgttctagctgaacacaggaagaaggcaaatcatggcagcaatatcttgtcatttatcaggaaagtattgattggcaacaatgtacaacctaatatcactgaatccccaatttctgtcaaaccagtgtccattgaccatcatgcaggcgtgttcggccggaaaaatggacctgcggcgtcgggtggagacggggtggaggaaggcgacgaggaggtgcaggctgcaggcgaggcggcggtggagatcagcagcgagaacgcggggccggggtgtagacagtcccagtccggcggtggctccggggaagacggcggccatgacgacgacgacggagagggtagtaataagaagaggaggaggaagaactaccacaggcacaccgccgaacaaatcaggatcatggaagcgctattcaaagagtccccacatccggatgagaggcagcggcagcaggcggttcaggagcgacacgagaactcgctgctcaagtccgagctggagaagctccaggacgagcaccgcgcgatgagagagctcgccaagaagccatctcgctgcctaaactgcggcgtcgtggcaacctccagcgacgccgccgccgccgccacggcggcggacacccgtgaacagcggctgcgactcgagaaagccaagctcaaagctgagatagagaggctgcgagggacgccaggaaagtccgccgccgatggaatcgcctcgccgccgtgctccgcgtccgcgggcgccatgcagacgaacagcaggagcccgccgttgcacgaccacgacggcggcttcttacgccacgacgacgacaagccgaggatcttggagctggccacccgtgcgctggacgagctggttgggatgtgctcctccggcgagcctgtgtgggtgcggggcgtcgagaccggcagggacattctgaactacgacgagtacgtgcgcttgttccgccgcgaccacggtggttccggcgatcagatggccggctggacggttgaggcttccagggaatgtggactagtttaccttgacacgatgcatcttgtgcacactttcatggacgtggacaagtggaaggacctattccctaccatgatctcaaaggcagcgacgctggaaatgatcagcaaccgcgaagacgatggccgagacggcgtcctgcaactgatgtatgcagagcttcagacactgacaccaatggtgcccacgagggagttatacttcgcccgctactgcaagaagctggccgcggagagatgggcgatcgtcgacgtgtccttcgacgagtctgagactggcgtccacgcgtcgtcggcggtcaggtgctggaagaacccatccggctgcctcatcgaagagcagaacaacggccggtgcaagatgacctgggtggagcacaccagatgccgccggtgcacggtcgcgccgttgtaccgggcggtcaccgcgagcggcgtggcgttcggcgcgagacgctgggtggccgcgctccagctccagtgcgagaggatggtcttcgccgtggcgaccaacgttccaacgagggactcgaccggggtctccacgctcgcgggcaggaggagcgttctgaaactggcgcaccggatgacgtcgagcctctgccgcaccaccggtggatcgtgtgacatggcgtggcgcagggcgccgaaaggaggcagcggcggcggtggcgacgacgacatctggctgacgtcccgggagaacgccggcgacgaccctggcgagccgcaggggctgatcgcgtgcgccgcggcgtcgacgtggctgccggtgaatccgacggctctcctcgacttactgagggatgaatcacggcgaccagagtgggacgtgatgctacccggaaaatctgttcagagccgcgtgaatcttgcaaaggggaaggaccgtaccaactgcgtcaccgcctacgccgctcgaccggaagaagaagaagagagaggcggcaagtgggtcctccaggacgtctgcaccaacccctgcgagtcgacgatcgcgtacgcggcgatcgacgccgccgcgctgcagccggtcatcgccgggcacgactcgagcggcgtgcacctcctgccgtgcggattcatctcggtgatgccggacgggctcgagtccaagccggcggtgatcacggcgtcgaggaggggaggcgaggcttcgggggccggatcgctggttaccgtggcgttccaggtcccggccagcccgtcggcggcggcggccacgctctcgccggactcggtggaggccgtgacggtcctggtctcctccactctgcgtaacatcaggaaagccttggggtgcgactcgtgcgaggaggaattctag

SEQ ID NO: 12129 - DNA, 762 bp, Oryza sativa
  Clone ID: TFbOSC410612j.C1.o5.np
aacagcttcgtcgtctgggacccgcacgtcttcgccgacctcctcctcccgcgcctcttcaagcacaacaacttctccagcttcgtccggcagctcaacacctacgtgagcacccctaatcctaatcctaatccctttccttgtggagatagtaccaagaagaagaggagcctccccggcaacccagacccggaggcggaggtgatcgcgctgtcgccgcgggcgctggtggcgacgaaccgcttcgtctgcgaggtctgcaacaaggggttccagcgcgaccagaacctgcagctccaccgccgcggccacaacctcccctggaagctccgccaccgcgccgccgctgtctccgccgtgacgacagcggcgccggcgccgaggaagagggtgtacgtgtgcccggagccgacgtgcgtgcaccacgacccggctcgggcgctgggcgacctgaccgggatcaagaagcacttctcgcggaagcacggggagaagcggtggcggtgcgagcggtgcgggaagaggtacgccgtgcactccgactggaaggcgcacgtcaagaactgcggcacccgcgagtaccgctgcgactgcggcatcctcttctccaggaaggacagcctgctgacacacagggccttctgcgatgccctagctgaagagagtgcaaggcttcttgctgctgcaaacaacagcagcagcatcactactaccacctgcaacaacagcaacatcagcagcaacaacaacaacaacaacatt

SEQ ID NO: 12130 - DNA, 795 bp, Oryza sativa
  Clone ID: TFbOSC3919j.C1.o1.fg
atgtgtgataacaaacacgttcttagtgtctttctgccaaaaacatgtccttattgtcttgtgttgattaggacagaaacatgttacgattgcccctcaatacgttcacacgatctgaccggggctaacgagagatggcgactattcatgcagggtttccggaaggtggtgcccgatcggtgggagttcgccaacggcaacttccggcgaggagagcaaggcctcctctccggcatccgccgccgcaaggcgacgacgcctcagtcctccaaatcctgcggcagcggcgtcaacgtcgcgttccctccgccgctgccccctctgcccccggagccgtcggcgaccacgtccagcggcaacgaccgcagctcctcctccgcgtcctcgccgccgcgggcggacatcaccagcgagaacgagcagctcaggaaggacaaccaaacgctgacgatggagctggcgcgggctcggcggcactgcgaggagcttctgggcttcctgtcgcgcttcctcgacgtccggcagctcgatctccggctgctcatgcaggaagacatgcgagcggcggccggcggcgtcggcggcgagcagcgcgtgcaagagcacgcccgggaggagaagtgcgtgaagctgttcggcgtgctcctcgacgacacccatggcgccgccacgaggaagagggcgcggtgcgaggaggcggctgccagcgagcggccgatcaagatgatcaggatcggcgagccgtgggtcagcgttccatcgtcggggccggcgcggtgtggcggcgacaactga

SEQ ID NO: 12131 - DNA, 318 bp, Oryza sativa
  Clone ID: TFbOSC415863j.C1.o1.fg
atggactactcgacggtgaagcaggaggaggtggaggtggtggtgctggatggagaggaggaggcggcggcggcggcggcgccagtgccgttgccgggcggcgatgggggtgggggcggcggtggcgccgttcctggtgaagacgttcgagatggtggaggacccggcgacggacgcggtggtgtcgtggggcggcgcggcgaggaacagcttcgtggtgtgggatccccactctttctccgccggcctcctcttctccactttaagcactccaacttatccagctttctcctccagcttaacacctatatacgttga

SEQ ID NO: 12132 - DNA, 1248 bp, Oryza sativa
  Clone ID: TFbOSC11874j.C1.o4.fg
atggcggagcagggggcgggcgaggcggatgcgggcggcggggagcccgccgccggcggcggtgatgacggcggcggcggaggcgttggcggggcagaggtcgctgccgacgccgttcctgacgaagacgtaccagctggtggaggacccggcggtggacgacgtgatctcgtggaacgaggacagctcaacacctatggatttaggaagatcgtgccggaccggtgggagttcgccaacgactgcttccggcgaggggagaagcgtttgttgtgtgatatacaccgccggaaggtggtggcggcggctgccgcggcgccgccgccgccgtcgccggggatggcgacggcagctgccgcggtggcttcgggagctgtgacggtggccgcggcgccgatacctatggcgctgccggtgacgcgggcgggctcgccggcgcactcctcggaggagcaggtgctgtcgtcaaactctgggtcgggggaggagcaccggcaagcgtctgggtccggctctgcgcccggcggcggcggcggcggctccgcgtccggcggcgacatgggcgaggagaacgagcggctccggcgggagaacgcgcggctgacgcgggagctcggccacatgaagaagctctgtaacaacatcctcctcctcatgtccaagtacgccgccacccagcacgtggagggctccgcggggatatcctccatagcgaactgctccggcgagtcgtcggaggccgttcccccgccgccgcctctccccccggcgatactcgatctaatgccctcgtgccccgccctggccaccgccgccgccgctgcggggctcgccatagacggcgagcccgacccgagcgcgcggctgttcggcgtctccatcggcctgaagcggacgcgagacgacgccgccgccgccgccgacgaagacggcggcggcgaggatcaggccgagcacggcggcgcggacgtgaagccggaggcggcggatccgcatcccgccggcggcggcggcggaagcagcacggaggcgtcgccggagtcgcacccgtggcccatataccggccaacccccatgtaccacgcggtcaggcccacttgcaacgggccggacagggccgggtccgaccaagacgggtccagctccagcgtaagatccatcaggatgccggtgcacagtttggtcagttttacaagtgttttaggtgttagtgccaaaaatggtggtgacatagggcggaagcactag

SEQ ID NO: 12133 - DNA, 280 bp, Oryza sativa
  Clone ID: TFbOSC413071j.C1.o13.gm
atggaccacaacaccgaccctcctccgaccaccatggtggacgccgcggcggcgctgctgctggagcccaagctggaggggtacgacgacgacggcggcggcgagccgctgcagccggccccgttcgtctctccgctggaccagctgatgcagccgccgcggccgctggaggcgctgctgcaggggccgcatctgccgccgttcctgtccaagacgtacgacctggtgtgcgagccggagctggacgggggtcatctcctgggggccactccggctacag

SEQ ID NO: 12134 - DNA, 1620 bp, Oryza sativa
  Clone ID: TFbOSC100925j.C1.o3.gm
atggcggcggatggcgtgctggccggaggcggtgggtgccgcgaccacgtcggcgcgacgacggcaagaggcgatgggcggcgcgacaatagccggcggcggcacgcgtgcgtcgacggctgggggcaggaccgcgcccgcacgaggggagacgacggccagcggcgctatgcgcagtgccgcggtggctggggagatatttggagatggggagggttgattaggaagcaaccagacaccacggtgtatccaggccagatctgcgcggccgccggcggcggcggtggcatggctgaccagaccgctgctgccgttgtcgtcggaggaggagcggcggcgacgatgggggagccatctccacctccgccggcgccggcagcggaggcggcgggggtgggggtggggcagcagcagaggacggtgccgacgccgttcctgaccaagacgtaccagctggtggatgacccggcggtcgacgacgtcatctcctggaacgacgacggctccaccttcgtcgtgtggcgccccgccgagttcgcccgcgacctcctccccaagtacttcaagcacaacaacttctccagcttcgtccgccagctcaacacctacggatttaggaagattgtcccggacaggtgggagttcgccaacgactgcttccgccgaggggaacggcggctgctctgcgagatacaccgccggaaggtgacgccgccggcgccagcggcgacgacggcggcggtcgcggccgcgatcccgatggcgctgccggtgacgacgacgcgggatggctccccggtgctgtccggcgaggagcaggtcatatcctccagctcgtcccccgagcccccgctcgtgctgccgcaggcgccgtccggctccggctccggcggcgtcgcgtccggcgacgtgggggacgagaacgagcggctgcggcgggagaacgcgcagctcgcgcgggagctcagccagatgaggaagctctgcaacaacatcctcctcctcatgtccaagtacgcctccacccagcagctcgacgccgccaacgcctcctccgccgccgggaacaacaacaacaacaactgctccggcgaatccgccgaggcggccacgccgctcccgctccccgccgtcctcgacctcatgccttcctgccccggcgccgcctccgccgccgcgcccgtatcagacaacgaggagggaatgatgagcgcgaagctcttcggcgtctccatcggccggaagcgaatgcggcacgacggcggcggcgacgacgaccacgcggcgacggtgaaggcggagccgatggacgggcggccgcacggcaaggacgaacaatcggcggagacgcaggcctggcccatttaccggcccaggcccgtttaccagcccatccgggcctgcaacggatacgagtacgaccgagccggcagtgaccaagacggtcacgttcagttgcgtacttgcgtcaacaacctcctggtcaccggcgccggcaccctcgacgctggacgagagtacgagaccaactccctacccaggccacgacgcgcaaagaacagcaacgacgtgccagggatgcccaactcgttgggccaagcacccagcccggtcgcctga

SEQ ID NO: 12135 - DNA, 1375 bp, Oryza sativa
  Clone ID: TFbOSC412573j.C1.o1.gm
atggcggcggatggcgtgctggccggaggcggtgggtgccgcgaccacgtcggcgcgacgacggcaagaggcgatgggcggcgcgacaatagccggcggcggcacgcgtgcgtcgacggctgggggcaggaccgcgcccgcacgaggggagacgacggccagcggcgctatgcgcagtgccgcggccagatctgcgcggccgccggcggcggcggtggcatggctgaccagaccgctgctgccgttgtcgtcggaggaggagcggcggcgacgatgggggagccatctccacctccgccggcgccggcagcggaggcggcgggggtgggggtggggcagcagcagaggacggtgccgacgccgttcctgaccaagacgtaccagctggtggatgacccggcggtcgacgacgtcatctcctggaacgacgacggctccaccttcgtcgtgtggcgccccgccgagttcgcccgcgacctcctccccaagtacttcaagcacaacaacttctccagcttcgtccgccagctcaacacctacggatttaggaagattgtcccggacaggtgggagttcgccaacgactgcttccgccgaggggaacggcggctgctctgcgagatacaccgccggaaggtgacgccgccggcgccagcggcgacgacggcggcggtcgcggccgcgatcccgatggcgctgccggtgacgacgacgcgggatggctccccggtgctgtccggcgaggagcaggtcatatcctccagctcgtcccccgagcccccgctcgtgctgccgcaggcgccgtccggctccggctccggcggcgtcgcgtccggcgacgtgggggacgagaacgagcggctgcggcgggagaacgcgcagctcgcgcgggagctcagccagatgaggaagctctgcaacaacatcctcctcctcatgtccaagtacgcctccacccagcagctcgacgccgccaacgcctcctccgccgccgggaacaacaacaacaacaactgctccggcgaatccgccgaggcggccacgccgctcccgctccccgccgtcctcgacctcatgccttcctgccccggcgccgcctccgccgccgcgcccgtatcagacaacgaggagggaatgatgagcgcgaagctcttcggcgtctccatcggccggaagcgaatgcggcacgacggcggcggcgacgacgaccacgcggcgacggtgaaggcggagccgatggacgggcggccgcacggcaaggacgaacaatcggcggagacgcaggcctggcccatttaccggcccaggcccgtttaccagcccatccgggcctgcaacggatacgagtacgaccgagccggcagtgaccaagacg

SEQ ID NO: 12136 - DNA, 1155 bp, Oryza sativa
  Clone ID: TFbOSC400591j.C1.o27.fg
atggcgtcctcctcctcctcctcctccctctgccgactactcatccccaggccgaccacccgccgcttctccggaggaggaggggaggggggaatggcggcggcggcgccggtgaagcgggaggtgaagcccgaggcgggggaggggtggggcgggggtgatctgggggtggtgccgccgccgccgcggccgatggaggggctcggggaggcggggccggcgccgttcgtggcgaagacgtacgagatggtggcggacgcggccaccgacgcggtggtgtcgtgggggcccggcggctcgggggcctccttcgtggtgtgggacccgcacgcgctcgccgccggcgtgctcccgcgcttcttcaagcacgccaacttctcctccttcgttcgccagctcaacacctacgggttccgaaaggtcactccagatcggtgggagtttgcaaatgaagccttcttagctggtcagaagcatttgctgaaaaacatcaagaggaggcgtgtttccaagcctctcgtggattcacaactaagaaataaagcaagtgttgtttttggacagcctgaggctcctggtgaggttgtgagcttgaagagagaccgtgcagccctcagagctgaggtcatcatgcttaagcagcagtacaacgcctgtaaatctcagctcattgccatggaggagatggtccgcaacatcgagagaaggcaacagcagaccatcggcttctttgccaaggtactcaccaacccggctttcgtgcagcaggttctactcaactatgtgaataagaatggcctaagaggcgccgcgaaaagacaacggctgatggaaaacgaagaacagcatgctgattcgccattgaacaaaggtatggaagctgcatctgtgatggaagctgatgtttctccagggagcactggctgtggcacagttgggaaagtggagaccactccaatgtgcaatttccagaatattgagaatatgtgtgatgatgtctgggaagagctggacgccttacctgaaactggaatggagcaggaagaaaaggctgggattggctccttcgatgtcgaggagttcgtcggaaggccttgtggttgggttgatgactgcccataccttgtggagccgatgcagttcgtggaacactag

SEQ ID NO: 12137 - DNA, 1119 bp, Oryza sativa
  Clone ID: TFbOSC401020j.C1.o22.fg
atggatgatccaatgctgaatgcggtgaaggaggaggagagccacggggacggaggagggttggaggtggtggcgggagaggatggggcggcggcggtggcggcgggggtggcgccgaggccgatggaggggctgcacgacgccgggccgccgccgttcctgaccaagacgtacgacatggtggacgacgccggcaccgacgccgccgtgtcgtggagcgcgacgagcaacagcttcgtggtgtgggatccccacgccttcgccaccgtcttgctccccaggttcttcaagcacaacaacttctccagcttcgtcaggcagctcaacacctatggtttcagaaaggtggatcctgatcggtgggaatttgcaaatgagaattttctgcggggacagagacatcttctcaagaacatcaagcgtagaaaaccaccttcccatactgcttcaaaccagcaatcccttgggccataccttgaggtgggccactttggatatgatgctgagatagaccggctgaagagagacaagcaattattgatggctgaggtggtgaagctaaggcaggagcagcagaatacaaaggcaaatctgaaagccatggaggataggctgcaaggaaccgagcagaggcaacagcagatgatggcattcttggcgcgtgtcatgaaaaatcctgagttcttaaaacaacttatgtcccagaatgagatgagaaaggagctccaagatgccatttcaaagaaaagaaggcgtcgcatagatcagggacctgaagttgacgacgtcggcactagcagtagcatagagcaagagtcaccggccttgtttgatccccaggagtcggtggaattcctcatcgatgggattccctccgatcttgaaaactcagctatggatgctggaggtctggtggagccacaggatttcgatgtcggcgcctccgaacagcagcagatcgggccccagggggagttgaacgacaatttctgggaggagctgctgaacgaagggcttgttggtgaggagaacgacaacccggtcgtcgaggacgacatgaatgtgttgtcggagaagatgggttacctcaactcaaatggcccaacggctggggaatag

SEQ ID NO: 12138 - DNA, 1047 bp, Oryza sativa
  Clone ID: TFbOSC401122j.C1.o44.fg
atggacgggctgcacacggagctcgcgctggggctgatcgggtgctgcggcggcgacgggcagcagcagacggcgccgttcgtggcgaagacgtaccagatggtgtgcgacccgcggacggacgcgctcgtccggtgggggagggacaacaacagcttcgtcgtcgtcgaccccgccgccttctcgcagctcctcctcccctgcttcttcaagcacggcaacttctccagcttcgttcgccaactcaacacctacgtcagtatcattcaatcgccggcgccgggattccggaaggttcaccctgaccggtgggagttcgcgcacgagtcgttcctgcgcggccagacgcacctgctgccgcgcatcgtgcgccgcaagaagcgtggcgagggcggcggtggcggtggcggcgcgtcctgctctttcggtggcggcgccggcgagcaccaggtggctgctgctgcggccagcgtgggaatgtcgggagaggaggaggatgcggcggaggacgtgctggccaaggaggccgcgctgttcgaggaggtgcagaggctgcggcacgagcagacggccatcggggaggagctggcgcggatgagccagcggctgcaggcgacggagcggcggcccgaccagctcatgtccttcctcgccaagctcgccgacgaccccaacgccgtcacgggccacctcctcgagcaggccgccgagaggaagcgccggcgccagcacctcccttcccacgagcccaccgtctgtcccctcccgccggcgccgccgccacaacctccgcagccgctcctggctctcgccggcgccgcggccatggacggcacctactggtggacgacggagcatcatcatcatcatcatcatcagatgaagcccatgacggtgttgccatccttggagccgcccaccgctagctgcggcgtgcaccaagtgccggagctcgggggtggcggcgtgatgggcttaacgacggacggtgaggccaaggtggagccgccattcccattctgtctacttggtcaagctttcttttaa

SEQ ID NO: 12139 - DNA, 1449 bp, Oryza sativa
  Clone ID: TFbOSC401064j.C1.o105.fg
atggaggggggcggcgggggcgggtcgctgccgccgttcctgagcaagacgtacgagatggtggacgacccgtcgacggacgcggtggtggggtggacgcccgccggcaccagcttcgtcgtcgccaaccagcccgagttctgccgggatctgctccccaagtacttcaagcacaacaacttctccagcttcgtgcgacagctcaacacctatgattttaagacagtacttgtgaataaccaaggtcaactcttgttctaccaagaaaattcaagtagcttattgcaatgttattgtcttctccatccggttgaagttgtacaaaaatgtttgataatgggctttaggaaagtagatccagaacaatgggaatttgcaaatgaggatttcataaaaggacagcggcaccggttgaaaaatatacatagacgcaaacctatattcagccattcatcacacagtcagggtgctggaccattaacagataatgaaaggaaagactatgaggaagaaatcgagaggctcaaatccgataatgcagcactgtcctcagagcttcaaaataatacgttgaagaaacttaatatggagaaacgaatgcaggctttggaagagaagctatttgttgtggaagatcagcagaggagtctgatatcatacgtcagagagattgtaaaggcaccaggatttctttctagctttgtacagcaacaagatcatcacaggaagaagaggagactgccaataccaatctccttccatgaggatgcaaatactcaggagaaccagatcatgccttgtgacttgaccaactcaccagctcagacattttacagagaatcatttgacaagatggaatcatccttgaactcattagaaaatttccttcgagaagcaagtgaagaatttggtaatgatatttcatatgatgatggtgtcccaggcccttcttcaactgttgttctcacagagctccattcacctggtgaaagtgatccccgtgtttcatcacctccaacaaggatgcgtacttcgtcagctggtgcaggagattcgcactcctctcgtgatgtagcagagtctaccagctgtgcagaaagtcctcctattcctcaaatgcattctcgtgtagatacacgagcgaaggtttctgaaatagatgttaattcagaacctgctgttacagaaactggtccatcaagagatcaacctgctgaagagcctcctgctgtcacacctggtgcaaacgatggcttctggcagcagtttcttaccgagcagcctggatcatcagatgcacatcaggaggctcaatcagaacggcgagatggaggaaacaaggtggatgagatgaaatcaggagatcgacaacatctttggtggggcaaaaggaacgttgagcagataacagaaaaacttggacttctcacctcaacggagaaaacctga

SEQ ID NO: 12140 - DNA, 1584 bp, Oryza sativa
  Clone ID: TFbOSC400288j.C1.o6.gm
atggaccacaacaccgaccctcctccgaccaccatggtggacgccgcggcggcgctgctgctggagcccaagctggaggggtacgacgacgacggcggcggcgagccgctgcagccggccccgttcgtctctccgctggaccagctgatgcagccgccgcggccgctggaggcgctgctgcaggggccgcagctgccgccgttcctgtccaagacgtacgacctggtgtgcgagccggagctggacggggtcatctcctggggccacgccggcaacagcttcgtcgtctgggacccctccgccttcgcgcgcgacgtgctcccccaccacttcaagcacaacaacttctccagcttcgtccggcagctcaacacctatggttttcgcaaggttcatgctgatagatgggagtttgctcatgaggatttcctacgacatagcaaacatttgttgaagaagattgtccggcgcaggtcctcaccaacacaacaaagtggtcttcagcctggctcttctggtgaatccggtttagaccctgaactcaacacactgagaagggagaagagtgcattgcttcaggaggtgaccaggctgaagcaagagcaccttcagacaattgaacaaatgagcacgctgaatcagaggctagaatcagcggaagatcggcagaaacagatggtctctttcttggccaagctcctccagaacccaactttcctgaggcaacttaagatgcacagacagcaaaaggaaatcgactccaccagagtgaaaaggaaattcctcaagcatgtaccacatggcaacattgactcaggtgagtccagctcacaacacactggagagagcaatttagatttctcccctacgtccctggaccttccagccacgcacagtgacatcttagaccttcagaattttcttttggaagatggggacctcaatcttgccatgctgccagagaacataggacttgatggaatcgaagcaccagacgacatcggggcgttggttcagggatttgacacacaggaggaacttgagcttggtagcggagttgagctactggaaatacctccagcttctggtcctcgtggccaagatcccacgattggcagatccaagggaaagaatgtattgtctccaggattggatgctacctcttctgaagctgattgcctcggatcattttctgacaatatggggatgctttctgactccatgttacaaacagcgggtaaattgatggatgcagatgatgacgagcgaatttggggcgtcgatgcttcgtcggctttacaaagttcttgcagtggcactagtcagcaagcatatggtagtcttgttagtgatccctatctgatggagatggctaataagcctgaaaaattctgggagctcgattttcaggcactggatgatggagatctgcagctggacaatcctgagaaggtgctggacacaggcgtggttgctcaggctcaggcgcttgaattgggtggcctgactcaggcaaccgaattaaagaaggcatgcttttttctcaggctcatcactcagggcaccaaccaaacaggcccttag

SEQ ID NO: 12141 - DNA, 1074 bp, Oryza sativa
  Clone ID: TFbOSC101218j.C1.o11.fg
atgaactaccgagtggtgaacccggtgaaggtggagagcgggccgtcgacgggcgtggcgaatggccagccgccgaggccgatggacgggctcgccgacggcggcccaccgccgttcctcaccaagacgtacgacatggtggatgacccgaccacggacgccgtcgtgtcgtggagcgccaccaacaacagcttcgtggtgtgggatcctcacctctttgggaacgtgctgctgccgaggtacttcaagcacaacaacttctccagcttcgtccggcagctcaatacctatggcttcaggaaggtggatcctgacaagtgggaatttgcaaatgagggttttctgagaggacagaagcatctccttaaaagcataaagcgtcggaaacctccgaattcatctccaagtcagcaatctcttggctcattccttgaggtagggcacttcggatatgagggagagattgatcagttgaagagggacaaacatctgttgatggctgaagtggtgaagctgaggcaggagcagcaaaacacaaagtcagacctgcaagctatggaacagaagctacaaggtactgagcaaaagcaacagcacatgatggcattcttgtcacgagttatgcataatcctgagttcatacgccagctgttctcccagagtgagatgaggaaggagcttgaagagttcgtctcaaagaaaagaaggcgccgcattgaccagggacctgaacttgatagcatgggtaccggttctagccccgagcaagtgtcacaggtaatgtttgaaccacatgatccagtggattcacttttcaatggtgttccatcagatcttgaaagttcatctgttgaggccaatggaggcaaggcgcaacaagatgttgcttccagtagctctgaacacgggaaaatcaagccatctaacggagagttaaatgaggatttctgggaggacctgctgcacgagggtgggctcgatgaggataccaggaaccccgctatagatgatatgaacttgctgtctcaaaagatgggctacctcaactcaagcagcaccaaatcgccacagtag

SEQ ID NO: 12142 - DNA, 933 bp, Oryza sativa
  Clone ID: TFbOSC13607j.C1.o1.fg
gggttcaggaaggtcgtgccggagaggtgggagttcgcgaacgagttcttcaggaagggggagaagcagctgctcaccgagatccaccgcaggaagacgtcgtccgcatcgacggcgtcgccgtctccgccgccgttcttcgcgccgccgcacttccctctgttccaccaccccggcgtcgcggcggctcagcaccaccacgcgttcgtcggcgacgacggggttgtggcggcgcatggcatcggcatgccgttcccgcagccgcattggcgggagccgaacttgccggtcgcgacgcgcctgctcgcgctaggcgggcccgcgccgtcgccgtcgtcggcggaggccggcggcgccgggcgcgccgccaccgccgcggtgctgatggaggagaacgagcgcctgcggcggagcaacacggcgctgctgcaggagcttgcgcacatgcgcaagctgtacaacgacatcatctacttcgtgcagaaccacgttcgtcccgtggcgccgagcccggcggcggccgcgttcctgcagggcctcggcatgcaggcgcgcaagaagcccgccgccgccaacgtgctcaacaactcaggcgggagcacaacgtcgagcagctcgctcaccatcgccgaggagccttcccctccgccgcagcagcagcatctagccggcgagaagagcggcggggaggcaggcaacagcagcgccgctcggtcatcggcgccgaccaagctcttcggcgtgcacctaagcgccgccccgtgcggcgccggcagcaagagagcgtcttcgccggaggagcacccgcccacgtcgccggccacgaagcctcgcctcgtgctggagtgcgacgacctaagcctgaccgtcgcgccgtcgtcgtcgtcgcagcagcagctgtcagccgcctcttctccaacaagcaccagctag

SEQ ID NO: 12143 - DNA, 1494 bp, Oryza sativa
  Clone ID: TFbOSC400132j.C1.o6.fg
atggaagttgccgccggcgcccgcggcggcggggccggcggaggagggggaggccccgcgccgttcctgctcaagacgtacgagatggtggacgacccgtcgacggacgcggtggtgtcgtggagcgacgcctccgacgcgagcttcgtcgtctggaaccacccggagttcgccgcccgcctgctgcccgcctacttcaagcacagcaacttctccagtttcatccgccagctcaacacctacatatctttattggaaaatgattcttcaacaatgttttgtctaactactaagaagttggtattgcaaggattccgtaaaatagatccagagcgatgggaatttgccaatgagtacttcatcaagggacaaaagcacctgctgaagaatatccacaggcgtaagcctatccacagccacagccatccaccaggtgctctgcccgataatgagcgtgcaatatttgaggatgagatcgaacggctttcacgagagaaatccaacctccaggctgacctctggaaatccaagcagcagcagtcgggaacgatgaaccagattgaagatcttgagcgacgagtgcttggcatggagcagcgacagaccaagatgattgccttcttgcagcaagctagtaagaaccctcagtttgtcaacaagcttgttaagatggcagaagcatcttcgattttcacggatgctttcaataagaagagaaggttacctggtttggattacagtatcgagaacacagaaaccacaagcttttatgatgaccatagcagcacttctaagcaagaaacaggcaatcttttaaatcagcacttctctgataagcttaggttgggactttgtcctgccatgacagagagcaatatcatcacgctaagcacgcaaagctcaaacgaagataacagaagccctcatggtaaacatccagagtgtgacatgatggggagggaatgtctcccgttggtgccgcagatgatggaactctccgataccggcacatctatctgcccctccaagagctcttgctttgcaccacctataagtgatgaaggcctcttaacatgccatctgagtctaactcttgcatcatgctcgatggatgttgacaaaagccaaggcctcaatgcaaatgggaccactatagacaacccaactgaggcagcaacagctaccatggaaaaggatgacaccattgacagaagcttcgatgacaaccaaaagaaatcagctgattctcgtacagcagatgccacaacaccacgagcggatgcacgagtagccagtgaggctcctgcagccccggctgcagtggtgaatgacaagttctgggagcagttcctaacagagcgacctggctgctctgaaactgaagaagcaagctctggcctaagaacagatacttccagggagcaaatggagaacaggcaggcatatgatcactcacggaatgacagagaagacgtggaacaactgaaactctga

SEQ ID NO: 12144 - DNA, 750 bp, Oryza sativa
  Clone ID: TFbOSC400222j.C1.o63.fg
atgggcggcgagtgcaaggtccaccagctccaggccgccggcgacgggggcccaggcgccgtcgcgccgttcgtggcgaagacgttccacatggtgagcgacccgtcgacgaacgccgtcgtgcgctggggaggcgccggcaacacgttcctcgtgctcgaccccgccgccttctccgacttcctcctcccctcctacttcaagcaccgcaacttcgccagcttcgtccggcagctcaacacctacggattccgcaaggtggatccggacaggtgggagttcgcgcacgagtcgttcctgcgggggcaggcgcagctgctgccgcggatcgtgcgcaagaagaagaagggcggggcggcgccggggtgcagggagctgtgcgaggaaggggaggaggtgcggggcaccatcgaggcggtgcagcggctgcgggaggagcagaggggcatggaggaggagctccaggccatggaccagaggctgcgcgccgccgagagccgcccgggccagatgatggcgttcctcgccaagctcgccgacgaaccgggcgtcgtgctgcgcgccatgctcgccaagaaggaggagctggccgcggccggcaacaacgggtccgatccctgcaagaggcggcggatcggggccgacacggggcgcggcggcgtggcgaccggcggcgacgcggccgagatggcgcagagcagaggcaccgtgccgttcccgttctctgttcttggccaagtgttctactag

SEQ ID NO: 12145 - DNA, 718 bp, Oryza sativa
  Clone ID: TFbOSC900200j.C1.o6.np
tcactgcttttatagaataagtgcaagtcaattctcctgtcattatcggcgcaaaaggcggtgccggcgccgttcttgaccaagacgtatcagctggtggatgacccggccactgaccacatcgtctcgtggggggacgaccgggtgtccaccttcgtcgtgtggcggccgccggagttcgcgcgcgacatcctccccaactacttcaagcacaacaacttctcgtcgttcgtccgccagctcaacacctacgggttcaggaaggtcgtgccggagaggtgggagttcgcgaacgagttcttcaggaagggggagaagcagctgctcaccgagatccaccgcaggaagacgtcgtccgcatcgacggcgtcgccgtctccgccgccgttcttcgcgccgccaccaccacgcgttcgtcggcgacgacggggttgtggcggcgcatggcatcggcatgccgttcccgcagccgcattggcgggagccgaacttgccggtcgcgacgcgcctgctcgcgctaggcgggcccgcgccgtcgccgtcgtcggcggaggccggcggcgccgggcgcgccgccaccgccgcggtgctgatggaggagaacgagcgcctgcggcggagcaacacggcgctgctgcaggagcttgcgcacatgcgcaagctgtacaacgacatcatctacttcgtgcagaaccacgttcgtcccgtggcgccgagc

SEQ ID NO: 12146 - DNA, 1221 bp, Oryza sativa
  Clone ID: TFbOSC6909j.C1.o1.fg
atgggctctaagaagcggtcgcctcagcatccggccgccgcggcgccccctcccgccgtcggcggcggcggcggcggcgaggtctccggcgatggtggcgcctcgacggcgaacgggccggtggtgccgaagccgtcggaggtggcgccgttcctgacgaaggtgtacgacatggtctcggaccccgcgaccgacaacgttatctcgtgggccgagggcggcggcagcttcgtgatctgggactcgcacgccttcgagcgcgacctccacaggcacttcaagcacagcaatttcaccagcttcatacgccagctcaacacctatggatttcgtaaagttcaccctgatagatgggagtgggccaatgaaggttttattatgggccaaaaacatcttctgaagaccattaagaggaggaagaagtcttctcaggaatcacctagcgagatacagaaggcgcctgtcaaaactgcacctggtactgaaaatattgagataggaaaatatggtggccttgaaaaggaggttgaaacccttaagagggataaagctcttctcatgcagcagcttgtagatctcaggcactaccagcaaacatctaaccttgaagtgcagaatttaattgaacggcttcaagtaatggaacagaaccagcagcagatgatggcacttctagcaatcgttgtccagaatcctagttttctcaaccagcttgtgcagcaacagcagcagcagcgcagatccaactggtggagtcctgatggaagcaagaaaaggagatttcatgctcttgagcagggccctgtaactgatcaggagacctctggccgtggggcacatattgttgaatatctcccacctgtcccagaaacatcaggtcaagtaaatccagtggaaggagccatttgttcggccaactcacaaccagttccaagtcctgcagttgccacacccatggacatgcaaacgtctaacgttgctgatactctcggttcatctgaggagcctttcgctgataactctactctacatgaatgggatgataacgacatgcagcttctgtttgatgataacctagacccaatacttccaccatttgagaatgatggtcaaatgggccctcctttgagtgttcaagattatgattttccgcagttagagcaggattgtctgatggaagcacaatataactccaacaatcctcaatatggtaatgactaa

SEQ ID NO: 12147 - DNA, 364 bp, Oryza sativa
  Clone ID: TFbOSC410068j.C1.o11.gp
caagaaaacagaacacacaatttcccaacaactgaagacaagcagggaacaacactagtggtggcaatggaaattggggggactcacgtaggtgttgagctggcggacgaagctggagaaattgttgtgcttgaagaagcgtgggaggaagacggcggcgaagacgtgggggtcccagacgacgaagctgctgcccgcgcggccccacgagacgacgccgtcggtggccgggtcggccaccaggtcgaacgtcttggtcaggaacggcggcggcccgacctcgtgcagcccctccatgggcctcggcgcctccccctcctccggcgagctcggcggccactcctccttcaccatccccggcatc

SEQ ID NO: 12148 - DNA, 652 bp, Oryza sativa
  Clone ID: TFbOSC401518j.C1.o1.np
ctccctggcatcctcgtcctcgaggtcatccctggctccgccgccgccggccggccgtggcggtggcggggtggcgccgttcgtggcgaagacgtaccggatggtggacgacccggccaccgacggcgtcatcgcctggggcagggacagcaacagcttcgtcgtcgccgaccccttcgccttctcccagaccctcctccccgcccacttcaagcactccaacttctccagcttcgtccgccagctcaacacctacgggtttcgcaaggttgatccggacaggtgggagttcgcgcacgtgtcgttcctgcgcggccagacgcacctgctgcgccggatcgtgcgacggagcagcggcggagggggagcgaagaggaaggaggaggccggcggttgcggcggcggaggggaggcggccgccggggacgtcgacgaggagagcgccgtggtggccttggaggtggcgcggctgaggcgggagcagcgggagatcgagggccgcgtcgccgcgatgtggcgccgcgtgcaggagacggagcgccgccccaagcagatgctcgccttcctcgtcaaggtcgtcggcgacccgcagttagtcactatatttcgtgtactagcatatatttcacctagcagtggttttctaagtatc

SEQ ID NO: 12149 - DNA, 1341 bp, Oryza sativa
  Clone ID: TFbOSC11879j.C1.o9.fg
atggcggagcagggggcgggcgaggcggatgcgggcggcggggagccgccgccggcggcggtgatgacggcggcggcggaggcgttggcggggcagaggtcgctgccgacgccgttcctgacgaagacgtaccagctggtggaggacccggcggtggacgacgtgatctcgtggaacgaggacgggtcgacgttcgtggtgtggcggccggcggagttcgcgcgggacctcctccccaagtacttcaagcacaacaacttctccagcttcgtgcgccagctcaacacctatggatttaggaagatcgtgccggaccggtgggagttcgccaacgactgcttccggcgaggggagaagcgtttgttgtgtgatatacaccgccggaaggtggtggcggcggctgccgcggcgccgccgccgccgtcgccggggatggcgacggcagctgccgcggtggcttcgggagctgtgacggtggccgcggcgccgatacctatggcgctgccggtgacgcgggcgggctcgccggcgcactcctcggaggagcaggtgctgtcgtcaaactctgggtcgggggaggagcaccggcaagcgtctgggtccggctctgcgcccggcggcggcggcggcggctccgcgtccggcggcgacatgggcgaggagaacgagcggctccggcgggagaacgcgcggctgacgcgggagctcggccacatgaagaagctctgtaacaacatcctcctcctcatgtccaagtacgccgccacccagcacgtggagggctccgcggggatatcctccatagcgaactgctccggcgagtcgtcggaggccgttcccccgccgccgcctctccccccggcgatactcgatctaatgccctcgtgccccgccctggccaccgccgccgccgctgcggggctcgccatagacggcgagcccgacccgagcgcgcggctgttcggcgtctccatcggcctgaagcggacgcgagacgacgccgccgccgccgccgacgaagacggcggcggcgaggatcaggccgagcacggcggcgcggacgtgaagccggaggcggcggatccgcatcccgccggcggcggcggcggaagcagcacggaggcgtcgccggagtcgcacccgtggcccatataccggccaacccccatgtaccacgcggtcaggcccacttgcaacgggccggacagggccgggtccgaccaagacgggtccagctccagcgtaagatccatcaggatgccggtgcacagtttggtcagttttacaagtgttttaggtgttagtgccaaaaatggtggtgacatagggcggaagcactag

SEQ ID NO: 12150 - DNA, 1380 bp, Oryza sativa
  Clone ID: TFbOSC401582j.C1.o3.fg
atggagagttccaacctgggcggcggcggcggcggaggcggcggcggtgggccgccgccgttcttgatcaagacgtacgagatggtggaggacgcggcgaccaaccacgtcgtgtcgtggggccccggcggcgccagcttcgtcgtgtggaacccgctcgacttctcccgtgacctgttgcccaagtacttcaagcacaacaacttctccagcttcatcaggcagctcaacacctacggtttccgaaaaatcgatcctgagagatgggagttcgcaaacgaggatttcataagagggcacacgcaccttctgaagaacatccatcgacgcaagcccgtgcacagccactccctccagaaccagataaacggaccactcgccgaatcggagaggcgcgagctcgaagaagagatcaaccggctcaagtacgagaagagcatcctcgtcgcggacctccagaggcagaaccagcagcagtacgtgatcaactggcagatgcaggcgatggaaggcaggctagtggcgatggagcaacggcagaagaacatcgtggcctccctgtgcgagatgctgcagagacgcggtggcgccgtgtcgagctcgctgctggagtccgaccatttcagcaagaagaggagggtcccgaagatggatctcttcgtcgacgattgcgcggcgggcgaagaacagaaggtgttccagttccagggaattgggacggatgcaccggccatgcctcccgtgcttcctgtgaccaatggtgaggcttttgacagggttgagctgagcctggtctccctggagaaactcttccagagagcaaatgatgcttgcacagctgctgaagaaatgtactcccatggtcatggtggtactgaacccagcactgctatatgtcctgaagagatgaacactgctccaatggagacaggcatcgatcttcagttaccagctagcctccatcccagctcacccaacacagggaatgcccatctccatttatccactgaactcacagagtctccaggttttgtgcagagtccagagctgccaatggcagagattcgtgaagatatccatgtgacaagatacccaacacaagctgatgtaaattctgagattgcctcctccactgatacttcacaagatggcacgtcagaaactgaagcttcgcatggaccgaccaacgatgtgttttgggagcggttcctcacagagactccacggtcatgtttggatgagtcagaaagacaagagtctcccaaggacgatgtaaaagcagaattaggctgcaatggcttccatcaccgggagaaggttgatcagatcaccgagcaaatggggcaccttgcttcagccgagcagactctgcatacctga

SEQ ID NO: 12151 - DNA, 1140 bp, Oryza sativa
  Clone ID: TFbOSC410068j.C1.o13.fg
atggagaagatgatgccggggatggtgaaggaggagtggccgccgagctcgccggaggagggggaggcgccgaggcccatggaggggctgcacgaggtcgggccgccgccgttcctgaccaagacgttcgacctggtggccgacccggccaccgacggcgtcgtctcgtggggccgcgcgggcagcagcttcgtcgtctgggacccccacgtcttcgccgccgtcttcctcccacgcttcttcaagcacaacaatttctccagcttcgtccgccagctcaacacctacttcttggtccggacgaattacctgaacaagcgatcacatttctacagtttgagatttcagggtttcagaaagattgatcctgacagatgggaattcgcgaatgatggtttcctgagaggccagaggcatcttctaaagatgattaagaggaggagaccattgtcttatctccctggatctcagcaggcacttggcacctgccttgaggttggtcagttcggattagatgaagagatcgacaggctaaagcgtgacaagaacatcttactcgcggaggttgtgaaactaaggcacaagcagcaaagcacgaaagccaatatgcgagccatggaagagaggctgcaacatgcggagcagaagcaggtccagatgatgggtttcttggcaagagcaatgcagaaccctgacttctttcaccagttgattcaccagcaggataaaatgaaggggctcgaggacacattctcgaagaagaggacgaggtcgatagacatagtgccatttctcaaccccggggaggtcagccagggcgatcaactcgagtcgacattgctgtttgatccaaggccatttgctgaactgaatgatgagcctgcaaagtctgaactggagaatttagcactgaacatccagggtcttgggaagggcaagcaggatgtcaacaggactcgaaatcagccacgaaatcaggctagcaacgaaaccgagttaaccgacgacttctgggaggagcttctgaatgaaggagcaagagatgatgctgggattccagggatggagcgaagaagacctagatatgtcgatgcattagcgcagaagctgggttatctaagcaatagtagccaaaagtag

SEQ ID NO: 12152 - DNA, 933 bp, Oryza sativa
  Clone ID: TFbOSC400606j.C1.o13.fg
atggctttcttggtggagaggtgcggggagatggtggtgtcgatggagatggggccgcacggcggcggcggcgcggcggcggggaagccggtgccggcgccgttcctgacgaagacgtaccagctggtggacgacccctgcaccgaccacatcgtgtcgtggggcgaggacgacaccaccttcgtcgtgtggcggccgccggagttcgcccgcgacctcctccccaactacttcaagcacaacaacttctccagcttcgtcaggcagctcaacacctatggtttcaggaagatagtagctgacaggtgggagttcgccaacgagttcttcaggaagggagccaagcacctcctcgccgagattcaccggcggaagtcgtcgcagccgccgccgccgccgatgccgcaccaaccctaccaccaccaccaccacctcaatcccttctcgctgccgccgccgccgccggcgtaccaccaccaccatctaatccaagaagagcccgccacgacggcgcactgtactgtcgccggagacggcggcgaaggcggggacttcctggcggcgctgtcggaggacaaccggcagctgcggcggcgcaactcgctgctgctgtcggagctggcgcacatgaagaagctctacaacgacatcatctacttcctccagaaccacgtcgcgccggtcaccaccaccaccaccaccccctcgtcgacggccatggcggcggcgcaacaccaccttccagccgccgcctcctgcaggctgatggagctcgactcccccgatcactcgccgccgccgccgccgcccaagactccagcaaccgacggcggcgacacggtgaagctgttcggcgtgtcgctgcacggcaggaagaagcgggcgcaccgggacgacgacgacggcgtccatgaccagggaagcgaggtgtga

SEQ ID NO: 12153 - DNA, 870 bp, Oryza sativa
  unsure (1)..(870): unsure at all n locations
  Clone ID: TFbOSC900153j.C1.o12.fg
atggcggagcagggggcgggcgaggcggatgcgggcggcggggagccgccgccggcggcggtgatgacggcggcggcggaggcgttggcggggcagaggtcgctgccgacgccgttcctgacgaagacgtaccagctggtggaggacccggcggtggacgacgtgatctcgtggaacgaggacgggtcgacgttcgtggtgtggcggccggcggagttcgcgcgggacctcctccccaagtacttcaagcacaacaacttctccagcttcgtgcgccagctcaacacctatggatttaggaagatcgtgccggaccggtgggagttcgccaacgactgcttccggcgaggggagaagcgtttgttgtgtgatatacaccgccggaaggtggtggcggcggctgccgcggcgccgccgccgccgtcgccggggatggcgacggcagctgccgcggtggcttcgggagctgtgacgacgagcgacaggctggttggcgtctccatcggcctgaagcgggcgcgagacgacnccgccgccgccgccgacgaagacggcggcggcgaggatcaggccgagcacggcggcgcggacgtgaagccggaggcggcggatccgcatcccgccggcggcggcggcggaagcagcacggaggcgtcgccggagtcgcacccgtggcccatataccggccaacccccatgtaccacgcggtcaggcccacttgcaacgggccggacagggccgggtccgaccaagacgggtccagctccagcgtaagatccatcaggatgccggtgcacagtttggtcagttttacaagtgttttaggtgttagtgccaaaaatggtggtgacatagggcggaagcactag

SEQ ID NO: 12154 - DNA, 267 bp, Oryza sativa
  Clone ID: TFbOSC3927j.C1.o1.fg
atggctgctgctgaggcggcggcggcggtggggaagcagcagcagaagggcggcgggggaaggggaggaggcggcggtgggccggcgccgttcctgacgaagacgaaccagatggtggaggagagcgcgacggacgaggtgatctcgtggggaaaggaggggcggtcgttcgtggtgtggaagccggtggagttcgcccgcgacctcctcccgctccacttcaagcactgcaacttctcctccttcgtccgccagctcaacacctac

SEQ ID NO: 12155 - DNA, 966 bp, Oryza sativa
  unsure (1)..(966): unsure at all n locations
  Clone ID: TFbOSC101002j.C1.o3.fg
atggcggcggcggcgggaggaggggcggcgccgttcgtgtggaagacgtacaggatggtggaggaccccgggacggacggggtgatcgggtgggggaaagggaacaacagcttcgtcgtcgccgaccccttcgtcttctcccagaccctgctccccgcccacttcaagcacaacaacttctccagcttcgtccgccagctcaacacctatgtcagtctcgtcactcccagttctatttcatcgtctcatcatactccccccctctctgcacttcacatcatgctgccatggattctcagtggtacccaactcaaaggtttccgcaaggtggatccggatcggtgggagttcgcccacgcgtcgttcctgcgtggccagacccacctcctgcgcaacatcgtccgccgcggcagcgcggccgccggcgggggaggcggcggcggcggcggcaagcgcagggacgcgtcggcggacggcggcggcggcggcggcgatgaggacatgacgatggtggcgacggaggtggtccggctgaagcaggatcaacgcaccatcgacgacagggtggccgcgatgtggcgccgcgtgcaggagacggagcggaggcccaagcagatgctcgccttcctcctcagggtcgtcggcgaccgcgacaagctgcaccgcctcgtcggcggcggcggctacngcaacggctccgctaccgccgccgccgccgacaacgggttcgcggacgccgcgcgggcggggtgcggcgagaagcgcgcgaggctgctgctcgacggcgacaacaccggcgcgttcggcccggaccgccgtcgacttcgccgggttctacaccggcgccgacatgttccccgacgttgccgtcgatgccgccgccgccgccgccggcgggtcagccggctgctcgttcgctttcggagtggacagcggctactgattctctcgctcctcaccgactga

SEQ ID NO: 12156 - DNA, 1143 bp, Oryza sativa
  Clone ID: TFbOSC414105j.C1.o3.fg
atggagtgggaggaggagagcgaggcggcgcgtcagaaggcggcggcggcgtcggcgtcggtggtgcccgcgccgttcctgaccaagacgtaccagctcgtcgacgaccccgcgaccgaccacgtcgtgtcgtgggaggacgacgacggcggcgagtccgcctccagcttcgtcgtgtggcggccaccggagttcgccagggacatcctccccaactacttcaagcacagcaacttctcctccttcgtccgccagctcaacacatatgggtttaggaaggtcgtgccggagaggtgggagttcgccaacgagttcttcaggaagggcgagaagcagctgctgtgcgagatccaccggcgtaagtccgcggcggcaacgtggccaccgttcccgccgccgccgccgcctttctttgccccgcgccatttcgcggccggtgccttcttccgccacggggatggcatgctccatggccgcttgggcgcgttggtgacgacgacggagcggcgccattggtttgagagcgcggcgttgccggtggcgccgtcgtcgcggctgctctcgcagctggggccggtgatcgcaccggcgcgccgcgcggcggcgacgccggaggaggaggcgctgatgcaggagaaccaccggctgctacgcggcaacgcggcgctggtgcaggagctggcgcacatgcgcaagctctacagcgacatcatctacttcgtgcagaaccacgtgcgtcccgtggcgcccagcccggccgcggcggccgcgctgcacggcctcggcgttctacggccgccgccggcgggcgggaaggcgcccgcgtccgaggtgcgcggcgcctccggccggagcgccacgtccagtagctcgctcacggtggccgaagaccagcccacgctgctggctctgcggctgccgcggacgacggagaagatcatcaacgaggtgtccggcggcaacggcggcggcagcaccaagctgttcggcgtgcacctgagcagcgccgacgagcagacgtcatcaggcgcgagccgcaagagatcaccgccgcaagagcagcctcctacgtcgccggcgccgaagcggacgctggtggtggagcacagcgagctgagattgagcatcgtgtcgccaccgtag

SEQ ID NO: 12157 - DNA, 867 bp, Oryza sativa
  Clone ID: TFbOSC401894j.C1.o38.fg
atggtggaggacccgagcaccgatgagaccatctcgtggaacgactccggcacggccttcgtggtgtggcgccccgccgagttcgcccgcgacctcctccccaagcacttcaagcacagcaacttctcctccttcgtgcgccagctcaacacctacggattcaagaaggtggtggcggataggtgggagttcgccaacgactgcttcaggagaggggagaagcacctgctcggtgggatacagaggcggaaggggtctgggaccggaggcgcgggggcggcgccggcggggggcataccgacggcgataccgatctcgtccccgccgacgagctccggcggggagcccgcggtgtcgtcgtcgccgccgcgcggggcggcggggatcgcggcgggggtgagcggcgcggtggccgagctggaggaggagaacgcccggctgcggcgagagaacgcgaggctggcgcgggagctggcacgcgcgcggcgggtctgcgacggcgtgcggcgcctcgtgtcgcggtacgaccacgaccacggcggcggggaggaggaagcgggggagggcgacgtgaagccgatgctgttcggcgtggcgatcggcggcaaaagatcgcgcgaggagaacggggaagacgaggaggaggaggaggaggaaggggctgacgaggacggcgaagacgatgaggtggaggaagacgacgaggagagagagaggcacgcggcgcggcgggtccccgtgagggaggggaaggtcaggaggacgacggagctgtcggatctggacgtgctcgcgctgtccgtgcgggcggcggccgcggcgaggccgggcggggcctcccgtgaccgcaagagctcggtctcgtaa

SEQ ID NO: 12158 - DNA, 773 bp, Oryza sativa
  Clone ID: TFbOSC2810j.C1.o3.np
gagttcgcccgcgacctcctcccccaagtacttcaagcgcaataacttctccagcttcgtccgccagctcaacacctacggatttgggaatattgtcccggacaggtgggagttcgccaacgacgcttccggcgaggggaacggcggctgctctgcgagatacaccgatggaaggtgacgccaccgacgccagcaacgacgacgacgggggcggtcacggtcgcggccacgatcccgatggcgttgccagtgacgacgcgggatggttcccaggttctgtccggtgaggagcagatcatatcgtccagctcgtcccccgagcccctgctcatgctgtcgcagacgccatccggctccggctccggctccggcggcgtcgcgtccagcgggggatgagaacgagcggctgcggcgagagaacgcgcagctcgcgcgggagcacagccagatgatggcaacaacatcctcctcctcatgtccaagtacacctccacgcagaagctcaacgccgccaactcctcctccaccgccgggaacaacaactgcttcggcgaatccgccgaggcggccacgccgctctcgctccctgccgtcctcgacctcatgccttcctgccccggcggtgccgcccgtatcaaacaacgaagaggaaatgatgagcgcgagaagctcttcggcgtctccatcggccggaagcgaacgcggcacgaaggcggcgccggcggcgaagacgaacaccagcaagccaaccataccgacgccaacacacatgc

SEQ ID NO: 12159 - DNA, 895 bp, Oryza sativa
  Clone ID: TFbOSC400542j.C1.o23.np
agatctccatcccggcgtccgagctgcccaacttcctgctccgggacgaccagctctccgtctcctgggaccggatcagggcgtcccagctcgccggcttcggcgtcgccgtcaacacgttcgtcgaccgtgatggacctgcctcgtccaatggagggcctcggcgaggccgggccgccgccgttcttgtgcaagacgtacgaggtcgtggacgaccccggcacggacaccgtcatctcgtgggggttcgccggcaacagcttcgtcgtctgggacgccaatgcgttcgccgccgtgctcctcccgcgctacttcaagcacagcaacttctccagcttcgtccgccagctcaacacctacgggttcaggaaggtcgatccggatagatgggagttcgcgaacgaggggttcttgcgggggaagaaggagctcctgaagacgatcaagcgacgccggccgccgccgtcgagccccccgtcgtcttcgtcgtcgtcgtcgtcgtcgcagcaccagcagcagccggcggcggcgtgcctggaggtggggcagttcgggcgcgacggcgtggtgaaccggctgcagcgcgacaagagcgtcctgatcgcggaggtggtgaagctgcggcaggagcagcagacgacgcgcgcgcagatgcaggcgatggaggagcgcatctcggcggcggagcagaagcagcagcagatgacggtgttcctggcgcgcgccatgaagaacccgggcttcctccagatgctcgtcgaccggcaggccggccagcacggcgcccggaacagggtgctcgaggacgccctctccaagaagcgccgccgccccatcgacgcccaccgacgccatcgccggctcgccgcccaccgaagccgtcgtggcaatcgag

SEQ ID NO: 12160 - DNA, 1521 bp, Oryza sativa
  Clone ID: TFbOSC418197j.C1.o7.fg
atggaggccgccgttgctgctgcggctgcggccgccggggcggtgacgacggcggtcgcgcctccgcccggcgcggcggtcagcaacggggtggcgaccgcgccgccgccgttcctgatgaagacgtacgagatggtggacgacccggccaccgatgccgtcgtctcatggggccccgggaacaacagcttcgttgtgtggaacacccccgagttcgcgcgcgacctcctccccaagtacttcaagcacagcaacttctcctccttcgtcaggcagctcaacacctacggatttaggaaagttgatccagataggtgggagtttgcaaacgaaggttttcttagaggacaaaagcatctactgaagaccatcaacagaaggaaaccaactcatggaaacaaccaagttcagcagcctcagttgccagctgctcctgtacctgcttgcgtagaagtggggaagtttgggatggaagaagagattgagatgctcaaaagggataaaaatgttttaatgcaggaacttgtcaggctgagacaacaacagcagacaacagatcatcagctgcagactttgggcaagcgtcttcaaggaatggagcaacggcaacaacaaatgatgtctttcctggctaaggcaatgcatagtcctggcttcctagcacaatttgtacagcaaaacgaaaacagcagaagaagaatagttgctagtaacaaaaagaggaggctaccaaagcaggatggttcgttggactctgaaagtgcttcattggatggacaaatagtaaaatatcaacctatgatcaatgaagcagccaaagcgatgctaaggaagatcctaaagctagattcttcacatagatttgaatccatgggcaattcagataatttccttcttgagaattatatgccaaatggtcaaggtcttgacagctcttcatcaactcggaattctggtgttacccttgcagaggtcccagctaactcaggtttgccatatgtagctacaagctctggactttcagctatttgttcaacttcgactcctcagattcagtgcccagttgttttggacaacggcatacccaaagaagttccaaacatgagtgcggtgccttctgttccgaaggctgtggctccaggcccaactgatatcaatattctggaattcccagatttgcaagatatagtagctgaagaaaatgttgatattcctggagggggctttgaaatgcctggtcctgagggtgtattctctttgcctgaagaaggtgatgatagtgttcccattgagactgatgagattttgtacaacgatgacacccagaaacttcctgctatcattgattctttctgggaacagttcctggtggctagccctctatctgttgataatgatgaagtcgattcaggtgtactagaccaaaaggaaacacaacaggggaatggatggaccaaagctgaaaacatggctaaccttacagaacagatgggcctcctgtcatcacaccatacaggatga

SEQ ID NO: 12161 - DNA, 552 bp, Oryza sativa
  Clone ID: TFbOSC900079j.C1.o18.fg
atgacggttagcatggatggtgcaccatatctgaggacggtggacctcaaaacttacaagaactacaaggacatgtctttgggtctcgagaaaatgttcattggcttcagcaccggtgaggatttaccctattgggaaatcttggatgtccgccatgcaatcgacgtgatgcacctcactaagaacctttgcgtaaacctactgggcttcctaggtgtatatgggaagtcaaaagatacactggaagcacataatctgaagcatatggaacaacgcggcgaccttcacccggaaccaaaggagaaaggaagccattacttgagtccagccaactacactcttagcaaggcagagaaggaaagtatgtttgaatgcttagagagcatcaagatcggtattttcaggcctgtgtacctacacaacatgtttcctttcgagaggtacatgggcgttctaaagaagtatgttcatatccgtgctcgtccggaggcaagcatcgccaagaggtttggaacagaggaggtcattgaattatgtgtagaatttatttaa

SEQ ID NO: 12162 - DNA, 220 bp, Oryza sativa
  Clone ID: TFbOSC25042j.C1.o4.np
cagtagccccctcacatgttctttcaacagcgaaatgagtaaagttcatcaccgatctctaaacttgtaccgctgtgttatcccggttcctaaactcgcaaatcgaccgttctgattctcaaacttattcaactgtgtcatcccgatccctaaacttgcagatcactcatttaggtcctccaacttattctgttatgccaccccggcccctaaacagaac

SEQ ID NO: 12163 - DNA, 356 bp, Oryza sativa
  Clone ID: TFbOSC25645j.C1.o2.hg
atgcggcaagtctgcagcaagtctgcggcagacctgccgcagactcttcatcatactgaaagagtatgcggcaagtctgcagcaagtctgcggcagacttgccgcagactcttcatcatactgaaagagtatgcggcaagtctgcggcagacctgccgcagactcttcatcatactgaaagagtatgcggcaggtctgcagcaagtctgcggcaggtctgcagcaagtctgcggcaggtctgccgcatactcttcatcatactgaaagagtatgcggcaagtctgcggcaaacctgccgcaaaccttatcttactctgaaaaagaacacggcatggcgcaggcctgcctgtggaat

SEQ ID NO: 12164 - DNA, 1044 bp, Oryza sativa
  unsure (1)..(1044): unsure at all n locations
  Clone ID: TFbOSC403977j.C1.o2.gm
atggatgctgcaccatatctgaggaaggtggatctcaaaacttacaagaactacaaggacatgtctttgggtctcgagaaaatgttcattggcttcagcaccggggaggtctttggaaccttcatcttcgacatccagcatcaggagaaggcgacaatatggcccacctgccagattctgtctcctctctatctctttcctcccccacctctctctatccctctcacgccaaaggccgacgaggaaccccacgtgccgacggaggccgaggacgagaggcgcgccggcggctgcgagctgagcctccttgcggcagagaccgagtatgacgcgcgcgtcgatggacgccggcccgtcaagctcacgagctgggcctcagcgccggacttgtgcaagaagatggcgaaggtcggggagcagcagccggcgctggacttgcgcgagaagatggcgagcgcggcgacgggcggcggtggtgcccgaggcggcaggtggcggcgggcgacgggttgcggcggcgccctcccctccgccggatccggcgggaggggaggcgagagncancggcgccctcccctcccccggatccggttggccgtcgtcaccacttgccgccgctgtccgccaccaccgcccgccaccctccagcgctaccgcccgttgtcaccgcccgccgccaccgtccattgctaccgtcttgttggagcgccgtcgccttcacctgcgtcatcgccccctcagccctcctccaccgccgccgctccctccagcgcccgcccgaccgccagccagcgccaacgccgttgggcccgctgccaagaggcgttggttcgcgctgtagagttgagcggcgcattcaagggacgcctcctagaggacttccctggctgcccaagggagatgcagagggggctcgccgccatgctcatcaacccaggagagtgcaacctcgagaccatccatggcggaccgtgctgcctcgagctcatcagagcacaccaactcattattcaaagaacggattttgtctggatgaagctatag

SEQ ID NO: 12165 - DNA, 298 bp, Oryza sativa
  Clone ID: TFbOSC25469j.C1.o1.np
ctgcaccccacatgagcctatgcttcaaactccatatcattgaatcagttgcaacctgtacaaactgattgcattcctgaggtatcagtaagcacagctggaacggcgactgagaatgagaaaagcggtcagcaagctcaacagagttcaaaagatgttcaaagcaagactcaggttgcttcgacgaggagttgtacaaaggtccataagcaaggcgttgcacttggcagatctgtggatctttcaaagttcagtaactatgatgaactcaaagctgagctagacaagatgtttgaat

SEQ ID NO: 12166 - DNA, 215 bp, Oryza sativa
  Clone ID: TFbOSC17697j.C1.o1.fg
tatatgaagacaatgatggagacagaatgttagctggggacataccatggaaggtatttgtttcgactgttaagaggttgagggttatgaggaggtcagaacttccccatgacatgacttgggtcaaatggattcacttcctcaagttaaggtctgccctcaatttgttttcctcttatgtccttccacagattggagctgaccctgtgaagtag

SEQ ID NO: 12167 - DNA, 111 bp, Oryza sativa
  Clone ID: TFbOSC900116j.C1.o14.gp
ccggtgctgaagccaatgaacattttctcgagacccaaagacatgtccttgtagttcttgtaagttttgagatccaccttcctcagatatggtgcagcatccatgctaacc

SEQ ID NO: 12168 - DNA, 711 bp, Oryza sativa
  Clone ID: TFbOSC400542j.C1.o13.fg
atggccggcgccgacgtggacgtcgggacggagctccggctggggctgcccggaggtggcggcggcgccgccgaggcggcggccaaggccgcgaagaggggcttcgaggagaccattgacctgaagctgaagctgcccaccgccggcatggaggaggccgccgccggcaaggcggaggcgccggccgccgagaaggccaagaggccggcggaggccgccgccgccgacgccgagaagccacctgctcccaaggcgcaggcagtgggttggccaccagttcggtcgttccgcaggaacatcatgaccgtccagtcagtgaagagcaagaaggaagaggaagctgacaagcagcagcagcagcccgctgccaatgccagcggcagcaacagctctgccttcgtgaaggtcagcatggacggggcaccctacctgcgcaaggtggacctgaagatgtacaacagctacaaggacctctcccttgctctgcagaagatgttcggcaccttcaccgcaactgggaacaatatgaatgaggtgaatggctctgatgctgttacaacttatgaagacaaggatggtgactggatgcttgttggagatgtcccgtggcagatgtttgtcgagtcatgcaaacgcttgaggatcatgaagggttccgaagccattggtcttgcaccaagagcaaaggacaagtacaagaacaagagctga

SEQ ID NO: 12169 - DNA, 435 bp, Oryza sativa
  Clone ID: TFbOSC420647j.C1.o6.fg
atggcgatgagccagcctgctctgaaaggcaaagacgacggcgaggcgaagcaggctccggcatccggttgcctctatgtcaaggtgagcatggatggtgctccttacctcaggaaggtggacctcaagatgtacaagaactacaaggagctctctttggctctggagaagatgttcagctgctttaccgtcggtcatggtgaatcaaatgggaagtcagggagagatggattatctgattgccgcctgatggatcttaaaaatggaacagaacttgtgctcacttatgaggacaaggatgaagattggatgcttgttggtgatgttccgtggcgaatgttcacagacagctgtaggaggctgaggattatgaaggggtcagatgcagtgggccttgctccaagagccactgacaagagcaaaaatcggaactga

SEQ ID NO: 12170 - DNA, 762 bp, Oryza sativa
  Clone ID: TFbOSC421766j.C1.o3.gm
atgaaggataggaatgcttctgctgggccagaggtgaagcctgcaggattgtcaccatcaaggtttgtgaaggtcttcatgcatggggaaccctttgagaggaagatcaatttggccatccataacaactatgactctttgtccttcactttaaaaagattgggcaacaactattccatgtcaccatttgaacttgaaggctttgtgaacaatgaagaagatggtgccatagataatgactttgatctcctgtacgatgacatgaatggtgttcgttacttacttggtgaagtcccatgggaggttttcaccattacagtcaaaaggatctacattgttcctgcagaacaacagaatgaaagtgaatatcaggaggaggaagaggacaacgcggctgctgctgctactgctgacgaagatccgccggcggccggcgcggagggctggcggtggcaagcgccggccggcgcggaggcaggcggaggaggcgcggagggccgctccgcggcggctggcagcggagtcgtggagggccgccccgcggcagttgcagagggccgccccggcggcggcaggcagcgcctcgggccgcccggcatggaattttttgcttttttttcttttttccttcttaatgtgatgtggatgactgtaatttgtgcgatcttgaatggagctgctgctgacgatggcgctgctgctgcagttgacaatggagatgaccatggctacacaagcaacgatgacccaagcttcgactaa

SEQ ID NO: 12171 - DNA, 717 bp, Oryza sativa
  Clone ID: TFbOSC400431j.C1.o11.fg
atggcgtggaggagagggttcggccgggaggaggaggacgcggcggcggcgggggagagcggcctcgagctctgccttggcctccccgcctacttctcctcctcctcctcctccaagccatcggagggatcaaccgctgctcctgcttttgctctccgatccaatggaaccaatgcctccaagccaagcggggcagcggcggcggcgccggttgtggggtggccgccggtgcggtcgttccggcggaacctcgcctcgtcgtcgtcatcgtcgtccaagcaggcgccgccgccgccgtcgtcgtcgccgcagaacggcgacaaggcgagcaaagacggcggcgcggagaagggcatgttcgtgaagatcaacatggacggcgtcccgatcgggaggaaggtcgacctcgcggcgtacggcggctacgcccagctctccgccgccgtcgacaagctcttccgcggcctcctagccgctcagagcgctgccgctgacggcgaggccgacgcggccgccgccggagagatggtcggcggcggcgagtacacgctcgtctacgaggacgacgagggcgaccggatgctcgtcggcgacgttccctggcagatgttcatcgccaccgcgaagaggctgcgcgtgctcaagagctccgacctgccgccgccgtcgctgatgagggcggcagggagcaggaagagggcagcagctgacagctga

SEQ ID NO: 12172 - DNA, 594 bp, Oryza sativa
  Clone ID: TFbOSC900383j.C1.o5.fg
atggagaatctgaaggcgacggagctgaggctcgggctgccggggacggaggaggaggcggcgccgccgccgtcgacgcccagggccggaagcaagcgcgccctcgccggcgagcctgatcaggccaagatcaagcccgccgccgccgccaaggcgcaggtggtgggatggccgccggtgaggtcgtacaggaagagctgcctccagccgacgacgacgacgacgaagagcaagccgccgccggctgccgcggcggcggagacgcagcagaaggaggatgtcgccggcgccggtgggctgttcgtgaaggtgagcatggacggagctccatacctgaggaagatagacctcaaggtgtacaagggctaccgggagcttcgcgaggcactggaggccatgttcctctgcttctccggcggcgccgccgcgaacgccgccgtcaacccgtccgacttcgccgtcacctacgaggacaaggacggcgacctcatgctcgtcggcgacgtcccattcgagatgttcattagtacgtgcaagaggttgaggatcatgaaggggtctgaagcaagaggcctaggagcaacaaggggttaa

SEQ ID NO: 12173 - DNA, 588 bp, Oryza sativa
  Clone ID: TFbOSC419674j.C1.o7.fg
atggcggcggagagcatcgacgcggagctgcgcctcgggctgcccggcagcggcggcggtgacggcgtggcggcgaagaagcggcggtcggcgtcgtcgacggtgaagagcgaggcctccggcacggcctgctgcggcggcgccggcgcccgggacgtcgaagacggcgcctcgccggcgtccaaagtgcaggtggtggggtggccgccggtggggtcgtacaggaggagcacgttccagtcttcgtcgtcgtcgacggcggcggcggcgaaggggaagggcggcggcgagacggatcaagggaggaagaataagggaggagggctgtacgtgaaggtgagcatggacggggcgccatacctccgcaaggtcgacctccggatgtacggcggctacagggagctcagggacgctctcgacgcgctcttcggctgcttctccgccgacgcctccgcctccgccgcccacttcgccgtcgcctatgaggacaaggacggcgacctcatgctcgccggcgacgtgccctgggacatgttcatctcttcttgcaagaagctgcggataatgcgaggatctgaggcgagatga

SEQ ID NO: 12174 - DNA, 801 bp, Oryza sativa
  Clone ID: TFbOSC101867j.C1.o40.fg
atgtcgccgcccctcgagctcgactacataggcctctcgcctccgccgccgccgccctcctcctcctccgccgccgccgcccgcgcggacgacgtcgacctgaagggcaccgagctccgcctcggcctccctggctccgagtcgccggaccgccgccctgcggctattgccgctgccgctgccactgccaccacccttgagctgctgcccgccaagggtgccaagcgcgtgttccccgacgaggccgcgctgacgccgcccactgccgccgccgggaagggcaaggcggcgagggagggggaggaggtgggggctgaggaggaggacaagaaggtcgccgcgccgccgcagccggctgcgaaggctcaggtggtgggatggccaccaatccgcagctaccgcaagaacacgatggcaaccaaccagataaagagcaacaaggaggatgttgatgctaagcagggtcagggtttcctgtacgtcaaggttagcatggatggtgcaccatatctgaggaaggtggacctcaaaacttacaagaactacaaggacatgtctttgggtctcgagaaaatgttcattggcttcagcaccggtaaggaaggtgctgagaaccagaaagatggtgaatatgtgttaacctacgaagacaaggatggtgactggatgctggttggtgatgttccatgggagatgttcaccgactcttgccggaggctcagaatcatgaaaggctcagatgcaattggacttggctgttctcaactaaggcttgttccattatttgtgccaaagctttag

SEQ ID NO: 12175 - DNA, 924 bp, Oryza sativa
  Clone ID: TFbOSC401037j.C1.o4.fg
atgggggaggcgtcggagagcatgaagaagatcagcagaggccgtctcggcggaagctggatgggggagccaagcgatcaccatcgccatggcgatgaacaggaggaggaggagaagacgctggagctcagccttgggctccccggaggaggatggcgagcggcgtgcagggacaaggggacgacgacgaagcactccattgcagcagctgctgctgctgatgatgatgatggtgacaagagctccatgctctccctgggctactccacactcgtctcccactcgcaaggcaaggcaaacaaaaacaaggggtccccagaggaagaagaggcacatccaccaccagctacagggaataatgcacttgcatccaacaataatggctgcttccagacaagatctcctagtactcctgttgttggttggcctccggttcgaacattcagaagaaatctggctacatccagcaaagcatctcttgaactgcagaatggaaagaaggctgcaaaagcagaagagatcaagagagctccattcataaagataaacatggatggtgtccctattggtagaaagatcgatctgaatgcttttgatagctatgagaagctttctttagcggttgacaagctattccgaggccttcttgcagcccaaagagaccccctcactgctggagcaaaggactgccagcaggaagatgtggcaatatctggcttgctagatggaactggggagtacactttggtttatgaggattatgaaggcgacaaggtgcttgttggagatgtgccatgggggatgtttgtttcttcagttaagagactgagagtactgaagacatctgacctctcttcatctgtcagtacctctttccaccttagttctattacatcaaactctgttatctccgcattattctga

SEQ ID NO: 12176 - DNA, 681 bp, Oryza sativa
  Clone ID: TFbOSC28825j.C1.o4.fg
atggaagccgccgtggggtacgccgccgacagcctcatcaaggccaccgagctcaggctgggcctgcctgggacagccgacgacctgccctccacgcccaggggcaagaagcgcgccgccgcggcggaggacaacaacgccaacgccgccgccgccgacgacgacgagcacgacgccgtcgaggccgcgccgccggtagccaaggctcaagtggtcgggtggccgccggtgaggtcgtacaggaagagctgcttccagcaacagtcagcggcggcgagcaagagcaaggccgccgtgagcagctgcaacaacaaagacgagcccatcaccaagaacgcggcgccggcgccggcagcctcctcggcggcggcggccaacggcgggtcgctggtgaaggtgagcatggacggggcgccgtacctgaggaagatcgacctgaggatgtacaagggctacagggagctccgcgaggccctggaggccatgttcgtctgcttctccggcgccgccgacggtgccaacccgtcggagttcgccatcacctaccaggacaaggacggcgacctcatgctcgtcggcgacgtccctttcgacatgttcaccagcacatgcaagaagttgaggatcatgaagagatctgaagccacagggctaggatcaccaaggcaaatgaagatctaa

SEQ ID NO: 12177 - DNA, 1032 bp, Oryza sativa
  Clone ID: TFbOSC421766j.C1.o4.gm
atgaccatggcaatcgaggccctctcctcggccttcgcttctgcacccaccttggttacctctgcctccacaacctcctccgctgctctcgtcctcatcatgggtctcgtcatcatcctcctcctcagacgatgcgtggtagtggaggacatgaccgaggtccgcatcactgctgctacaaccactaccaacaaggcaaaggaagcagcaagccatctagacctcagcctcggcatctccttgtcacccggcggcggcggcggcgacgctggcaccaaggccagcagctgctgctacggcggcggcggcgacggcggcggctgcatgggcagtggcatgctcactgcaggagttcttggcgttgggcatggggggagtagccatgacaatactacggcgagcagcggcggcggcggcagctggacggcggcgttcatgccgagcccgacgggattcatgcacccgtggagcctcgccgcccggcagcagaaggccgccgccgagcaggagcggagcggcgtcgcgaggctgccgccggcgacgacgacgtacatgccaagagctgccgcgaccgtgatttcactgccggcggcagttggctggccaccggtgcacacatcccggcgtaacctcgttgccaccataaataatgtcctgaaacccgacactactgccgccgtcaagccggacagaccgacacaagcaacggcgatgttcgccgccgacgaaaccacggcgcccccgccaaggagcgcggcggcggcgaccgaggccagcaggacattgaacatgtttgccaaggtgcacatggatgggtacaaggtgggcaggaagatcaacctcagggcacaccgcaactacgactccctccgtcgggtcctcaccaagatgactcataatttcttctgccccgcagattattcaagcacaaataagggagaagaagattgtgctaaaagtgacgagttcatatttctatatgaagattttgagggcgaccgaatgcttgttggcgatgtcccatgggagtaa

SEQ ID NO: 12178 - DNA, 591 bp, Oryza sativa
  Clone ID: TFbOSC401426j.C1.o14.fg
atgcctcggcgaactgccgacgacgacgacgacggcgccggcgcaatccacggcgtcttccggctgccgaccgccggcgacggcggcgaagcggcggagtctgatcagcacagatcttcgcctcgggctcaccctctcctccgtcgtccacatcgacggcaacaacccttctaccccaaggcaagatttcgatctctgatcattctgcacacctactgctttaatttcagagaaattttaagatacttgagaaggagttccctcacgacggcgacagtgacagctgatcgaggcggcggcggcggcggccatggacggcgacggtcactgttcgtgaaggtgtacatggagggcgtccccatcggcaggaagctggacctgctgccgctggacggctacaaaggtctcgtcgcacggctcgcctccatgttcagagcatccatcacctatcatcattgccatcgacagttcgccgtcgtcgggatgaagacgaacaaggttcatcatgttctgacatacgaagaccaggagggagactggatgatggctggagacgtgccatgggagtatggcaagctagctcagctctga

SEQ ID NO: 12179 - DNA, 624 bp, Oryza sativa
  Clone ID: TFbOSC400151j.C1.o56.fg
atgtcggtggagacggagcggagctccacggagtcgtccgccgcgtcggggctcgacttcgaggacaccgccctcaccctccgcctcccgggctccctcgccgccgccgccgcacctgaccccgaccgcaagcgctcctccccctcctcctccgacgccgccgacgccgcagacaactcctcccccctcgccgccgccgccgatgctccccctgctcccaaggcgagggtggtggggtggccgccggtgaggtcgttcaggaagaacgcgctggcggccaagttcgtgaaggtggccgtggacggcgcgccgtacctgcgcaaggtggacctcgaggcctactccggctacgaccagctcctccgcgcgctccaggacaagttcttctcccacttcaccatcccaattgacgggaggaaagttgcagggaagttcgccgacgacgagaggaagctggtggacgcggtgaacgggacggagtacgtgccgacgtacgaggacaaggacggcgactggatgctcgtcggcgacgtcccctggaagatgtttgtggaaacttgccagcgccttcgtctcatgaaaagctcagaggctgtcaacttagcaccaagagccgctcaatga

SEQ ID NO: 12180 - DNA, 816 bp, Oryza sativa
  Clone ID: TFbOSC401137j.C1.o27.fg
atgtcgcctcccctcgagccgcacgactacatcggcctctccgctgcggcggcgtccccgacgccgagctcgtcgtcctgctcgtcctcgccgaacccaggcggcgaggcccgcggcccacgcctcacgctccgcctcggcctcccggggtcggagtcccccgagcgggaggtcgtcgccgcggggctcaccctcgggcctctgcccccgaccaccaccaaggcggcctccaagcgcgccttccccgactcctccccgcggcacggcgccagctccggctccgtcgccgccgccgcagcttgccaggacaaggcggcccccgccgccgctccgccggctgcaaaggcgcaggtggtgggatggccgcccgtgcggaactaccgaaagaacacgctggcggcgagcgcctccaagggcaaaggggaggacaagggcacggctgaagggggccctctctatgtcaaggtgagcatggatggagccccctacctcaggaaggtcgacctcaagatgtattctagctatgaggacctctccatggctctcgagaagatgttcagctgcttcatcactggtcaaagcggtttgcgtaaatcatcaaacagagataggcttactaatggttcaaaggctgatgccctccaagaccaagagtatgtccttacatatgaagataaggatgctgactggatgcttgttggtgatcttccttgggatttgtttaccactatctgccggaaattgaaaatcatgagaggatctgatgctgctggaatagctccaagatcaatagagcagtcagggcagagcagataa

SEQ ID NO: 12181 - DNA, 294 bp, Oryza sativa
  Clone ID: TFbOSC400415j.C1.o18.gp
tagatggaactggggagtacactttggtttacgaggattatgaaggtgacagggtgcttgttggagatgtgccgttgggggatgtttgtttctttagttaagagactgagagtactgaagacatctgacctatcttcatctcttataacttctggacggaaaagaacagcagctgagtgttgaccttctttttttgatctgctttgacactttcagtgacgctgttcagaagaatatgatcttctgagcttgtatcatcgtctctttctctcaatgtcttgctgtgctgagctt

SEQ ID NO: 12182 - DNA, 846 bp, Oryza sativa
  Clone ID: TFbOSC400887j.C1.o27.fg
atgagaggaggagtagctgggcccaccgccggcgagccgccggggacggaggcggaggcggaggaggtggaggagagctcagctggggacgacgaggagctggagctcgggctcagccttggctccaagaaacagcagcagcagcagcatgcgccgtgccgaatcctgacggccagggacctgcagccggcggcggcgctgtcaccggactcctccgtgtcgtcgtcatcccccgcggcggcggcggcggcgggggggaagagggctgagggccccaccgccaccacctcgcctgggacggttgcttccggccatccacacagcagctttggagtggtgggatggccaccgatccgacagttcaggatgaacagcctgttcaatcaggctaaagaaaacacatctgaaaccgacaccaagaagaccgccaccaatgaatctgatgtgcagaaggacaaggaggagggcgaaaagaaaggacgggttgctggatgggtgaaggtgaacatggatggagaggtcattggaaggaaggtggatctcaatgcgcaccgctcatacaagacccttgcattagcccttgaactcatgttcacgaagccgtccattggcctttgcgcttctcataatacaaactcgctgaaactactagacaactctgccgaataccagctcacctacgaggacagggatggtgactggatgctcgttggagatgttccttgggagtcagcgataccagggaattcacagaaccattgcttcaacaagaggcagatcctgagagcgtgtgacaaggaaaagagctataccgctggtgaagcttggagcgtgcttgatggttaa

SEQ ID NO: 12183 - DNA, 597 bp, Oryza sativa
  Clone ID: TFbOSC11858j.C1.o1.fg
ggcgccaagcgcgggttctccgacgaggcgcgttcgctgccggggtccgccgccgccgccgccggcgccgggaagggcaagaaggcggcggccggcgaggaggatgaggatgccgaggaggaggacaagaaggtcgccgccgcgccgcaggcgcctgctggcaaggctcaggtggttggatggccaccaattcgcagctaccgcaagaacacgatggctactaaccagctgaagagcagcaaggaggatgctgaagcgaagcagggccaggggttcctgtacgtcaaggtcagcatggatggtgccccctacctcaggaaggtggacctcaagacctacaagaactacaaggacctgtcaactgcgcttgagaagatgttcattggcttcacaactggcaaggatggcttatctgagagccgcaaggatggtgaatatgtgctgacttatgaagacaaggatggagactggatgcttgttggcgatgttccatgggagatgtttgccaactcttgtcgcagactcaggatcatgaaaggttcagatgcaattggacttgctccaagggcagttgataagtccaaaaaccgcaactag

SEQ ID NO: 12184 - DNA, 660 bp, Oryza sativa
  Clone ID: TFbOSC14459j.C1.o1.fg
atggctggcctcgggttcgacgagaccgagctccggctcggccttcccggcgccggcgagctggcagcgaggagctccggcaagaggggcttcgccgagaccatcgacctcaagctcaagctgcagccggcggcgcctgctgccgtctctggggaagagggtgctcaggaggacaaggaagatgccgacgcggcggcggcggccgccgacgagaagatgtcgatgaagaggtcggcgagccagagcagcgtggtcaccgcggagcccgatcccgacaagccgcgcgcgcccaaggcgcaggtggtggggtggccgccggtccggtcgttcaggaagaacgtgctcgccgagaaatgcaaggcggcggcgctggtgaaggtgagcatggacggcgcgccgtacctgaggaagatcgacgtcgccatgtacaagagctacccggagttgtccatggcgttccagaacatgttcacctccttcaccatcggcaagtgtgggtcccatcagcagctgaaggagagcaataagctgagagatgacctggagtacgtgccgacgtacgaggacaaggacggcgactggatgctcgtcggcgacgtcccgtgggacaccaagggcagtggagaaatgcaagagctgaagctgatcaaggagaattaa

SEQ ID NO: 12185 - DNA, 516 bp, Oryza sativa
  Clone ID: TFbOSC421766j.C1.o4.fg
atgaaggataggaatgcttctgctgagcctgtggtgaagccaggattatcaccatcaagatttgtgaaggttttcatgcatggggaaccctttgggaggaagatcaatttggctctccataacaactatgactctttgtccttcactttaaaaaaattgggcaacaactattccatgtcaccatttgaacttgaaggcttggtgaacaaggaagaagatggtgcaatagacagcgactttgacctcttgtatgatgatatggatggtgttcgttacttccttggtgatgtcccatgggaggttttcaccactacagtgaaaaagatctacattgtccctgcagaacaacagaatgaaaatgattatcaggaggaggaagaggacaacgcggctgctgctgctactgctgacgaagatggagatggagctgctgctgacgatggcgttgctgctgcagctgacgacgttgacgatgttgctggatacacgagcaacgatgacccaagcttcgactga

SEQ ID NO: 12186 - DNA, 552 bp, Oryza sativa
  Clone ID: TFbOSC400903j.C1.o25.fg
atggagctcgagctcggcctcaggctcgcgctgccgtcgccgtcgccgtcgccggcgacggcgacggcggctgggagtgagcttgaccttctcaacagcgcgccggggtcctgccgcaagaggggcttcgaggaggcgctcggtgggttcaaaaccgacgacgacaacgacgacggcaatggccgcggcggtgacggcgattccgacggcgaaatgggcaacaagaggaggaagctggtggggtggccaccggtgaagtgcttgcaccggcggcgcgacggtggctgcggtggcggatatgtgaaggtgaagatggaggggttggccatcgggaggaagctggacttgtccatcctcggctcatacgctgagctgctcgacacgctccaccttatgttcccctccactaaccaagaggatgggcacgatcgtcgtcgacgtcacccatacgctgtcacctacgaggatggggaaggagactggatgcaggtcggagacgtgccatgggaggcctttgccaagtcggtgaaacggctcaagatactggtgtaa

SEQ ID NO: 12187 - DNA, 732 bp, Oryza sativa
  Clone ID: TFbOSC422284j.C1.o12.fg
atggcttggaatggcaggtttggagaggatggagaggaagagaggagccttgagctcagccttgccctccctggatacttctccagctcaggtttgcaggggaacacgagcactgctgctgatggagccaagggaaacgatgggttcaaggcaagcaaaaagatgctaaaatttgcccctaaattctctgcgattcgcagcaggccggcggctccggtggtcgggtggccgccggtgcggtcgttccggcggaacctcgcctcgtcgtcgtcgtcgtcgaagccgccgcgtggaggccgagacgccgccgccgccgccacgggaggcaaggtggcccggttcgtcaaggtgaacatggacggcgtcccgatcggccggaaggtcgacctggcggcgcacggcggctacggcgagctctccgccgccgtcgaccgtctcttccgcggcctcctcgccgctcaaagggacccaaccatggccaccgccgccgccgccgccgctgccggcgagagctgcacaggagaggaggaggcgatcgccgggctcctcgacggcggcagcggcgagtacacgctcgtctacgaggacgacgagggcgaccagatgctcgtcggcgacgtgccatggaacatgttcatcgccgcggcgaggaggctgcgcgtgctcaggagctccgacctgaacgcctccacgatacgagcagggagcaggaagagggcagctgccgagtga

SEQ ID NO: 12188 - DNA, 834 bp, Oryza sativa
  Clone ID: TFbOSC900383j.C1.o4.fg
atggcggcggacctggccttcgaggcgaccgagctccggctcggcctgcccggcggcggcggtgatggagacgccgcggcggcggcggcgaggagctcctccgggaagaggggcttcgccgagaccatcgacctcaagctgaagctggagccggcggccgcggcggtggacgacgacgacgacaaggaggaggcggcggctgacgaccgggagaagaaggtcgacatcgtcggagctgacaacgacgacgcctcgccgccggccgccgccgccgccggcgggatgaagcggtcgccgagccagagcagcgtcgtcaccgccgccgccgaccccgagaagccaagggctcccaaggcacaggtggttgggtggccgccggtccggtcataccggaagaacatcctggccgtgcaggccgacaagggcaaggacgccgccgacggcggcggcgacaagtccggcgccggcgccgccgccgccgccttcgtgaaggtgagcatggacggcgcgccatacctgcgcaaggtggacctcaagatgtacaagagctaccttgagctctccaaggcactcgagaagatgttcagctccttcaccattggaaactgtgggtctcatggggtgaacggcatgaacgagagcaagattgctgatctgctcaacggctctgaatatgtgccaacctacgaggacaaggacggcgactggatgctcgtcggcgacgtcccatgggagatgtttgttgaatcatgcaagcgccttaggataatgaaaggatcagaagctattggccttgcaccgagggcaatggagaaatgcaagaacagaagctga

SEQ ID NO: 12189 - DNA, 1525 bp, Oryza sativa
  Clone ID: TFbOSC5281j.C1.o1.np
ccgcgcgcccgccctcctctcagctgggccggcccaagccggggggctgcccgttgcctgctggggacgggtattatctgatttttgtcaccaagcgccgccaaattggttgcatttgtgggcatcctatttactgtatagatgagagccagatgataaccattccacactcatctgtgcagacagatgttgcaacctctaagaatgagctaaggtacaagaaacttctggctagtgttgatctcaccaaggatttcttctatagctacacataccccattatgcagagcctgcagcagaatgttacttctgcagggatgaaggaaatgccttatgaaaatttatttgtctggaatactttcctgacacaaccgattcggtcaaggtgccgcaatactccctggacagtagcactggtccatgggcatttcaagcaggtcaagctgtcaatatttggcagggagctaaatgttgttctcatttctagaagatcacggcattttgcagggacacggtatttgaaaagaggcgtgaatgaccatggaaaagttgctaacgatgttgaaactgagcaaatagtctttgaggaggaagctggttcctggaagggaagaatgagtgcagtagtacagatgcggggatcgatccctctcttttggtggcaggaggctggccgacttagtcctaagcctgatattattgtgcagagatatgatcctacatatgaagcaactaagttacattttgatgatgtcgctcagcgctatgggcatcctatcataatacttaatttaacaaagatttttgagaaaaggccccgagagatgatgctcaggcgtgaatattttaacgcagttggatatcttaatcaaaatgtcccagaggagaagaaattgagattcatccactgggatttccataaatttgcaaaaagtaagtctgcaaatgttctgggtgttttaggaggaggtgctagtgaagcactggatctcactggattttactacaatggaaagccaaaagttcaaaagaaaaggtcaacacagcttacccatatttcttttcacagggatggttccattgatacaagagctagttctggagaccttccaaggctttcgagtaatgcagattcacttggtcccactgcttctcaagatataagaaaagatgacagcaaacaagaacttcttggtgatggtccttgttatcaaactggagttcttcgtacgaattgcatggattgcctggatcgtacaaacgttgctcagtatgcttacggccttgctgctttgggaaggcagcttcatgcaatgggagcgactaatgtttcaaaaatccacccagatagcagcattgcttcagctttaatggatttgtaccagagcatgggtgatgcacttgtaggatcccctggcggcgcggccttccatcatggcgtggcgcccgggcggagaggcggccttcgaccgcggcgtggtggccggctgttcattgcttcagtgaagaggctctacattgctca

SEQ ID NO: 12190 - DNA, 1566 bp, Oryza sativa
  Clone ID: TFbOSC401064j.C1.o59.gm
atggcgcggcatggcatgcatgctgcgttcgcgcgtgagacggcgtgcgcgatcagatcagggggagcgccagagcccgcgcacagtgcaggcgggtcgtcgcagccgcgcagcgcgaggaggccgatgcgcgcgggggccggatcgagggcgacgggggccggcgccatgaatccctacgacatgccaggacggcaggtccattttgaggaagcagcgaagcacagtgtatatggcactactgggcactgcaagggtgatatggtgatctcgtcgagaagctcttacaataggtcgccggccatacctctttctctagcgattggcggagccgcggaggtggagctccactccaatccaatccaagggttcagcgaagatcaggagttcagacggggtaatgtcctcatcaacagtggtcccctgtggtcggggcgtggaaggaggtggaaccattccttacgccacaaccaacagcagcgccaatggccacacggatggaaacctgatcttaactccgtgtttttccgcgttctctttcgttctcgcttagacctcagcttacgcttcgggctgactcttgaagactttgagctagttaaccttatggaagaagggtccaacaaaagagaaggacttcctcctcaactcctagatctcatcccagatgagaaggaatggaagctgagagaagcattaggtctagggagatcaagaaacgcaggcttcgacggtgaagaagacaagaagctagacctaaagcttggtcttcctggttttatagaagatgatgaggcagaaaccttaagagattacaggctacagcaagagagcccatctctctcccttagtttctttccaaagcactccaagaccaccagcagcactactacgacaactggagcaaagaggggattcatagacacagttgaggacaaaacagaaggttataacgaccagaagcagcaggcaagggcaggatgtgggaaggaacttgcagtggaggaaatgatagcagccgtgagtgagaggaagaaaggatgctgccccccaccaccaccaccacatggtgctcctgctacacctgcgcgcaacagaccacagacccagggaaggagaaaccttgctagtagtagttcatccaaacattcccctgaaccacaaaatgataatgccaatgcaaaggtgacgctcacctgcaagaaaaaccctcttgtaaaaatcaacatggatgggatccctattggaaggaaaatagaccttgcagcctataacagctatgatgggctatcgtcagctgtcaaacaactcttccatgggtttcttcaagctcaaaaggaccaaactaatgcgcaaattgcacagcaaggtgcagatgacaaaatattttatcaattgttggatgggtctggtgaatatactctagtttatgaagacagtgaaggagacaggatgctggttggggacgtgccatggaaagtatttgtctcaactgctaaaaggctgagggttctaaggagttcagagctttcccataccctgattggagctactgctagggtctag

SEQ ID NO: 12191 - DNA, 612 bp, Oryza sativa
  Clone ID: TFbOSC11845j.C1.o2.fg
atggaggagtgcaagggcggtggcatgtcgccgtcctcctccatggatagcagcacccacccggcgctgtccacgacgtcgtcggcggcgacggcgaggcgggacctcagcaccgatctccggctagggcttagcctctcgacgtcgtcgtcgtcctccctcctgcaggccgccgccgccgccgccgctgctgatgatagcatcccttctactccaaggaacagccaagtgcacgccgattggccgccgatcaagccgttcctcaggagcgccttgcagaaggcgtcggccgctggcggcggcggcgctcgccgacggcgaacgctgttcgtgaaggtgtacatggagggcgtcccgatcggccggaagctcgacctgctcttgctggatgggtatgacagcctcctcatcaagctctgccacatgttcaagacgcccatcacctatgctgatgttatggagtgccatcaacaagttcctggccagaaggctgcccatgtcctcacctatgaagaccaggacggggactggatgatggttggggacgtcccatgggaactcttcctgagcagcgtaaagaagctcaggattgcaaggatggataaatgctaa

SEQ ID NO: 12192 - DNA, 618 bp, Oryza sativa
  Clone ID: TFbOSC900153j.C1.o5.gm
atggcgaggccgcgggccgggcgggcgacggggcgcaccgcaccggagcgtgcgatgtgtgacgagactggcaggggtgggagggcgcagcggagcatcacggcgaagtcggcgagcgagcggaacaagcacgtggccacttgcgggaaccctgtcccctacccccctcgccagaatccggatctactgtgcccgttcgctctccattgcccacagctcgccaccatcagcgtcttcttcgtcgaggtcagcggcggcgacacggtgttgggtcatggcgagctacggcgacgacggcgtggagctcaccgagctgacgctggggcctcccggagccagcgctcgcagggccaggcgcggcaggaagaacggccatccgccgccgtcgtcctcgatgcagcgtacttcgtgaaggtgagcatggacgggacgccgtacctgaggaaggtggacgtcgcggcgtacggcgactacctcgagctcgtcgaggcgctcaacgacatgttctactgctccaccattggactgatggacgggtacggcgagtgggagcacgccgtcgtgtacgaggacggcgacggcgactggatgctcgtcggcgacgtgccctgggagtaa

SEQ ID NO: 12193 - DNA, 801 bp, Oryza sativa
  Clone ID: TFbOSC416231j.C1.o5.gm
atgggggttgtcagcgacggcgtgatgattgctccggccgccggcgactcgccggtcgccgtcgccggcagcatccgcgcggccaccaccacccaccaccacacccctcgtctccgcaaactcgacgcgccactcgacagcgaccccgcagccgatccatcccgccgccgaagcagcagcaaccgccacggtgcgccgccgccgccggtaccgatgtcgacgagctccggcgccgactcgtccccgcccgtctcgggcctcgactacgacgacaccgccctcaccctcgccctccccggctcctcctcctcctcctcctccaccgccgaccccgaacgcaagcgcgccgcccacgccgaccacgccgacgccaagccgccttccccaaaggcgcgggcggtggggtggccgccggtgagggcgtacaggcggaacgcgctgcgggaggactccgcgagggcgaagctggtcaaggtggccgtggacggcgcgccgtacctgcgcaaggtggacctcgcggcgcacgccggctacgcgcccctcctccgcgcgctccacggcatgttcgcctcctgcctcgccgtccgcggcggcggcggcggcgacggcgagggtacaaagctcgtcgacttggtcaccggcgccgagtacgtgcccacctacgaggacaaggacggcgactggatgctcgtcggcgacgtcccctggaagatgttcgtcgagtcctgcaagcggatccgtctcatgaagagctccgaggccgtcaacttatgtaagaacttgcgatccaatccactataa

SEQ ID NO: 12194 - DNA, 828 bp, Oryza sativa
  Clone ID: TFbOSC400878j.C1.o5.fg
atggcgtcttcttcttctctcaggagcaccagctgcctcgcctccgccgcggagaccgacgccgacaacctctgcctccgcctcggcccgccgggaagcagcatcaccaccaccaccaccaccggcggcgccgacccggcggcgaagaggtccctcggggcgaagcggtcgctggagagcacggacagcatggcctccggcaccggaacttccgccgccggcgacgagcacgacgacgacaccgccgcaccggccaaggcacaggtggtaggatggccaccagtgagggcataccggaggaacaccttccatcaggccgccgccgccgccgccgcaaccaagaagggtggtgatgagaaacagaagcagcagcagcagggaggagggctgtatgtgaaggtgagcatggatggggcaccatacctgaggaaggttgatctcaagatgtgcaagggctacagggagctgagggaggcactggatctcctcttcaccaagtgcttctctgcaaccgcctctgacggatgcagcgatggccagttcgccattgcctacgaggacaaggacggtgacctcatgcttgttggagatgtgccctgggaaatgttcatctcttcctgcaagaagttgaggatcatgaagggctctgaagccagcaagatttatgccttgaagaccaatcaagtgcttaacctgcaggccattggttcaaactctgaagaagataaggcccttgcctggctgcctgcccacactgccaaccaagcagatgcagatgcacggatgaatcagcacaaactccgtggaagaattacctcgaaaaaataa

SEQ ID NO: 12195 - DNA, 1551 bp, Oryza sativa
  Clone ID: TFbOSC408625j.C1.o8.fg
atggcggctggtggctcatcctcaaaccctatgtcgagagaagcctcgtcctcggcggccgccgcggcggcgggggtggctgtgagggatgttggggatgacaagcccttgccgtcggcggaggttgacatcacctactgggcggcgcaggaagaggcggctgcgctgcttgagtcgatggccgcgagggctcgtggggaggacgacctaccggaggagcagctgcaagccaataaccaactacaggaagacgaggtaatagcactgcaagctatttttggtgatgatatggtgatcttggagaataaggacaatcttcgatttattcagatttttgtgcattatacacttcctgatagtatccgtgtgttcttgaatcttcgtcgaagtggagctatggttggaactgatgatagtgaaaaccacaatggcggagaactctatcatcttgcagctaaatggttggatgaaccaaaggtctcatacctgtgtgctgcgcttgatgaggtttggacagagcttccagggcaagaagtcatatacagatgggtggattggctgaatagctcttcgtggtcttccattgctttgaatgatgaaatagtgttagatccagataaaacattaaaaattggagatgaacgagctatcgcgagaagaattttagttgagtctactattcctcttatgcagagttacagtgagaagagatctcataagatatttttggaaagccttctctgtatggagtctcactgcaaaatccatgtgaaagaagggaatttaatgcagctggcatgtcctgatacaaattgccgcaatccacttccgccatccgtattgaaaagccttctacgagatgatggatatgcacaatgggaatcatttgctctacagaaactgttagatgcaatgcctgatctagtttactgccccaggtgttctgctgcttgcttggaagttgacaatgatgctcaatgcccgggttgtttttttaccttctgcactttgtgcaaacgccgccgccatgtgggggatacatgtattactcctgaagaaaaaatacgcattttgaagggcctgacaaggatgtcatctatgcgagtaggccccagaccccaagttgtttccccggaacgacagaaattgtattccataccagaggaacaattgttgaaagaaaagagggaaatagacgagttgataaatatccaggaagcacttcgtgattctaagcaatgccctcgttgtaagatggctatctcaaaaattgaaggttgcaacaagatgacatgtgggaactgtgggagattcttctgctatcgttgtaacaaagcaattggaggatatgatcatttctggaatggaaactgtgatatgtttgagagggaacaagatgaaaacccacagcagcaggatgatgaaaattttggtggcgaccctgacgaagatgctgaactcttagaacctgaatgggtgctgttaacttatccctgtccaaactgtggccgtcggaatgaaaagtcatacatgtacagactgttgctgtag

SEQ ID NO: 12196 - DNA, 484 bp, Oryza sativa
  Clone ID: TFbOSC401616j.C1.o20.gp
agtggtaatggatcagctgcctatattatacacataattatttgtaccaatttatacaaatttacatgatatgttaataggataggtgcacagacctgagatggctataacaatcatcactgctcctgaagttctccaagcatgcccaacaaatgtgactgccacatttacactcgacatggttgcaaccatcagctttctcgattgtaaagtggcaagaagggcataccttcacattctccttccccttgcgccattcaagcagagttgcatcagggtcttccttgtattctttgtatgcctcacaggatatgaaaggatgatattcaagatgacacttgttgcagatctccacaaagcaagccccacagacaaaaggtttgctttcagcatctgcagcagccacttggtaaatggatgggcaatcaggagtaggacagaaacgatattttcctgcattagaagcaacaaatgctctcaagga

SEQ ID NO: 12197 - DNA, 1752 bp, Oryza sativa
  Clone ID: TFbOSC400944j.C1.o30.fg
atggcagcagcatccgccgtcgcctcgtcgtcgtcgtcaccggcgctggagccccaccccgacctctccccggtattctcgtcgccgtccgcggcttcctcctcctcgtcctcgtcgcgcgacgagggagcgcgcggggtctcgtgcgaggggggcggcggtgatgacgtgttcgacctggacgccccgtgggtggcggcggccgaggcggagtcgaggctggaggaggccgtgacggcggcggccgcggcgcgggttggtctctgctgcaccgaggagaaggggaaggggaagggggagaaggaggaagatgagatacgaaacaaccggcagcggcaggaggacgagatttacatacattacgatttgaatgatggcgctgaagtgtgtgctaagctttcttcagctaatgagaaaaatccaaaagatggaagatgttgcgttggaatagaagggcatggtgacgaaccagaagatttttcttacacttgtaattttgagtacttgcctcctttggtcttgacatgcttgcttccactgtcctatcctagcaaagaacccccatattttacagtcactgttaagtggatggatgggcctaatgtttcgcagctctgtaagatgcttgacaccatttgggcagagttaccagggcaggaagtggtataccggtgggttgagtcgctaagaaattcttctcggtcatatctctggtttgatggaaaaataacgttaggtccagatactccaatgcagaaaggagataatcgtgcaatctcaagaagtctctccttggagtctgtaattccatccatgctcagttacagtagtaagaagcgctatcaagcatttcttgaggatctccacatgtgcatgatatgcctcagccagagcaaaggttcaaacttcatcaggcttccatgccaacacctcttttgtgtgaagtgcttggggacgttatgcaggatgcatgtcaaggaaggtagtgtgtttcagttggtatgccctgataccaagtgcaatgcttcaattccaccctatgtgttgaagagacttcttacagaagatgaatttgaacgttgggataggcttactcttgagaaagcactggactccatgtcagatgtggtttactgtccaagatgcgtgatcggttgcttggaagatgaggataataatgcacaatgtccaaaatgctcctttttcttctgctcgttttgtaaggagccatgccatcctaggaggcagtgcttgactccagaggaaaagctccagcgccggcaggcgtcagggaggatgtctgagagagaggtggcacaggaaatactgaacatcaaagcattatataatgatgtccgattatgtccaaagtgccgaatggccatcagcaaaactgcagggtgcaacaaaatggtgtgcggcaactgcggtcagttcttctgcttccgctgtggcaaggccataaagggttatgatcatttcagcgaatgtaagctctttgcgcctagagacatatcagcgtgggagagacaaatggaagagcagtatggaaatcatgtacggctttcactgcgccctgtaggcggtacaatcaggtgtccaaaatgccgtgaaagaaatttcaaggatgatgagaaatatatcttctgctgggcatgccgagccaactactgcacaatgtgcagacgtgaagtccaggacaagagggggcactttgggtcaccggaatgcgtggggcttgaagatttctag

SEQ ID NO: 12198 - DNA, 909 bp, Oryza sativa
  Clone ID: TFbOSC401875j.C1.o15.fg
atggagacctccgccgccgcgggtggcgcacacttgatctacgtatcctccgacgacgaggaggacgaaacacgcgtcctccttgccgaatcctacagcgccgaggagatccagatccagcaggccatcctcctctcgctcgacccctccagcgacgcggacgccgcccattcctccgcctcctcctcccgcccctccggcgccgcctccacctccgacgaaccctcctcccttcccgaccgcaagggcaagcgcaagctatcatcggaagaagatggccctatcgaatccacgaggaagaagcggcggaagcgcggccgattcaagtgcagcgtctgcatggagaagctacaggtctcggagcagttcaccgtgagcttctgtgcccacgcgttctgcaacagctgcattggccgctacgtcgccgccaagatctccgagaacgtagccgtgatcgggtgccctgaccccgggtgcgaggagggtttcgtcgagatggacacttgcagggatatcatcccgccggagttgtttgatcggtggagcgtctcgctgtgcgagttggcactgggtgagaagaagtactactgtccgttcaaggattgctcggcgttgctgatcaatgacaacgacggcgcggagaagaagatcagggagacggagtgcccccactgccaccggatgttttgtgcaaggtgtcgtgtgccttggcatgatgggatcaaatgtaaggagttcaggaagctaggcgatgatgagaagggggaggaggatctgatgttcaagaagctggctgggaagaagaaatggcagaggtgcccaaattataaaatgcagttttctgaatggaagattccagaatcaccaaattttggtagagttaggcaatgtaaggttgtgatggtgtaa

SEQ ID NO: 12199 - DNA, 1539 bp, Oryza sativa
  Clone ID: TFbOSC418099j.C1.o8.fg
atggaggagaggttagccgacgtggagggcagtttcgcctgcaattcgagaggggaggatgacttcaggagctgctgtggggatgaggatgagtgggaggacaccgaggagtcattcacggccggcgtcgccaagggagagcttgatgagagctcggtgaggctgttcttcaagggcgtgtcgagccccgaggcggaggggaagaagctgtccgggattggggtggtgatggagaggtcacctggggtgcctatgcttcaggtgcagaagaaactggacttctatgtggatgagctagtggccgatcacttggcgctgatggatggcctgttggtggcgttgcagaatgggatacggaagatctttgctttcaccaattcggagaagctgtactttcaggcaagaatcgcagaagctgaaattctagaagaccagctcttggtagctttaggacacagaattcttgaactggtggaaaagctggaagactttgatataatattgcttcctagctttgagcttgagaggccactgcagttggccaaagaagccataggcatcatgtatctatctccatacgaggttggcacctgttcaatttgctgtgaggaaaaacgaggcgctcagatgatcaaagtgggttgtgctcatacattttgctatagctgcttgacttcatatactcaagagaagctgcaaaccaacaaggttcctataagatgcccacagttaaggtgtaaatatcatatttctgctagtgagtgtaagtcattccttccagttagctgctacgattctctggagagagcttttgcagaagctggcacctcagacatggaaagattttattgtccctttccaaactgttcagttctactagatcttagtcagcacttctctagagcaagtacatcaagtcagtcagatctcaattgtgttgagtgcccagaatgccatagagatatctgtatcaactgtggagtgccatggcatgtcatgatgggctgtgatgagtaccagagcttgcctgttgatgaaagagatgcaggagacctgtctttgcatcggctagcacaaaacaataggtggaggcgttgtcagagatgccgacgaatgattgaactcacacaaggctgcttccatatgaattgctggtgcgggcacgagttctgctactcctgtggcgccgagtacaccaatggtatacagacatgccaatgtgttttctgggacgaagagagcatcgaggctgcctcggcagcgcattccacccaagcatccgagatatgggcatgggacacgttcgactgcatgccaaccgccatcgaagggtactcggagcaggagagagctcagctggctctcattcagaggttcctctcagggggtttcaacctgggtgagcctccaagccagtcgccgccccgctgcgccgattcatatatcattgacaccatgaaggaccttcaccagctgccatggctcgagcggttcgtttcggtgatcagtgacagctacaatgaagattacatccagtga

SEQ ID NO: 12200 - DNA, 1896 bp, Oryza sativa
  Clone ID: TFbOSC401875j.C1.o9.fg
atgaacattgacgacgcgttggcggaggaattgcaattgcaggaagccatcctcttctctgccttccaagaaatgatcatccaggacaccgacgacgacgactccatcggcaatctgattctgatcggccaagatcaggggcaagaatccaagaaacccttttccgttgccgatcatggcgagtcctcttcgccgtcgccgttgacgatgacgacgactaccggcggcggcggcgccggcgagttctactgttccatctgcatggagacggtgcccggcgctctcaagttcagcgtcagcccatgcctccacgccttctgcgtgtgctgcatcggccagtacgtcgcggccaagatcggcgagaacaccgccgacgtcaggtgccctgaccccggctgcggcggcggcgtcgagccggagagctgccgcggcgtcgtcccctcggaggtgctcgacaggtggggcctcctgctgtgcgaggcggcgatcgtcgcgaggaggctgcactgcccgttccgggactgctcagagccgctcctcgccgacgccgacggcgagggcggcggcgtggcggaggccgagtgcccgagctgccaccggctgttctgcgcgcggtgtatggtgccgtggcacgacggcgtcgggtgcgaggagttccaggagctcggggaggacgagcgcggccgggaggacgtgatggtgcggcggctcgccggcagggagcggtggcagcggtgcccccagtgcaggatgtacgtggagaaatccgagggatgcatgttcatgaagtgcagggccgcaggggagggaccaccggacatgagcgccaacgtcgacttggatgccaagaggttggtaccgctgaaggcttggggaagatgccgaggttgttggagctcgagctcaagctacccgcggagtaagatgttgatgtctgagatcggatcacaagacgagtttgtgaagacgaatacagactatatcgagaagggcgagtattctggtggcgacagaccagttaggtcgcgggttggaaagatggcgccgacaggtatgaaatttgatttggtgaagtttgacggctccggaaattttggcttgtggcaaaccaaggtcaaagatttgttagctcaacaaggagtttcaaaggctttgaagggtgaaaaaccggccaagatggaggatgacgattggaaggagatgcagttgcaggcggctgcgacaataaggctatgtctttcagatcaggaaggggcagatctgacagcacatgtgaacgttttcaatcaactagtcacagattttatgaagatggatgtggaagttgacgatgaagacaaggccatagttcttttgtgttcgttacctgaatcgtatgagcatgtggtgactactttgacgtacggcaagaagaccatcaaaactaaagatatcacttctgcgttgctggctcgtgatcagatgagaaagaacaaagagggtgaaacatctcaagcggagggtttgctagtaaaagaagatcatgttgggcataagttaggcgatgacacaagttatccggccgtgggagtacgtgaagtcaatatcaagctagaagatggaggtgaacatgttcttcagggagtcaggcatgtaccagggctaaagaggaatctgatttcgcttgaaaccttgcatgaagaagggttaatattccgcggtaatcggaataggaagaccatggagatcatgaaggacaagacgactgtgatgacgggagagaaggtggagtcgcatctttacaagctacgagggtgcactgttgcaggtggagtccaagagggagcggttgctaggatagcaattgttttcggtggcggcgggtctggcgcatactcgtcgggcggcttgcggtga

SEQ ID NO: 12201 - DNA, 779 bp, Oryza sativa
  Clone ID: TFbOSC401857j.C1.o21.np
cgtggcacgccggcgtcgactggagccatggcgatggcggaagcggccgagggacagcggccgcggcagcggcagcgtcggcagccgcagccgcagcggcagcagcatccaagctgcggcatctgcatggagcccatgccgccctccgaggcgcaccgcggcggcggcggcggctgcgcgcacgccttctgccgcgcgtgcctcgcgggccacgtccgcgccaaggtcgagtccggcggcggcgcgggcgccgtgcgttgccccgacccgtcgtgcggcggcgcgctcgacccggagctgtgccgcggcgcgctcccgggggacgtgttcgagcggtggtgcgcggcgctctgcgaggccatgttcgccggcgcgcggcggacgtactgcccgtaccctggctgctccgagatgatggtcgccgacgccgacgacgaggggtgcgcgggcgtgacgcagtcggagtgccaggcgtgcaggcggctgttctgcgcgcggtgcggcgtgccgtggcacgccggcgtgagctgcgccgagttcgggcggctcggcgagggggagcgcgggcgggaggacctgctgctggtgcaggccgcgcggaacggcgggtggaagcgctgcccgcgctgcaggttctacgtcgagaagtcccacggctgcctccacatcacatgcaggtgcggctttgaattctgctatggatgtgggagacagtggcagctgatacatgacggctgctgctccctaatgacacaacaagctggagaagtgccaaatca

SEQ ID NO: 12202 - DNA, 2664 bp, Oryza sativa
  Clone ID: TFbOSC900349j.C1.o3.fg
atggaaggaggaaaaccccaccctgctgcgactggaggaggagcatcgagcagccaccacgccgccgccgccgccgccgccgatgtcgccgtcgacgaggcgttcgcgcgtgacctgtacgtgtcgcagctgatggagctgggcgacgacgactggagcagcttcgcgccgccgatggatcgcgtaggatcgacgtcttccctcgccgccggcgccgccgggagcagggcccaacccatcgtcatcgatgatgatgatgacgcgccggcggcggcggcggcggcgcggaccgtccaactgtacgtgccgcctccgttacgatccggtgggcgccgcaccgtggcgacgagacagcagccggcaccggcaagatcagcgacggccttcctcccgcggccgccgggcggcgccgccaccgccgacatcggcacgagctctaccgccaccttaccacagggcctacctgctgccatggcgccgtctactgaactctcactccgccccggcggcctcatcgctggcggcgccgccgctccccgccacggcgggagacgtcctgccgcccgtatggcggctcgtgccgctcccggcaccggccatgcccgtggcgccggcaatggccgttgggctagggcagaaaacctcatggcagcattgcaagcaaaccctcgcccaaacgtcgcgcagttcggccggatatggactcgcattgccgccgccgaccgccagctcaccgccgccgccgccgccgccgacaccccggcggccgtcaccgccaccacgggagaagggagccacgccgcccctgccgtctctgccggcaagtgtgggcaacacagaaccccggccatctccgccggcaaaggaggcgccgccggcggcatggaagaagaagaagaggttcaccgcaacgtcgcgaacgagaacgactcggtttcctcgaagaggcaggccctactcgccgacagggacacgccggccgtcttcgccggcatggaagacggccacgacaacgactggtacgactccgtcatccgcgacgccgtgatcgccgagctgcaagaggacccagagctccatgggcctctcccggtgcaatacctcacaaaatcgcccgtcgtggcgcaaccaccaccccgcgccaccgccgccgccatcgccggagaagaagaagaagaagaaggtgaattctccatgccaaacttctacaagaagtggggcctccgcccatccgacctcgaccccgacgaggccggcccgtcgacgaggcggccgagggtgctccccctcgccgacggcgacctcccgacgttcgactgcggcatctgcttcgacaccttgccgatgctcgacctcttccgcggcctcccctgcgaccacaagtactgcctcgagtgcatgaccacctacatcgacggcaaggtgagggagggggccgtgccggtggcgtgcccggacccggagtgcgccgacggcggcgacggcggcgccggcgtgctccacccggaggggtgcaagaaggccatcgacttcgccgcgttcaccgactgggggctccggctcgccgagggcgccgtgccgcacgaccggcgggcgtactgccccaaccgccggtgcgggatcctgctggagaccagcggcgaggcggagccggccatggcggcgtgcccggcgtgccagcacctgctgtgcgcgacgtgcggcggggagtggagcacggcggacgacgccgaccaccgggactgctccaaggggcccgaggccgccatggtgaagaagctcgccgacgagcggcggtggaaggcgtgccccaaatgcaggatgctggttgagaggacagccggctgcagggtcatgagttgcaggtgccgcatggtcttctgctacctttgtgggctccagataggagcggtgctggaggggaaggagaaatgccagtgcctcgacaatctcggcgtcgttctgattaaagcactgtgcagattttctaaaaggagaactgcatcttatcctccaataaaagccattcaaataaaaggggtggtggtctctcatctgcgcagtagccaacgacacagacgccatcccgtcgccgactaccaagcacgagaagaggagagttgtcgccaacacctctacacaaaggtggtcaacccccaccttcctcctatcgccgtgtctgctaccaataccgcatcctgtcggcacgagggggttgccacagcaactgctcacacccatccccgtacctccacgcaggcggtctcaccattgcccagtgtcgccattgctatgccttgcgagcattcctctaccacgcgttggtcacgtagatctagcctcgaagctactggatctagcatcaccagcgctagatccactactggaactgtcttcaacaccattggtcatagttgtcgtcgcttcaaccgcgttgccgccatcacagtcactatcatggccagatccatcctccaaatctatcaccttgtgctcgcaacctctgggagctcatgggagaaaaggccccacaccactaacatccttgtcaccgcaagatttccgacggatggctctgatggtggcgaggaggtgggagggaggaaagtggagtggcaccgtggcatgggtcactgcccgagtcattcctcagtaattgagtaa

SEQ ID NO: 12203 - DNA, 2577 bp, Oryza sativa
  Clone ID: TFbOSC900362j.C1.o1.fg
atggaaggaggaaaaccccaccctgctgcgactggaggaggagcatcgagcagccaccacgccgccgccgccgccgccgccgatgtcgccgtcgacgaggcgttcgcgcgtgacctgtacgtgtcgcagctgatggagctgggcgacgacgactggagcagcttcgcgccgccgatggatcgcgtaggatcgacgtcttccctcgccgccggcgccgccgggagcagggcccaacccatcgtcatcgatgatgatgatgacgcgccggcggcggcggcggcggcgcggaccgtccaactgtacgtgccgcctccgttacgatccggtgggcgccgcaccgtggcgacgagacagcagccggcaccggcaagatcagcgacggccttcctcccgcggccgccgggcggcgccgccaccgccgacatcggcacgagctctaccgccaccttaccacagggcctacctgctgccatggcgccgtctactgaactctcactccgccccggcggcctcatcgctggcggcgccgccgctccccgccacggcgggagacgtcctgccgcccgtatggcggctcgtgccgctcccggcaccggccatgcccgtggcgccggcaatggccgttgggctagggcagaaaacctcatggcagcattgcaagcaaaccctcgcccaaacgtcgcgcagttcggccggatatggactcgcattgccgccgccgaccgccagctcaccgccgccgccgccgccgccgacaccccggcggccgtcaccgccaccacgggagaagggagccacgccgcccctgccgtctctgccggcaagtgtgggcaacacagaaccccggccatctccgccggcaaaggaggcgccgccggcggcatggaagaagaagaagaggttcaccgcaacgtcgcgaacgagaacgactcggtttcctcgaagaggcaggccctactcgccgacagggacacgccggccgtcttcgccggcatggaagacggccacgacaacgactggtacgactccgtcatccgcgacgccgtgatcgccgagctgcaagaggacccagagctccatgggcctctcccggtgcaatacctcacaaaatcgcccgtcgtggcgcaaccaccaccccgcgccaccgccgccgccatcgccggagaagaagaagaagaagaaggtgaattctccatgccaaacttctacaagaagtggggcctccgcccatccgacctcgaccccgacgaggccggcccgtcgacgaggcggccgagggtgctccccctcgccgacggcgacctcccgacgttcgactgcggcatctgcttcgacaccttgccgatgctcgacctcttccgcggcctcccctgcgaccacaagtactgcctcgagtgcatgaccacctacatcgacggcaaggggtgcaagaaggccatcgacttcgccgcgttcaccgactgggggctccggctcgccgagggcgccgtgccgcacgaccggcgggcgtactgccccaaccgccggtgcgggatcctgctggagaccagcggcgaggcggagccggccatggcggcgtgcccggcgtgccagcacctgctgtgcgcgacgtgcggcggggagtggagcacggcggacgacgccgaccaccgggactgctccaaggggcccgaggccgccatggtgaagaagctcgccgacgagcggcggtggaaggcgtgccccaaatgcaggatgctggttgagaggacagccggctgcagggtcatgagttgcaggtgccgcatggtcttctgctacctttgtgggctccagataggagcggtgctggaggggaaggagaaatgccagtgcctcgacaatctcggcgtcgttctgattaaagcactgtgcagattttctaaaaggagaactgcatcttatcctccaataaaagccattcaaataaaaggggtggtggtctctcatctgcgcagtagccaacgacacagacgccatcccgtcgccgactaccaagcacgagaagaggagagttgtcgccaacacctctacacaaaggtggtcaacccccaccttcctcctatcgccgtgtctgctaccaataccgcatcctgtcggcacgagggggttgccacagcaactgctcacacccatccccgtacctccacgcaggcggtctcaccattgcccagtgtcgccattgctatgccttgcgagcattcctctaccacgcgttggtcacgtagatctagcctcgaagctactggatctagcatcaccagcgctagatccactactggaactgtcttcaacaccattggtcatagttgtcgtcgcttcaaccgcgttgccgccatcacagtcactatcatggccagatccatcctccaaatctatcaccttgtgctcgcaacctctgggagctcatgggagaaaaggccccacaccactaacatccttgtcaccgcaagatttccgacggatggctctgatggtggcgaggaggtgggagggaggaaagtggagtggcaccgtggcatgggtcactgcccgagtcattcctcagtaattgagtaa

SEQ ID NO: 12204 - DNA, 987 bp, Oryza sativa
  Clone ID: TFbOSC401875j.C1.o11.fg
atggagaactccgccgccgacgccgccgccgctgcgggtggtgccgacgtgatctacatctcctccgacgatgaggacgaagaaatccgcatcctctccgccgatccttacagtcccgaggagatccaaatacaggaggtcatcctcctctcgctcgactactcccgtgccgccgccgccgacgccgacaccgcccagtcctccgcctcctcctctcgcccctccgccgccgcctccaccttcggtgaaccctcctccctccccgaccgtaagggcaagagcaagctattatcggaagatggcccgagcgaatcgacgacgacgaggcggtggcggaagcgcggcttcacgtgcatcatctgcatggacaaggtccaggcctcggaggagttcctcgtcaacgtctgctcccacgccttctgcaagagctgcatcgggggctacgtcgccgccaaggtctccgacaacgtggccgcgatcgggtgccccgaccccgggtgcgaggaggggtccgtcgagatcggccagtgcagggacatcgtcccgccggagctgttcggccggtggagcgtctcgctgtgggagtcctcgatgggggagacgacgaagtgctactgcccgttcaaggattgctcggcgatgctgatcaacgacaacggcgacggcggcgacgcggaggagatcgcggagacggagtgcccccactgccaccggatgttctgcgcgagctgccgcgtgccttggcatgatgggatcgactgcaaggagttcaggaagctgggcaacgacgagaagggtaaggaggatctgatgttgaagaagctggctgggaagaagaaatggcagaggtgtcctcagtgtaggatgtacgtggagaaatcagcgggatgcacgttcatgaggtgcaggtgtggatttttcttctgctacaactgcgcagctcccatgaccaaattagtgcattactgcaagaaatgcaaccgttga

SEQ ID NO: 12205 - DNA, 1713 bp, Oryza sativa
  Clone ID: TFbOSC400083j.C1.o24.fg
atggactccgaggacgacatgctcgacgcgaacgactccgccgacgacgacttctacagcggcggggaggccgggctcggcgggagcgacgacggggacgccgactacgacttcgccgaccacgactccgacgattccgcggagctcctctcgcaccggcagcagaaaaacaatgggaattctatgggtgtattgtttgggagggtggggagcggggatataaattcatgggataaagatagtctacaggaaataggctatggcataactgtaaatgaattgtggatatatccatatccttaccatactgaaacaaccgccattattcgcaaagggtcgcgatctcatgaggatgagcaaaattacagtatattaagtgaagccgatatacaacagcgccaagaggatgatataaatagggtttcaactgttctttcaatttcaaagtcagaagcatgtgttcttcttcgtaattataactggagtgtcagtaaggtgcatgatgaatggtttgctgatgaagaacatgttcgtaaggttgttggttttccggaaaagctcatcgaaatgccaaatgacagagaatgcatgttggagaggtttgacaatctaaccttgagatatttctctttatcaaccccggattctgttttgtgtgggatcaccacttacatagtgcacattgacagatgtcctgatccgtcctgcacagctgctgttggtcaagatatgatcaattcactggctgatgacgaggatagggaaaagtatgggcgatatcttcgcagatcttacattgaagataataggaagacaaaatggtgtcctgctcctggatgtgaatatgctgtagaatttgtcatgggcagtggtagctatgatgtgaactgcaactgttcatacggcttttgttggaactgcactgaggaagctcatcgtccggtagactgtgccactgtttcaaagtggatcctcaagaacagtgcggagtctgaaaatatgaactggctgtgtcttggtccatggtcggagcatggagaacggactggtggattttatgcctgtaaccgttatgaggcagcaaggcaggaaggagcgtatgatgaatctgaaaggagaagagaaatggcaaagaactcgcttgagagatatacacactattatgaacggtgggcagccaatcagtcgtcgaggcaaaaggcattaggagatctgctgagtttgcaaaacgacaagcttgaaaagttaagtgatatacaaagccaaccagagtcacagctcaagttcatcatagaggcttggttacagattgtcgaatgtaggagggtattgaagtggacttatgcttatggtttttacctcccagagcatgaacatgccaaaagacagttctttgaatatctgcaaggtgaggcggaatcaggtttggagcggctgcatcaatgtgcagagaaagaacttcaagtataccttgaagcagaatctccctcaaaagatttcaatgacttccgtacaaagttggctggattaactagtgtgactcgcaattatttcgagaaccttgtccgggctttggagactggattaaatgatgtaggtccttccactagccatggtacatgcagcaagagcgcaacttcgaagagtcttggcagtaaaaatctgccagaaactgccaggcttgtaacaaccagcatcgatagcattacatag

SEQ ID NO: 12206 - DNA, 1821 bp, Oryza sativa
  Clone ID: TFbOSC401841j.C1.o3.fg
atggactccgaggacgacatgctcgacgcgaacgactccgccgacgacgacttctacagcggcggggaggccgggctcggcgggagcgacgacggggacgccgactacgacttcgccgaccacgactccgacgattccgcggagctcctctcgcaccggcagcagaaaaacaatgggaattctatgggtgtattgtttgggagggtggggagcggggatataaattcatgggataaagatagtctacaggaaataggctatggcataactgtaaatgaattgtggatatatccatatccttaccatactgaaacaaccgccattattcgcaaagggtcgcgatctcatgaggatgagcaaaattacagtatattaagtgaagccgatatacaacagcgccaagaggatgatataaatagggtttcaactgttctttcaatttcaaagtcagaagcatgtgttcttcttcgtaattataactggagtgtcagtaaggtgcatgatgaatggtttgctgatgaagaacatgttcgtaaggttgttggttttccggaaaagctcatcgaaatgccaaatgacagagaatgcatgttggagaggtttgacaatctaaccttgagatatttctctttatcaaccccggattctgttttgtgtgggatcaccacttacatagtgcacattgacagatgtcctgatccgtcctgcacagctgctgttggtcaagatatgatcaattcactggctgatgacgaggatagggaaaagtatgggcgatatcttcgcagatcttacattgaagataataggaagacaaaatggtgtcctgctcctggatgtgaatatgctgtagaatttgtcatgggcagtggtagctatgatgtgaactgcaactgttcatacggcttttgttggaactgcactgaggaagctcatcgtccggtagactgtgccactgtttcaaagtggatcctcaagaacagtgcggagtctgaaaatatgaactggattctagctaattcaaagccttgtcctaagtgcaagcggcccattgaaaaaaaccagggatgcatgcacattacatgcacacctccatgcaaatttgagttttgctggctgtgtcttggtccatggtcggagcatggagaacggactggtggattttatgcctgtaaccgttatgaggcagcaaggcaggaaggagcgtatgatgaatctgaaaggagaagagaaatggcaaagaactcgcttgagagatatacacactattatgaacggtgggcagccaatcagtcgtcgaggcaaaaggcattaggagatctgctgagtttgcaaaacgacaagcttgaaaagttaagtgatatacaaagccaaccagagtcacagctcaagttcatcatagaggcttggttacagattgtcgaatgtaggagggtattgaagtggacttatgcttatggtttttacctcccagagcatgaacatgccaaaagacagttctttgaatatctgcaaggtgaggcggaatcaggtttggagcggctgcatcaatgtgcagagaaagaacttcaagtataccttgaagcagaatctccctcaaaagatttcaatgacttccgtacaaagttggctggattaactagtgtgactcgcaattatttcgagaaccttgtccgggctttggagactggattaaatgatgtaggtccttccactagccatggtacatgcagcaagagcgcaacttcgaagagtcttggcagtaaaaatctgccagaaactgccaggcttgtaacaaccagcatcgatagcattacatag

SEQ ID NO: 12207 - DNA, 5061 bp, Oryza sativa
  Clone ID: TFbOSC401616j.C1.o16.fg
atgcgccgatccaacgatggccgccccttccgcccgccggactggggcccgccgccgcaccgctaccaccaccaccaccagaaccagtaccagtaccagcagcggtatcgccccgcgcagccggggccgcggcagttcgccgtgatcctcctccgcggggggagcaacctctcggcgccgccggccacggaggtcgaggcactcgtcgccggcctgccctcccctcccccggacagcctgagcgtctcctcgtcgggccgccaggccgcgcgcctcgcgttccgctccccgcaggccgccgccgccgccgcgcgcgagctctggtcgctccgcctcgagggcctccacctcctcaccccggacgtctccgatcccgccctcgccgcgcacgccgcccccctcatcgcctccctcttcgccgcccacgccgcccgcctcgtcgactccgacctcgtctccctcacggccgcccgctcctccgagctcgcggcctccatccaggcggtgaagcgccgcctggcggggcacaatcgcatccgcgacttcgagcagctccaggcccagaagagaactctcaaggctgagaaggagttggtagatgctaaaatcgatgagtacaaagccgcgatgagatcgatacggcgtgcattgttgcgtgggacggaggatgacgaggaggcagaggaggaagggttggaggtgtttgggattgggggaggtggtgagatgaatttcgctaggctgcacatgataatgctgcgggaatgtagaaggcttaaggaggggctacccatctatgcttaccgcaggaacattctagatcacattttcgctaaccaggtgatgattttgattggggaaactggttctgggaagagcacacaattggttcagtatcttgctgactcaggtcttgctgctaatggttcaattgtctgtactcaaccccgaaaaattgctgctatatcattggcacatagagtagttgaagaaagcaatggttgctacggggacaactttgtgttgaattcaacctttttagatcatcaagatttcagttcaaagattatatataccacagacaactgccttttgcatcactgtatgaatgatatgggactagatggcatttcatatattattgttgatgaagcgcatgaacgaagcttgaacaccgatcttctcttagctttgattaagaagaaactgcttgataggctggatttgagacttatcataatgtctgctactgccgatgctaatagactcgctgaatatttttatggatgccaaacattttatgttaaagggcgaagttttcctgttgaaattaaatatgtccctgatatatcagaagaggcttccttcaataccgtgccaaaccatctgcgcggttcttgtgctactgcttcatatgtttacgatgttgtgaaaatggtaagcatcattcacaagaatgaagaagagggtgctatccttgctttcttgacttctcaactcgaagttgaatgggcatgtgaaaacttcagcgatgcagatgctgtggtacttccgatgcatggaaagctttcccatgtagagcaaagtctagttttcaagagctatcctgggaagagaaaaataatcttctgcacaaatattgctgaaacatcattgaccataaaagaagtgaagtatgttgttgattctggactggctaaggagagcagatttgtgcctagcagtggtctcaatgtactgaaagttaattggatctcccaaagttctgctaatcagcgtgctggccgagcaggtcgaactggagcggggaggtgttacaggctttactctgaatctgacttcagtatgatggaagtgcatcaagaacctgaaatccgcaaagttcatcttggcactgctgttctgagaatacttgcgctgggtattagggatgcacagaattttgaatttgttgatgccccaaacccagaagctattaatatggctgtaaagaatcttgaacaactgggtgctgtaaaatataaatgtgatggttttgagctgactgatactggtcgctacctagttaaattgggaatcgagccgaggcttgggaaaatcatgcttgattgctttggttttggtttgaggaaggaaggtgtagttctagctgctgttatggcaaattctagcagcatattttgtagagtgggcacagatgaggagaaatacaaagctgaccgtctaaaggtcccattctgtcatcaggatggagatctgttcactttactagctgtatataaagagtgggaggatgagcatgaaaacaggaatacgtggtgctggcagaatagcatcaatgccaagaccatgaggaggtgccaggaaacaatatcagaccttgagaattgtttaagacacgagctgaacatcattgtcccaagttactggtgttggaaccctgaggagtccaccgtgcatgataagttgctaaaaagaattattctcacatctctttctggtaatattgctatgttttctggacatgaaaggtttggttaccaggtgatttcaacggatcaggctgtgaaactacatccctcttgctcattgctcatttatgatagcaagcctgagtgggtggtgttcacagaaatcttgtcagtaccaaatcaatatttggtatgtgtaactgctattgatcctgatgctttgtgttcgattcaccccatgcctttgattcagcaactggagaagcttaaattgcaggtgaaggtaataagtggacttggatataacttgctgagaaaattttgtggaaaatctggccaaaatcagcagaagataatctcacttctccaagaagaattcagggatgaccgtgtgactgttgaagttgacttcagaaataaagaggttgtgctatttgccaaagaacaagacatagaaaaggtgtttggcatcgttaatgatgcattggagtgtgaagctcggatgttgaggaatgaatgccttgagaaaagtttgttttctggaaaacctggtgattgttctcttgccctatttggttctggtgctgaaataaagcatttggaacttgagaagaggtatctgaccgtagaggttttgcatcaaaatgctcatgagttgaatgacaaggagcttatttgcttggtggatactcttatctctggtgttgctaatttttataaactttatggaaatcttcaggtggcctcagatgaaacgaagtgggggaagtttacattcctcaatcctgaatatgctgaagatgctgtttcaaaattgaatgggatggaatttcatggttctccattgaaagtggttccagtatgctcttccagtaatcgaggattaccatttccagcagtgagagctaaagtatcttggccacttaagcaaagtcggggactcgcgctggtaacatgtgccagtggggaagctgaatttgttgtaaaggactgctttgctctgggagttggtggaaggtatatcaactgtgaggttagtacaagacatgagaattgcatttttgtcagaggaattccaatgcatgtaacagagccagaattgtatgatgcctttcgtagcacgacaacaaggaaaatcgttgatgtgcatttgctcaggggaacacccatagctgccccttctgcttccttgtgtgcagaagcactaaatagagaaatttcttccttcatgccaaagaaaatttttcctgcccaaaatttccgtgttgaggtgttaactccagaggagaatgattcggtgatgagagccactattacttttgatggaagtcttcatcgagaggctgcaagagcattggaacatcttcaaggaagtgttcttccatgctgtcttccttggcagacaatacaatgccagcatgtgtttcatagtactgtgtcctgtcaagtacgcgtgtataatgttatcagccaagcagttgcttctcttcttgagagcttccgaagccaaaaaggcgtgtcttacaatttggaaaagaatgaatatggtatattccgtgtcaagcttactgcaaacgccacaaaaacaatagcagacttgagaaggcctcttgagattttaatgaaaggcaaaacaataaaccatcctgatctgacactaagtacagttcagttgctcatgtcccgtgatggtgtagcagatttgaaatctgttgagcaagagactggcacttacattctgtatgacagacaaagtctaaatattaaagtctttggactccaagatcaggttgctgcagcagaggagaaattgatccatgcccttctacaactccgtgataagaaacctttggatattcgtcttcgtggccgtaacctacctccaaacttgatgaaggaaatgttaaaaaagttcggggctgatctggaaggattgaagagagaggtgcctgcagtagagcttcgattaaatttacgacaacatacactttacgttcgaggcagtaaagaagacaagcaaagggtggaagaaatgatctctgagctggtaaattctacaaagtacaatggcctgcttcaacttccattagagaatgcatgccctatttgcctgtgtgaggtagaagatccctttaagcttgaatcttgtgggcatgtgttttgtctgacttgcttggtggatcagtgtgaatctgctttgaaatcacatgatggtttccctctgtgttgcctcaaaaatgggtgcaagaagcagctccttgttgttgatttgagatctctcctatcgagcgagaaactggaagagctatttagagcctccttgagagcatttgttgcttctaatgcaggaaaatatcgtttctgtcctactcctgattgcccatccatttaccaagtggctgctgcagatgctgaaagcaaaccttttgtctgtggggcttgctttgtggagatctgcaacaagtgtcatcttgaatatcatcctttcatatcctgtgaggcatacaaagaatacaaggaagaccctgatgcaactctgcttgaatggcgcaaggggaaggagaatgtgaagcccccatttgtgttctga

SEQ ID NO: 12208 - DNA, 1875 bp, Oryza sativa
  Clone ID: TFbOSC401665j.C1.o10.fg
atggtgaccgacgccgaggaggtctccccgacggcgtcctcgtcggaattggagcaggaggacgatgacgatgactgctacctgagcgatcaggaggacgacgccttggaggagtccgtcctccaggtgctggaggacgaacgcgacgaggattgccattggtcctccacctccgtatgcccccccactatccatcgttttatcctcgtcgtatttgttgtccgagtcccaatcgcttcggttgttgatgggttccttcgattgcaggtgatcaccaaggaatccctcttggcggcgcagagggaggatcttaggaaggtgatggagttgctagggttgagagagcaccacgcgcggacgctgctcatccactacaggtgggatgtcgaaaggattttcgagctgcttgatcagaaggggagggacaggctcttctcggaggctggtatccctctccaacctgctaataatcccggctcgccctcctcaacggaggtaacctgcaatgtttgctatgacgatgtgcccctctcggacgcctccaagatggactgcggccacaactactgcaatgaatgctggacaggatatttcattgtgaagataaatgagggacaaagccgccgtatcaagtgcatggctctgaagtgcaatactatctgtgacgaagcaatagttcgtaagctagtaaatgcaaagcggccagatattgcagagcgctttgaaaggttcttgttggaatcttatattgaggacaatgatacagtcaagtggtgcccaagcacaccgcattgtggaaatgctatacgcgtcaaaggtgatattcactgtgaggtggaatgtacatgtggacgccagttttgttttaattgctcctcagaagcacattcaccatgttcctgtgtgatgtgggagctctggatcaagaaatgccgtgacgagtcagagaccgtgaattggataacagtaaatactaagccctgtcccaagtgccacaaacctgttgagaagaacggtggctgcaatctggttgcatgtatatgtgggcaagcattctgctggttatgcggtggtgctactggcagagatcacacatggtcaagtattagtggccacagttgtggtcgattcactgaagatcagtcaaagaagacagagcaagctaggagaaacctttatcggtacatgcactaccacaacagatacaaagctcacactgattctcttaagcaggaagcaaagcttaagggcgacatccaggggaagatttccatttctgaaaacaaggattccaagataaaagattactcttgggtgataaatggattaaacagacttttcaggtcaaggcgggttctttcatattcttatccttttgcattctacatgtttggtgatgagattttcaaggatgagatgacttctgatgaaagagaactaaagcaaaacctatttgaggaccaacaacaacaattagaattcaacgttgaaagactatctggtttccttgagagggattttcaaaattttagtgatgatgaggttatggatacaatgaagcatgtcatcaatctttccaatgtggttgatagactctgcaagcaaatgtatcagtgcattgagaatgatttgttgtatccactgcgtacgcctcataatattgctccatacaaatccaagggccttgacagggcctcagagctcaatgtttgttgggattcttctgaacaaggttcatctatttttggaaagcggcaacttggctcaagttctaataacaatgggcggcctcacaagcgagaaagaaatgatgcccatggtggggctgccctttttgacctcaatgtgccagctgaagtggcagacaagatatga

SEQ ID NO: 12209 - DNA, 1578 bp, Oryza sativa
  Clone ID: TFbOSC400502j.C1.o16.fg
atggagtccggctacagcgacgtcgacgacgactacttcggcgactccgacgaggattatggcgacgacggcgattacatggatgacgatggcgacgactatggtgggcaggtggtcgaggaaacggaggcgccggcgatggagaagacgtacgttgttctaaccgaggacgacgtacgcgcgcggcaggaggaggacattgccaaggtgtgcgaggtgctctcgctctcgccgggcgccgccgccgtcctcctccggctgtacaggtggagggccgtcctgctccaggaggagtggttcctggacgagcgccgcatacgcgacgccgccggcctcctgccggcggacggcggcggcggcgaggtgcccgcgcgggtcaaccggcggcggctcacctgcgccatctgcttcgacgtgttcgacaccggcgggatgaggtcggcggggtgctcccacttctactgcgtctcctgctggcgcgggtacgtccgcgcggcggtgggcgacggcgcgcggtgcctgtcgctccggtgcccggatccgtcgtgcccggcggccgtcgtgcgcgagctggtcgacgcggtggccgacggcgaggacagggagcggttcggctggttcgcgctccggtcgtacgtggaggagagcgccgggatgaggtggtgcccggggcccgggtgcagccgcgccgtggagttcgtgggcggcggcgacggcgaggagagcagcgaggtgttctgctcgtgcgggcacgggctgtgctggcggtgcggcgaggaggcgcaccggccggtgtcgtgcaagacggtggcgaagtgggtggagaagaacagctcggagtcggagacggcgacgtggctgctcgcccacacaaagcactgccccaagtgccggctgccgatcgagaagaacctcgggtgcatgcacatgacatgccggccgccgtgcctccacgagttctgctggatctgcctcaagccatggcacggccacgcggcgtgctcccggtaccagcccaacggcacggtggtggcgctggccggcgccaacgccgacgacgagcggcggcggcaggccaaggcgtccctggacaggtacctctaccactacgagcggtgggacgccaacctcaagtcgctgcgcgtggcgctccgcgacatggagagcctggagcggtcggagctggaggcgatggcctcggcggcgggcgtgccggcgacggagatgggcttcgtgacggaggcgtacgagcaggtcggcgaggggcggcgggtgctcggctgggcgcacgcctacggctactacctcgacccggaccgcgacttcaccaagcggcagctgttcgagtacctgcaggaggacgccaacgcgtcgctggagcggctgcacggctgcgccgagagggagaggagggagctcttcgccgccggcgccgacgacaaggccgccgtcgacttcgacaagtacagggcgtacagggagaagctcgccgggctcaccagggtgacgcggcaatactttgggaacctcgtcaaagcgttcgagaccgacctggccgaggtctcctcctctagttaa

SEQ ID NO: 12210 - DNA, 1199 bp, Oryza sativa
  Clone ID: TFbOSC100716j.C1.o1.fg
gttggacggagtacttcgctgcggcggtgagcgacggcagcaagcagatgaggtgcatggaggtgaagtgcacggcgatctgcgacgaggcggtggtgcggctgctgctgcacgggaagcaccccggcgcggcggcgcggctggaccgccgcctcctggaggcgtgcgtggaggccagcgacgcggtgcggtggtgccccagcgcgccgcactgcgggcgcgccatccgggtggacggcgggggcggcggcgaggagcggtacgccgaggtgtcgtgcccctgcggcgccgtcttctgcttccgctgcggcggcggcgcgcactcgccgtgcccgtgccccatgtgggacaagtggggcgccatgcgcggcggcggcgaggtcgacaacctcaagtggatcgtcgccaacaccaagagctgccccaagtgctccaagcccatcgagaagaacggcggctgcaaccatgtcacttgcacctgcggccagcatctctgctacgcgtgcggcgcggcgacggggacgttgtacatgcacatctgcaaccgctacaaggaggagggcggcggcggcggcgtgaaggtggagatgaccgccggtgggcggcagcggctgcggttcatgcactactacgagcggttcgagatccacaccgagtcgtacaaggaggagcaggggaagctgggtccggccatcgacgctctggcgcggcggctggaggcggacgccacgctgccgtggtcgggcaccagggacgcccggtggccgtcggcggcgcaccggcggctgctgcggtgccggcaggtgctcccgcggtcgtacgtgctcgcctactacatgttcggcggcggcgcggcgacgcggcgcgagcgggaggaggcggcggcgcagaaccggttcgaggatttgcaggggcagctggagcaccacgtggaggtgctgtccaggacgctggcggcggcggcgcggccggccgacgcggcggaggtcgtgaaggcgaagcgcgacgccgacaacctcgcccgcgtcgtcgaggggctgtgcgccgggatgtaccggtgcgtccaggacgagctgctgccgctgctcgtcgagcccatgaacatcgccgcgtaccatccggacggcccggccatggccaaggagttcccgccggcgaccagcgtgaccggcggagcaccgccggcgacacgccactaa

SEQ ID NO: 12211 - DNA, 1722 bp, Oryza sativa
  Clone ID: TFbOSC401963j.C1.o4.fg
atggactccgacgccgagatgcccatgtccagcgacgaagagatgttggatgacgaggactattacgactacagtgatgacatgggtgaggacgatgatgggagcggcggcgggggcgggggagatagcgatggggaggaggaggaggagggggatgaggagctggtgggcggcgactacgagggccgcgaggcggaggggagcgacgaggtggtgtcccgccgcgagcagagatacattgtattaactgaaaaggatataaatgagcgtcaagaggaagatataggcaaggtatctgctgtactatcgattcgaagggaggaggcgtgtgttcttcttcatcactacaaatggaacatcagcaagttaagcgatgaatggtttgcggatgaagaaaaagttcgtgatattgttggattacttttaaatggaattgatcttcctaactctagaaagctaacttgtggaatatgttttgaagggtattcttctgatgtgatgagttctgctgattgtgatcatttttattgccatgaatgctgggaaggttatattagtgctgcaataagtgatggtccaggatgtttgtcattgcgatgccctgatccatcttgtggtgctatggttcttcagaacatgattaataagttagctaaagatgatgataaagtgagatatgcacgatttatcttacgtgcatatgttgaagatagcaagaagtgcacggaggaagctcatcgaccagtgaactgtgagactgtttctaggtggatattaaagaatagcgcagaatctgaaaatatgaactggatactggctaattctaagccgtgcccaaaatgcaaacgaccaatagagaaaaaccagggatgcatgcatatgacttgcactccaccttgcaaatttgagttctgctggttatgtctgggttcatgggctgaacatggggagagaactggtggattttacgcttgtaatcgctatgaatcagcaaagaaggagggagtttatgatgagactgaagcaaggagggaaagagccaaaaattcacttgagagatacatgcattactatgagcgctgggcatctaatcagacgtcgaggcagaaggcacaagcagatctgcaaaaggcagaaaaggaacaacttgcaaaattaacagatgtttttggaataccggagacccaactgaagttcataattgaagcttggtcacagattattgaatgcaggcgggtactcaaatggacatatgcttatggctattatctggacgacaaggtcaagagcgaatttttcgagtacctgcaaggtgaagctgagtctggtctggagcgtcttcaccaatgtgctgagaaagacctgcaatcatttttgactgtgagatctgataatactgaacctgcaccatcaattgctgaattcggtgacttccgggtgaagcttgcggggctgacaagtgtgactcggaattattttgagaaccttgttcaagcactggaggctggcttggaggatgtacactctactgcccagggtaccacatcaagcaatgccaccaacatcccctccaagaaagcagtcactaaaggcaaaacaaagaagcagcttcctagaacatcttcggacaactcagatgaaggctggccttgtgagcgctgcacgtttattaacccttcatcggtggatgcatgcagcgtctgcgataagcatagatactag

SEQ ID NO: 12212 - DNA, 1872 bp, Oryza sativa
  Clone ID: TFbOSC401022j.C1.o16.fg
atgtcgagcgacgacgaggagtgcttctacgactacgaggaggaggaggaggaggaggaggagccgggctgggacgacggcggcggcggcgacaccatgctggtcgaggaggaagcggcgttgccggagcgccccgtcgattgctgggtgagtaaagccatcccgaccatactcacaagcctaaaaaatcccatccacgctgatgttatgcataaaaacattcacaggccattacagaagagtctcttccggctgcacagcttgcagcttgtgctacagcaattagtactagtaacaaattacattgtgtttcttgacatgctcgatctacctgcgctgtatgtatgtacacagcaacaagacctgtccatggtgatgaacctgctctacataaagcagcaccaagctcgcgccctcctcatccaccaccgctggaagatggaatccatcctggaccacttcgacaggaagggccgagaccgcatgctcagggagaccggcgtcgtgatccagcagcaggcggaggagaagaacggtggcggcatggccatggcggcgtcgccgtcgccgccgccgcgccccagaagcagcgtgacctgctacgtgtgcttcgaggatgtctcatcggacgctgtctccaccatggattgcggacactgcttctgcaatgactgttggacggagcacttcttcgcgtgcgtgaacggcgggcagaagcagatccggtgcatggcggtcgggtgcgcggccgtctgcgacgaggacgtggcgcagcgcctcctcggcggcaggtaccccggcgcggcgcggcggctgcgcggcgccctcctcgcgtcgtacgtggaggacaacgcggcggcgcggtggtgccccagcgcgccgcactgcgggcgcgccgtccgcgtggacggcggcggcgggcggtggtgctgcgaggtgtcgtgcccgtgcggcgccagcttctgcttcggctgcgccgcgccggcgcactcgccgtgcccgtgcgccatgtgggagcgctgggaggccaagtgccgcggcgaatccatgaacgtggactggatcctcgccaacaccaagagctgccccaagtgctccaagcccatcgagaagaacggcggctgcaaccatgtccgctgcaagtgcggccagtgtctctgctggctgtgcggcgcggccaccgggctggcgcacaactggaccagcatcgacgggcacagctgcaaccgctacgacgacgcggcggagaagaggaaggtggacggcgcgaggcgcaaggtgctccggtacgcgcactactacgagcggtacaaggcccacggcgactcgcgcagggcggaggcggagaagctgggcccggccatcgaggcgcgggctcggcggctgcgcgaggaccccgacccggccacggcgccggccagcggcgacgccgccgaggcgctcgccgccgcgcaccgcgcgctgctcgcctcccgcgacgtcctctcgcggtcctacgccttcgcctaccacatgttcggcggcgaggagcggacgttgaaagcggcggcgccggagtcggaggtggcgacggcgcaggcgctgttcgaggaccaccaggagatggcggagaggcacgtggagaagctgtcggggctgctggcggcggacgcgcctccggcgccggccacggcgggggacgcggccctgcggcgggcgaagcaggacgccgtggcgctcaccgccgtggtggagaagcactgcggcgagatgcacaagtgcatccaggacgagctgctgcccatgctcgtggagcccatgtccatcgccgcctaccgccgcgacggccctatcaaggccaaggactttccaacctgtggtggcgcgtcgtga

SEQ ID NO: 12213 - DNA, 1623 bp, Oryza sativa
  Clone ID: TFbOSC401022j.C1.o14.fg
atggccagcgaccgccgctactactacttcgaagaagacgatggcgatggcgaggaggaggtggagtggctggcgatggaggccgacgaggacgacgtcggcctgctcgaggaggacgaccttcacctgcggcttcccgacgaccgccccgcggattgctgggccatcacacaagagtcacttcctgctgcccagcaacaagacctgtctatggtaatgaacttgctcaacataaagcagcaccttgcacgcacactccttatccaccaccggtggaagatgcattgcatttatgatcaccttgacagaaaggggcgggaccgcatgctcagtgaggcatgcattattttgccgaagaatagcatgtcagcagctagctcaacaagtgttacctgcaatgtgtgttttgaggacttctcaatgactgatgtctcgaccatggactgtgggcattgcttctgcaatgactgttggacagagcacttctttgcatccattaatactggcaacaagcagattcggtgcatggaggttaagtgcaaggccatttgtgatgaggacattgtgcgccgcctcctcagtctgaagtaccctgctgcatctaagcgcttcgatctcctcctacttgagtcttaccttgaggacaatgactcagtgaagtggtgccccagtgccccacactgtggccgcgcaatccaggtaggcaccggcgagaggtactgcgaggtcgcttgcccctgtggtgtcagcttctgcttcaactgtgcagggcaggtgcactcgccttgcccatgtgccatatgggagaagtggaaagctaagggccatggagactcggatagcgtcaagtggattcttgccaacaccaagagctgccccaagtgctccaagcccatcgagaagaacggtggctgcaaccttgtccattgcaagtgcggccagtgtctatgctggctctgtggtgggcctaccgggagggagcacacttgggatagcatctccggccacagctgcaaccgctacaaggaggaaaacggcgacaaggtggacaccagcagacagcagatgcagcggtacacgcactactgggaccgttacaacatccacgccggctcgtacaaggtggagcagaaggatcttgggcctgccgtcgaggagcaggtgaagaagctggagtcgaacctaacaggtccgaagatgaactgggacggtagctggctcgccatggcgtaccaatccctgctcgcatcgcggcaggtgctgtcgcggtcgtacgccttcgcctactacatgtttggcggcggcgaggtgaagacgcacccgtcggagcgggcgagcctcgccgtggcgcagaacctcttcgaggaccggcaggagcagctggagcgccacgttgagcatctctccaaggagctcgccacggacttgctggggctgccggaggaggagatcgtcctgaagaaggtggagattgccaacctcgccaagatcgtccaggcaatctgcgggcagttgtacaggtgcatccaggacgaactcctgccactgctcgtccagcccatgaacattgccgcgtaccagccggacggccctgacaaggccaaggagttcatcggggcttga

SEQ ID NO: 12214 - DNA, 1588 bp, Oryza sativa
  Clone ID: TFbOSC400944j.C1.o13.np
cggcgacggcgctgctgcacgagatgctgctccgggctcgccgggatggggaggagccggagctgtcggacgagcagctgcgctccaacgaccagctccaggaagacgagatgctggcactagaggcaatttatggagacaatataagcattttaagtgcaaaggatggactacgttgtttccaggtccatgtgcactgggaaattcctgatggtaccagcatatccacagagctatcccagggtgataaccatgaccaaaatagttgattctttgacacattcagtgtccagcacttggctccaatttcattgacatgccttatgcctccatcatacccaagccatcgcgctccatactttactctcagttcacagtggttggatgccgtgaaagtttcctccctttgtctcatgctggacacaatctggacacagcaacttggacaggaagttgtttatgcgtgggtgcaatggctgcagagctctgcgctttctcatcttggttttgatgatgggatactcatacaacagcctggtagtatgatgggtcctgtggatgttcgtgctgttgcagagattgcgtctgtagagtctgttgcacaatggttaatcagctacaatgaggagcaatgccatgaatcttttctaagtggccttcatgactgcatgatttgtttcaccgagtacgggggtattgattttattacacttccatgccagcattacttttgtcggaggtgtatggaaacgtactcaaggatgcatgtcacagaaggaacagtgctgaaattgttgtgtcctaacgacaagtgcgggggcatcattcctccaagtctattaaaaaggttgctaggagatacagattttgaacgctgggaaagattgatacttcagaagactctagactcaatgtcagacttggcttactgtccaagatgtggagcagcttgcctggaagacgaggagaacaatgcccagtgccccaagtgcttcttcagcttctgcgcccgctgcagagatcgccgtcacataggggagaagtgcatgactatagaagaaaagctaaattccttacaggatcgcaccgtggtgccttttttaagcaaagacagctttgccagtaaaatgaacttgtcaaatgaaatatccagcatcaaggaagtgctccgttcttctgttcgatgtccacattgtggtactgccatctcccgagtatcaggctgcaaccatatgttatgcagtaactgtaggcaatcgttctgctatggctgtggcaaggcagagaatcatggccattcaaggtacattcttcttagatctcaaatgagccctgcagataccaggagaatctggcaacgaagaagaatccaaccgtcctcattgaggaggtgaagaaagaactggagggggaactgtcaagacagcatccgtgcccaaattgtcgccaaccaaatcctaagatgggaaacaacagccatatgttctgctgggcatgccaggttcattactgtgcgcagtgccacaggatggttcggaagagctccgagcattatggtccccgtggatgcaagcagcacagtgtcgac

SEQ ID NO: 12215 - DNA, 627 bp, Oryza sativa
  Clone ID: TFbOSC417464j.C1.o9.fg
atggcgcgaggcaaggtgcagctccgtcgcatcgagaacccggttcaccgtcaggtcaccttctgcaagcgccgtgccggcctgctgaagaaggccagggagctctccatcctctgcgaggccgacatcggcatcatcatcttctccgcccacggcaagctctacgacctcgccaccaccggaaccatggaggagctgatcgagaggtacaagagtgctagtggcgaacaggccaacgcctgcggcgaccagagaatggacccaaaacaggaggcaatggtgctcaaacaagaaatcaatctactgcagaagggcctgaggtacatctatgggaacagggcaaatgaacacatgactgttgaagagctgaatgccctagagaggtacttagagatatggatgtacaacattcgctccgcaaaggaaggcatgttgaaagctgctaacgaaattctccaagaaaagatagtagaacagaatggtctgatcgacgtaggcatgatggtagcagatcaacagaatgggcattttagtacagtcccactgttagaagagatcactaacccactgactatactgagtggctattctacttgtaggggctcggagatgggctattccttctaa

SEQ ID NO: 12216 - DNA, 483 bp, Oryza sativa
  Clone ID: TFbOSC401315j.C1.o2.fg
atggagcggatcctcgcaacggcggcggcgacggcgtgctcctgcacaaggtttgggcttggtaacagattagtggtcactagtgaggaccagtcacctttgacggaggaccgtcactgccatctcatgggagaggatcttgaatctctgaatctcaaagagctgcagcaactggagaagcagctgaaaaatacatcgaaacatatcagatccagaaaggatgaggagaagcacatgctcgccgtacagccgataggccttgacggcggacggcagcgcacacagccgattggaggagagaggagacgccatccactcaccatgagcctggatctggcgctgttggcgccgaaggccactggatctggagtacccaaactcgggacagctagatccacagccccccgagctcgggttgtccaaacttggagccctagccggcttgtggtcaccggcgttgcacctccacaccgttcgccatga

SEQ ID NO: 12217 - DNA, 483 bp, Oryza sativa
  Clone ID: TFbOSC900305j.C1.o2.fg
atggagcggatcctcgcaacggcggcggcgacggcgtgctcctgcacaaggtttgggcttggtaacagattagtggtcactagtgaggaccagtcacctttgacggaggaccgtcactgccatctcatgggagaggatcttgaatctctgaatctcaaagagctgcagcaactggagaagcagctgaaaaatacatcgaaacatatcagatccagaaaggatgaggagaagcacatgctcgccgtacagccgataggccttgacggcggacggcagcgcacacagccgattggaggagagaggagacgccatccactcaccatgagcctggatctggcgctgttggcgccggaggccactggatctggagtacccaaactcgggacagctagatccacagccccccgagctcgggttgtccaaacttggagccctagccggcttgtggtcaccggcgttgcacctccacaccgttcgccatga

SEQ ID NO: 12218 - DNA, 333 bp, Oryza sativa
  Clone ID: TFbOSC1354j.C1.o1.fg
atggagctgtttcaccgttatgagatcaccaccagaaacactcggcttcaggagacaaaccgtgatgatgagcaaatggtcatggagatcacaaggctaaggaatgagatcgaccagctcgaagccagtttaaggaggcaaactggagaagacctgtcatctgtgtccacagtggatgagctcagccagctgcagctgcagcttgaatcatctctcagcaaagttcatgcgaggaaggatgagctcatgagccagcagctggaggatatgcgtcgcatggtacactactcccttattgtagtcgcagttgtggtttttgctgatgagtggtga

SEQ ID NO: 12219 - DNA, 648 bp, Oryza sativa
  Clone ID: TFbOSC409438j.C1.o1.fg
atgcgcaaaacaaccaaaagggcaatattcaatccaccgaacacccttcaggataattcgtatacaaaacttgcagttctggcaaagggaggcagcaagcttgagacaacaactgcacagcttgcaagaaaatcatcgaaaaacagaactgagcacccatcaaaggcggacagaccaaatttacaaaggagagtgaatatcacattttcttcacctgtgctttctgcctggcagttgatggggcaagatctttctggattgggtgtcaaggaactgcaaactctagaaaatcagctagaaatgagcatacgctgcatccggacaaaaaaggaccagctcatgattgatgaaatccacgaactgaatcgaaagggaagtctcatccaccaagaaaacatggaactgtacagaaagatagatgatttcacaggatatacgcttcattatatgatgacagctaatctctctcctcagctctatgagacaggggcagaaaatgaagcgaatcgagattcaacaactccatacaactttgcggttatcgaggaagccaacactcctgctcgtcttgaactcaatcccccaagccaacaaaatgatgctgagcaaaccacacctcctaaactagggctccaattgcatccatga

SEQ ID NO: 12220 - DNA, 483 bp, Oryza sativa
  Clone ID: TFbOSC20932j.C1.o1.fg
atgcacaaatgcagcgtgaaggaaactattgagaggtacaagaaagccaacagtgacacctccaacgccagtacagttgcagagatcaatgcccagcactaccagcaggaagctgctaagctgaagcaacagatcaccaacctgcagaactccaacaggaccctagtaggtgataatatcaccaccatgaaccacagagaacttaagcagctggaaggcagactggacaaaggcctaggaaagattagagcacggaaggaaacggagctgcagaatgacaacatgtacttaaagagcaaagttgctgagagtgaaagaggactgcaaacagtgaacatgatgggttcagcatctacgagcgagtacgtgcaaaatatgatccattatgatccaagaaacttcctgcaattcaacatcatgcatcagcctcagtattatcctgaacaggaggaccgaaaggcctttatgtcagatgaaagataa

SEQ ID NO: 12221 - DNA, 501 bp, Oryza sativa
  Clone ID: TFbOSC20980j.C1.o1.fg
atgtcctcggtaaagcgcaacaactgtagcagcgtgaaggaaactattgagaggtacaagaaagccaacagtgacacctccaacgccagtacagttgcagagatcaatgcccagcactaccagcaggaagctgctaagctgaagcaacagatcaccaacctgcagaactccaacaggaccctagtaggtgataatatcaccaccatgaaccacagagaacttaagcagctggaaggcagactggacaaaggcctaggaaagattagagcacggaaggaaacggagctgcagaatgacaacatgtacttaaagagcaaagttgctgagagtgaaagaggactgcaaacagtgaacatgatgggttcagcatctacgagcgagtacgtgcaaaatatgatccattatgatccaagaaacttcctgcaattcaacatcatgcatcagcctcagtattatcctgaacaggaggaccgaaaggcctttatgtcagatgaaagataa

SEQ ID NO: 12222 - DNA, 636 bp, Oryza sativa
  Clone ID: TFbOSC900209j.C1.o7.fg
atgagggggaagggatgctggagcaaaggagaggagggtcaagaggagaagataaaaattaaggagaggatggaggagagaaaaaggtgcagcgtatctagagaaagtagtttctgcacatctgatacccacgccataggtatatttctagctcatttcaggactacccaattttatgaggtggatggtttcaatctttgtttggagttctggcaagcagaggcggaacgtttaaaacagcaactgcataacttagaaggaagtcaaaggcagttgttggcacatgatctctctggccttgaatggaatgacctgaagagtctagaaaatcaactggagacgagcttgcataacgttcgtctaaagaaggacaaaatcatggtcgaacaaattcaagaattgagaaagaaggagaacatcatgcaccgagaaaacatggaactccaccgtgagttcaacatgatccgtcaagatagtgtgaatttccagcgaaaggtttatggaaaacaagatgtaaatggaggacagggaagttctgttactcagaacaccaatactcaggatgatgcagacgaaattcgtcttgagctaagccaaccacaggttccggatgagaaaccagaagcagcagcataa

SEQ ID NO: 12223 - DNA, 858 bp, Oryza sativa
  Clone ID: TFbOSC417635j.C1.o14.fg
atggggaggggcaggattgagatcaagaggatcgagaacacgacaagccgccaggtgaccttctgcaagcgccgcaacggacttctcaagaaggcgtatgagctctccgtcctctgcgatgccgaggtggctctcatcgtcttctccagccgtggccgcctctacgagtactccaacaacaacaattacttgaaaaaggactattctgttctaattttcttagtcttatgtgtgaaggctacaattgacaggtacaagaaggcgcatgcttgtggctcaacttctggtgcacctctcatagaggtcaatgctcagcaatactaccagcaggagtctgccaaactgcgccaccagattcagatgctgcaaaacaccaacaagcacctggttggcgataatgtgagcaacctgtcactgaaggagctgaagcaacttgaaagccgcctggagaaaggcatttcaaagatcagagccaggaagaatgaactgctggcttcagagatcaattacatggccaaaagggagattgagcttcagaacgacaacatggacctcagaaccaagattgctgaggaggagcagcagctgcagcaggtgacggtggcccggtcggccgccatggagctgcaggctgcggcggcggcgcagcagcagcagcagaatccgttcgcggtggcggcggcgcagctggacatgaagtgcttcttcccgttgaacctgttcgaggcggcggcgcaggtgcaggccgtggcggcgcagcgccagcagatcatccccaccgagctcaacctcggctaccaccaccaccttgccattcccggcgccgccgccgccgacgcgccgcctcctcacttctga

SEQ ID NO: 12224 - DNA, 364 bp, Oryza sativa
  Clone ID: TFbOSC21206j.C1.o1.fg
gcagatgagaggagaggagttgcacaggctgaatgtggaacagctgcaggagctagagaagagcctcgagtccggtctaggctctgttctcaagaccaagagcaagaaaattctggatgagatcgatggactggaacgaaagaggatgcaattgatagaggagaatttaaggctgaaggagcaagtgtccaggatgtcaagaatggaggagatgcagcctgggcctgattcagaaatcgtgtacgaggaagggcagtcgtctgaatctgtcaccaatgcttcttacccgcgacctccacccgacaacgactacagctctgatacatctctcaggctcgggttgtcactcttcagctccaagtga

SEQ ID NO: 12225 - DNA, 768 bp, Oryza sativa
  Clone ID: TFbOSC401003j.C1.o2.fg
atggggagagggaagattgccatcaagaggatcgacaacacgatgaaccggcaggtgaccttctcgaagcggcgcggcgggctgatgaagaaggcccgggagctggccatcctctgcgacgccgacgtcggcctcattgtcttctcctgcaccggccgcctctacgacttctccagctcaagcatgaaatcaataatagagcggtaccaggaggcaggagaggagcattgtcggttgctgaacccaatgtcagaggctaagttttggcagcgggaggttacaactttgaggcagcaagtgcaaaacttacaccacaacaacagtttttacttgtctgcaaactatttaaacgaaaacagtgcatactactttattaggatcaaccaatatgaaggtgaaaatgaaatcttttttaaggcccatgtggaaattcatgtttcaaataaaaggcaacttttgggagaggaaatctccaacttcacagttagagatctgcagcttctccagaaccaagttgagatgagcctacattccataagaaataaaaaggggtctcttgttcaaaaggagaacagtgaacttcgcaagaagttcaacattgctcatcaacgcaacatagaattacacaagaagcttaactctggagaaagcacgtcaagtgagcaagttaccagaagctcaaaggatcccggagaatcgagtacaccccgtgattcacgtgtgtgtattgaccttgaattgagtcaaaaagaagttgaagatgaataa

SEQ ID NO: 12226 - DNA, 678 bp, Oryza sativa
  Clone ID: TFbOSC401545j.C1.o6.fg
atggggcgagggaaagtagagctgaagcggatcgagaacaagataagccggcaggtgacgttcgcgaagaggaggaacgggctgctgaagaaggcgtacgagctgtccgtgctctgcgacgccgaggtcgccctcatcatcttctccacccgcggccgcctcttcgagttctccacctcctcctgtatgtacaagacactggagcgataccgcagttgcaactacaaccttaactcatgtgaagcatctgctgcactggaaactgaactaagcaattaccaagagtacttaaagttaaagacaagagttgagttcctacaaacaactcagagaaatcttcttggcgaggacttggttccacttagcttgaaggagctcgagcaacttgagaaccagatcgagatatccctcatgaatatcaggtcatcaaagaatcaacagttgcttgatcaagtatttgagctcaaacgtaaggaacaacaacttcaagatgctaataaagacttaaaaaggaagatacaagaaactagtggagaaaatatgcttcatatatcttgccaagatgtagggcccagtggccatgctagtgaagctaaccaagagtttctccatcatgcaatttgtgacccttccctgcatatagggtatcaagcttacatggatcacctcaaccaatga

SEQ ID NO: 12227 - DNA, 720 bp, Oryza sativa
  Clone ID: TFbOSC410931j.C1.o4.np
atggggagggggaagattgtgatccgccggatcgacaactcgacgagccggcaggtgacgttctcgaagcggaggaacgggatcttcaagaaggccaaggagctggccatcctctgcgacgccgaggtcggcctcatgatcttctccagcaccggccgcctctacgagtactccagcaccagcatgaagtcagttatagatcggtatggcaagtccaaggatgagcagcaagccgtcgcaaatcccaactcggagcttaagttttggcaaagggaggcagcaagcttgagacaacaactgcacaacttgcaagaaaatcatcggcagttgatgggcgaagatctatctgggctgaatgttaaggaattgcaatctctagagaatcagctggaaataagtctacgtagtgtccgtacaaagaaggaccacgtcttgattgatgaaattcatgaactgaatcggaagggaagtctagttcaccaagaaaacatggaattatacaagaagatcagtttaattcgtcaagaaaatgctgagttatataagaagatctacgagactgaaggaccaagtgaagtcaatcgggattcaccaactccttacaattttgcagtaattgaaaaaacaaatgttcctgtgcaacttggactcagcacactaccacaacatagtgacgccgaacaatcaactgctcctaagctagggtaacacttagctcta

SEQ ID NO: 12228 - DNA, 561 bp, Oryza sativa
  Clone ID: TFbOSC400415j.C1.o2.fg
atggggaggggcaagatcgagatcaagcggatcgagaacgcgaccaacaggcaggtgacctactcgaagcgccgcacggggatcatgaagaaggccagggagctcaccgtgctctgcgacgcccaggtcgccatcatcatgttctcctccaccggcaacatcaaggggatctttgaccgctaccagcaagccatcggcaccagcctttggatcgagcagcaaaggatgggagaagatctggacgggctggagttcgacgagctgcgcggtcttgagcaaaatgtcgatgccgccctcaaggagtatcatgtgatcaccacacagactgaaacctacaagaaaaaggtgaagcactcctacgaggcgtacgagactctgcagcaggagctggggttgcgcgaggagccggcgttcgggttcgtggacaacaccggcggcgggtgggacggcggcgccggcgccggcgcggcggcggacatgttcgccttccgcgtggtgcccagccagcccaacctgcacggcatggcctacggcggcaaccacgacctgcgcctcggttga

SEQ ID NO: 12229 - DNA, 858 bp, Oryza sativa
  Clone ID: TFbOSC404997j.C1.o2.fg
atggcagagaaaaagaagaagaagaagaagaagaagccgcaatcactcctagtccttacaagctggagatcgatcgggatggggaggggtcgggtggagctgaagaggatcgagaacaagatcaaccggcaggtgacgttcgccaagcgcaggaatggcctgctcaagaaggcgtacgagctctccgtcctctgcgacgccgaggtcgccctcatcatcttctccaaccgcggcaagctctacgagttctgcagcacccagagcatgactaaaacgcttgagaagtatcagaaatgcagttacgcaggacccgaaacagctgtccaaaatagagaaagtgagtactacaaatctaaacataggctgtgtttagttcggtccaaagtttggaatttggttaaaattagagacgatgtgactgaaaagttgtgtatgtatgaaagaaatttgctgggtgaagatcttgattcattaggcataaaagagctcgagagcctagagaagcagcttgattcatccctgaagcacgtcagaactacaaggacaaaacatctggttgaccaactgacggagcttcagagaaaggaacaaatggtttctgaagcaaatagatgccttaggagaaaactggaggaaagcaaccatgttcgcgggcagcaagtgtgggagcagggctgcaacttaattggctatgaacgtcagcctgaagtgcagcagcctcttcacggcggcaatgggttcttccatccacttgatgctgctggtgaacccacccttcagattgggtaccctgcagagcatcatgaggcgatgaacagtgcgtgcatgaacacctacatgcccccatggctaccatga

SEQ ID NO: 12230 - DNA, 750 bp, Oryza sativa
  Clone ID: TFbOSC416737j.C1.o14.fg
atggggaggggaagggttgagctgaagcgcatcgagaacaagatcaaccggcaggtcaccttctccaagcgccgcaacggcctcctcaagaaggcgtacgagctctccgtgctctgcgacgcggaggtggcgctcatcatcttctccagccgtggcaagctgtacgaattcggtagcgccggaataaacaagacattggaaaagtacaatagttgctgttacaacgctcaaggttcaaatagtgctcttgctggtggtgaacatcagagctggtaccaagagatgtcaaggctcaagactaagcttgaatgtctccaacgctctcagaggcacatgcttggtgaagatcttggaccattgagcataaaggaactgcagcagctggagaagcaacttgagtactcactgtcacaggctcgacaacgaaagacacaaatcatgatggagcaggtcgacgatcttcgccggaaggaacgccagcttggagagctcaataagcaactgaaaaacaagctagaagctgaagccgatagcagcaactgcagatcagccatccaggattcctgggtccatggcaccgtcgtcagtggcggcagagtgctgaatgctcaaccaccaccagatattgactgtgagcctactctgcaaattgggtactatcaatttgtccgtcctgaggcggccaatccaagaagcaatggaggaggaggggatcagaacaacaactttgtgatgggatggcccctctga

SEQ ID NO: 12231 - DNA, 765 bp, Oryza sativa
  Clone ID: TFbOSC100382j.C1.o4.fg
atggggaggggaagagttgagctgaagcgcatcgagaacaagatcaacaggcaggtcaccttctccaagcgccgcaacggcctcctcaagaaggcctacgagctgtccgttctctgcgacgccgaggtcgcgctcatcatcttctccagccgcggcaagctctacgagttcggcagcgccggttgtttcgtactagctcaacttggagatcttttcattatttgcctagttggtggcataacaaagactttagaaaggtaccaacattgttgctacaatgctcaagattccaacaatgcactttctgaaacccagagttggtaccatgaaatgtcaaagttgaaagcaaaatttgaagctttgcagcgcactcaaaggcacttgcttggggaggatcttggaccactcagcgtcaaagaattgcagcagctggagaaacagcttgaatgtgcactatcacaggcgagacagagaaagacgcaactgatgatggaacaagtggaggaacttcgcagaaagctcgaggttgaaggttccaccagcaactacagagccatgcagcaagcctcctgggctcagggcgccgtggtggagaatggcgccgcatacgtgcagccgccgccacactccgcggccatggactctgaacccaccttgcaaattgggtatcctcatcaatttgtgcctgctgaagcaaacactattcagaggagcactgcccctgcaggtgcagagaacaacttcatgctgggatgggttctttga

SEQ ID NO: 12232 - DNA, 783 bp, Oryza sativa
  Clone ID: TFbOSC401807j.C1.o25.fg
atggggcgcggcaagatcgagatcaagaggatcgagaacgcgacgaacaggcaggtgacattctcgaagaggcggggagggctactgaagaaggcgaacgagctcgccgtgctctgcgacgcccgcgtcggcgtcgtcatcttctccagcaccggcaagatgttcgagtactgcagccctacctgcagtttgagggaactcatcgagcattaccagaccgtcaccaacactcatttcgaggagatcaaccacgatcagcaaatatttgtggagatgactcggatgaggaacgagatggagaagctggacggtggcatcaggaggttcaccggcgacgacctctccaacctcacgctcgccgacatcaacgatctcgagcagcagctcgaattctccgtcaccaaagtccgtgcgagaaagcatcagctcctgaaccagcagctggacaaccttcgtcgcaaggagcacatcctggaagaccagaacagcttcctgtgccgcatgatcaacgagaaccatcatcaggcggcggtgggcggcggcgacgtgaaggcgatggtggagatggcgccggtgctgtcgatgctgacggcggcgccggcgtactacggcgaggagtcgtcgagcaccgcgctgcagctcaccccgccgctgcacgccgtcgacgccgccgccgccgccgggttccggctgcagccgacgcagcccaacctgcaggaccccggctgcagcagcagcagcttccatgccgccgccgccggccacggcctgcagctgtggtaa

SEQ ID NO: 12233 - DNA, 807 bp, Oryza sativa
  Clone ID: TFbOSC403824j.C1.o6.fg
atggggagagggccggtgcagctgcggcggatcgagaacaagataaacaggcaggtgaccttctccaagcggaggaacgggctgctgaagaaggcgcacgagatctccgtgctctgtgacgccgacgtcgcgctcatcgtcttctccaccaagggcaagctctacgagttctccagccactccagtatggaagggatccttgaacgctaccagcgttactcgtttgatgaaagagccgtactggagccaaatactgaggaccaggaaaactggggtgatgaatatggaattttgaagtccaaactggatgcacttcagaagagccaaaggcaactcttaggtgaacaattggacacactaacaataaaagaactccagcaattggaacatcaactggaatattctctgaagcatataagatcaaaaaagaatcagcttctgtttgaatcaatttctgagcttcagaagaaggaaaagtcacttaaaaaccagaataatgttctgcaaaagatcactacaaaagctgtattggaggtcaaacccttttgtctacattcttcggagcagctcatggagacagaaaaggagaaaaacaatgctataataaacactaaccgggaggagcaaaatggagcaacaccaagcacatcatcaccaacaccagtgacggctccagatcccatcccgacaacaaataacagtcaaagccaaccaagaggatcaggggagtcagaagctcaaccgtctccggcacaagcaggcaacagcaagcttccgccatggatgctccggacaagtcacacatga

SEQ ID NO: 12234 - DNA, 963 bp, Oryza sativa
  Clone ID: TFbOSC400495j.C1.o47.fg
atggggcgggggaaggtgcagctgaagcggatagagaacaagatcaacaggcaggtgacgttctccaagaggaggaatggattgctgaagaaggcgcacgagatctccgtcctctgcgacgccgaggtcgccgccatcgtcttctcccccaagggcaagctctacgagtacgccactgactccagtctcacaatcttactgatcatcaaggagtctgtaaacacctatacgtacggctataggattatggggaggatggacaaaatccttgaacgttatgagcgctattcatatgctgaaaaggctcttatttcagctgaatccgagagtgagataactcttccccagttgacaacatgcactgcatccagaagtactcatggtatttgttttcagtactgtttgatgagtaaaactttgggaaattggtgccatgaatacaggaaacttaaggcaaagattgagaccatacaaaaatgtcacaaacacctcatgggagaggatctagaatccctgaatctcaaagaactccaacagctagagcagcagctggagagttcattgaagcacataatatcaagaaagagccaccttatgcttgagtccatttccgagctgcagaaaaaggagaggtcactgcaggaggagaacaaggctctgcagaaggaactggtggagaggcagaagaatgtgaggggccagcagcaagtagggcagtgggaccaaacccaggtccaggcccaggcccaagcccaaccccaagcccagacaagctcctcctcctcctccatgctgagggatcagcaggcacttcttccaccacaaaatatctgtagctacccgccggtgatgatgggcgagagaaatgatgcggcggcggcggcggcggtggcggcgcagggccaggtgcaactccgcatcggaggtcttccgccatggatgctgagccacctcaatgcttaa

SEQ ID NO: 12235 - DNA, 1056 bp, Oryza sativa
  Clone ID: TFbOSC400256j.C1.o4.gm
atggggtggccggtcagaccggcctcggctcggtcagaccgccatcagttcggtctgaccgaatacggcttcgtcggctctgtatcggccatcccgagcagcaccatctcggcctccagggggccgtcccacgcaaaccaggtcagctcaagctcaagcaccgagccctacccctacgtcgatcgatctgcacggactgcacccgccctgccccaccgcgaaagcccccctcacctccattccttccatggcggcctccctcctcctcctccactgcaccctcctttactactccactccaaccatggcgtccagtcgtccacaccccccaccatccccaccttaaagaccggaagaacggcaactccccaaccctcttgtttcttcgagagcgaggtgaagatttgtttcttggtttgtgttcttggagtggaggaggaggaggagttggatatggggcgcggcaagatcgagatcaagaggatcgagaactcgacgaaccggcaggtgacgttctcgaagcgccgcgccgggatactcaagaaggcccgcgagatcggcgtgctctgcgacgccgaggtcggcgtcgtcatcttctccagcgccggcaagctctccgactactgcacgcccaagaccacgctgtcaaggatcttggagaagtaccagaccaactccgggaagatactctgggatgagaagcacaagagcctcagcgcagagatcgatcgtgtcaagaaggagaacgacaacatgcagatcgagctcaggctacccaaggagctgatcgcgatcgaggaggcgctcaacaacggccaggccaatctgcgggacaagatgatggaccactggaggatgcataaaaggaatgagaagatgctggaggacgagcacaagatgttggcttttagggtgcaccagcaggaggtcgagctgagcggcggcataagggagctggagctcggctaccaccacgacgacagggacttcgcggcctcgatgccgttcaccttcagggtgcagcccagccaccccaacctccagcaggagaagtag

SEQ ID NO: 12236 - DNA, 522 bp, Oryza sativa
  Clone ID: TFbOSC422442j.C1.o2.fg
atggagcgaatccttgagaagtatgacagacatgagttattatctgaaggaaataatgtgattgaagagttccctgagctggagggaagcatgagctatgaccacatcaagctgaggggcaggattgaagctctaaaaaagagccaaaggaatcttatggggcaggaacttgactcgctgacactgcaagatatccagcagcttgagaaccagatagacacttctctgaataacataagatcaagaaaggtgacgtatccatcgacagcgagacgacatggtaacttcttcaatcttaaaatatgtcggctcagtctttcggaggaaaagttgctgatggagaaaaacactattctggagaagctgcggcgattccggcgagccggaaaccgtgacggcgccacttggctggaccagcagcaacaatggcttgccatggtggatgctccagtcatcatcgaacggcaagagctagaagatgttcagatgaaatggtccctgcagccattgcatggttgctga

SEQ ID NO: 12237 - DNA, 606 bp, Oryza sativa
  Clone ID: TFbOSC417635j.C1.o12.fg
atggtcagaggaaaggtgcaaatgcgacgaatagagaaccctgtccacagacaggtaaccttctgtaagcgccgtggggggctcctcaagaaggccagggaactatcagtgctttgtgatgctgatgtaggtgttatcatattctcctctcagggaaaactccatgaattagctactaatggaaatatgcataacttggttgaaaggtaccagagcaatgtagcaggtggtcaaatggaaccaggagctctacaaagacaggtagcagaacaagggattttcttgttaagggaagaaatagatctactacagaggggtcttaggtctacatatggagggggagcaggggaaatgacactagataaattgcatgcactagagaaaggtcttgaactatggatttaccaaatacgcacaacaaagatgcagatgatgcaacaagagattcaatttcttagaaacaaggaaggcatactaaaagaagcaaatgaaatgcttcaagagaaggtgaaagaacagcaaaagctatacatgtctttgttggatctccatagtcaacaaccaacacaaccaatgacctacggaaatcgcttcttctcaatctag

SEQ ID NO: 12238 - DNA, 690 bp, Oryza sativa
  Clone ID: TFbOSC33084j.C1.o12.fg
atggggagagggagggtggagctgaagaggatcgagaacaagatcaacaggcaggtgacgttcgcgaagcggaggaatgggctgctcaagaaggcgtacgagctctccgtgctctgcgacgccgaggtcgccctcatcatcttctccaaccgcggcaagctctacgagttctgcagcggccaaagcatgaccagaactttggaaagataccaaaaattcagttatggtgggccagatactgcaatacagaacaaggaaaatgagttagtgcaaagcagccgcaatgagtacctcaaactgaaggcacgggtggaaaatttacagaggacccaaaggaatcttcttggtgaagatcttgggacacttggcataaaagagctagagcagcttgagaaacaacttgattcatccttgaggcacattagatccacaaggacacagcatatgcttgatcagctcactgatctccagaggagggaacaaatgttgtgtgaagcaaataagtgcctcagaagaaaagaaaagctggaggagagcaaccagttgcatggacaagtgtgggagcacggcgccaccctactcggctacgagcggcagtcgcctcatgccgtccagcaggtttactccagagcagatgaacaactcatgcgtgactgccttcatgccgacatggctaccctgaactcctga

SEQ ID NO: 12239 - DNA, 798 bp, Oryza sativa
  Clone ID: TFbOSC401826j.C1.o16.fg
atggggagggggaagattgagataaagagaatcgagaacaagacgagccgtcaggtgaccttctgcaagcgcaggaatgggctgctgaagaaggcctacgagctcgccatactctgcgacgctgagatcgcactcatcgtcttctccagccgaggacgcctctatgagttctccaatgtaaacagcacaaggtcaacaatcgagaggtacaagaaagcctctgccagcacttcaggatccgctccagtgatagacgtcaattctcatcaatactttcagcaagaagcagcaaaaatgcgccaccagatacagaccttgcagaatgcaaacaggcacctcatcggtgagtccattggcaatatgaccgcaaaggagctcaagagccttgaaaatcggcttgaaaagggcatcagccgaattcgatcaaagaagcatgagctgctgttctcggagatcgaatacatgcagaaaagggaagcagatcttcagaacgagaacatgttcctgagagccaaggtggcagaggccgagcgagctgaacatgatgatcagcaggcggcggaggacgacgagatggcgccggcgccggcggtcggcggcgggtcatcgtcggggacagagctggaggcgctgccggcgacgttcgacacaagggaatactaccagccggcgccgccggtgagcatgctggccgccgcggcggcggcggcggcggcgcagtactcgtcggaccaccaccagactgctctccacctcggctacttcaaggtcgactccggcaaaggcggcctcctctag

SEQ ID NO: 12240 - DNA, 513 bp, Oryza sativa
  Clone ID: TFbOSC900218j.C1.o17.np
agcgtggaggaaactattgagaggtacaagaaagccaacagtgacacctccaataccagtacagttgcagagatcaatgcccagcactaccagcaggaggctgctaagctgaagcaacatatcacctacctgcagaactccaacaggttcattatttcactcagctgcttagatttttttttttcaacttgacaaagtagttcatctggttataggcctagaaaagattagagcacggaagaacgaatatctgtgtgctgaaattgagtacatgcagagaagggaaacggagctgcagaatgacaacatgtactcaaagagcgaagttgccgagagtgaaagaggactgcaaacagtgaacatgatgggttcagcatctacgagcgagtacgtgcaaaatatgatccattacgatccaagaaacttcctgcaattcaacatcatgcagcagctagctagcctcagtattatcctgaacaggaggaccgaaaggcctcacagttcatagttcaa

SEQ ID NO: 12241 - DNA, 771 bp, Oryza sativa
  Clone ID: TFbOSC400152j.C1.o9.np
atggggagggggaaggtggagctgaagcggatcgagaacaagatcagccggcaggtgacgttcgccaagcgcaggaacggcctgctcaagaaggcctacgagctctccctcctctgcgacgccgaggtcgccctcatcatcttctccggccgcggccgcctcttcgagttctccagctcatcatgcatgtacaaaaccttggagaggtaccgcagctgcaactacaactcacaggatgcagcagctccagaaaacgaaattaattaccaagaatacctgaagctgaaaacaagagttgaatttcttcaaaccacacagagaaatattcttggtgaggatttgggcccactaagcatgaaggagctggagcagcttgagaaccagatagaagtatccctcaaacaaatcaggtcaagaaagaaccaagcactgcttgatcagctgtttgatctgaagagcaaggagcaacagctgcaagatctcaacaaagacttgaggaaaaagttacaggaaaccagtgcagagaatgtgctccatatgtcctggcaagatggtggtgggcacagcggttctagcactgttcttgctgatcagcctcatcaccatcagggtcttctccaccctcacccagatcagggtgaccattccctgcagattgggtatcatcaccctcatgctcaccatcaccaggcctacatggaccatctgagcaatgaagcagcagacatggttgctcatcaccccaatgaacacatcccatccggctggata

SEQ ID NO: 12242 - DNA, 735 bp, Oryza sativa
  Clone ID: TFbOSC403905j.C1.o14.fg
atggggcgaggcaaggtggtgcttcagcggatcgagaacaagatcagccggcaggtgacgttcgccaagcggcggaacggcctgctcaagaaggcctacgagctctccatcctctgcgacgccgaggtcgccctcgtcctcttctcccacgccggccgcctctaccagttctcctcctcatccaacatgcttaagacgcttgagagataccagaggtacatttatgcttcgcaagatgctgccgcaccaactagcgatgagatgcagaaaattaaccatcagaacaactatcaggaatatgtgaacttgaaggcacatgttgagattctgcaacaatcacaaaggaaccttctaggtgaggatttagctccactggctacaaatgaacttgagcagcttgagagtcaagtagtcagaaccttgaagcaaatcagatcaagaaagactcaggtactacttgatgaactctgcgacctaaagagaaaggaacaaatgctacaagatgcaaacagggtcctgaaaaggaagcttgacgagatcgacgtagaggcagctcccccacagcctccatggaacggaaactgcagcaatggccatggcggcggcggcggcgtgttttccagtgagcctccccaaccagagcacttcttccaggccctcgggcttcatgccgtggacgtgaaccagccgccggcgccgccaccgggcggttatcctcctgagtggatggcctag

SEQ ID NO: 12243 - DNA, 684 bp, Oryza sativa
  Clone ID: TFbOSC419955j.C1.o3.np
atggcgagggagaggagggagatacggaggatagagagcgcggcggcgcggcaggtgacgttctcgaagcggcggcgggggctgttcaagaaggcggaggagctggcggtgctgtgcgacgccgacgtcgcgctcgtcgtcttctcctccaccggcaagctctcccagttcgccagctccaatatgaacgagatcattgacaagtatactacacattcaaagaacctggggaaaacagataagcagccttctattgatctgaatttagagcacagcaagtgtagcagtttgaatgaacaactggcagaagcaagtcttcaacttagacagatgagaggtgaggagcttgagggattgagtgtggaagagctgcagcagatggaaaagaacctcgaggcaggactgcagcgggtgctctgtacaaaggaccagcaattcatgcaagaaatcagtgagctccaacgaaagggcattcagctggcagaagagaatatgcgcctcagagaccaaatgcctcaggtgcctactgctggcttggcggttcctgatactgaaaatgttcttactgaagatggacaatcatctgaatctgtgatgactgcattaaattcgggaagctcgcaggataatgatgatggttctgatatatccctgaaactagggtgagtttccgctggaaccctt

SEQ ID NO: 12244 - DNA, 825 bp, Oryza sativa
  Clone ID: TFbOSC401751j.C1.o5.fg
atggggagggggaagatagtgataaggaggatagacaactcgacgagcaggcaggtgacgttctcgaagcgtcggaacgggcttctgaagaaggcgaaggagctatccatcctctgcgatgcggaggtcggccttgtcgtcttctccagcaccggcaggctctatgagttctccagcaccaactgggcatggtgcactgctcacgctgaagaatatataccaactcctataactggagaactccagcaaactcccctcaaaggagctgaatatgcgcacaatatatgcgcacaatccgatagtacagaatcttctgaacttgaggttggcaagagctgcaagccacgcatgggccaaagggggcagattgctgcagatgccaatagcatttggcagagggaggcagcaagcttgaggcagcaactgcacaacttgcaagaaagccacaagcaactgatgggtgaggagctttctggcctaggtgttagagacctacaaggtttagagaataggcttgaaataagtctacgtaatatcagaatgagaaagggaagcctaattcaccaggaaaacatcgaactttctagaagcctaaatgtcatgtcgcaacaaaaattggaactgtataacaaggttcgatgcaaaattctcttagaaacttgtgactacatgttaacacattatcccaagcaactaaaggaacaacttgatttcagcttcaggcctgtgaacagagaggtgccacagatgcaaatgaaagttccagcactccatacagctttcgtatcatacaaaatgctaatatgcctcctagtcttgaattga

SEQ ID NO: 12245 - DNA, 2658 bp, Oryza sativa
  Clone ID: TFbOSC400780j.C1.o8.gm
atggagtgggcgccggtggccgaccacaagatgaggaagaaggtgtggggcacctgtggacaagatggtgtgggactccgtacgcagaaaacaattgaacgctataggacgtatacaaaggaaaatatcggcaacaagacagtacagcaagatatagagcaagtaaaagctgacgctgatggtttggcaaagaaacttgaagctcttgaaacttacaaaagaaaactgctgggtgaaaagttggatgaatgttctattgaagaactgcatagcctggaggtcaagctggagagaagcctcattagcatcaggggaaggaaggttgccaaactgagagagaaggagatgaagctgcgcaaggacaatgaagagttacgcgaaaagcgctcacctgtcgaacggagggagttcgacagggcccaccacccggcgccgcgaggcctgtcgaaccgggggcgttcgacagggccctccaccgaccctgtcgaacaatcggcgtttgacaggccggccggagaggaggccgaggaggcgccggccgggaggaaagggttggcgacgccctccagcagtgaagttaagatgaaagttggacagatgtttcatgacaaaggtcacttacaagatgcggtgaagaggtgggcatttgtccagaagcgtgagttcaaggcaagaaacccgggcacacacatggctattctcgatgaggtgaatgaatatggggagaatgttcttcgtcgggctttctggtcatttgggtgcatgatagaggcctttaaaaattgcattcctttgctctgtgttgatggcactttcatgacaggcaagtacagaggaacaattctaaccgcgatcggagtcgacgcggatagccatgtcgttcctgttgcttttgcatttgttgaaagcgagaacacatcaagctggctatggtttttgcggcacattaaaatgatcaagaaccttatggatgaagctaaagtgaaagatcgttctcgtcgtaagaaagcttgcattctttgcggggagaaccattcccgaactttctgcaatgtgctaaagatgcgaggaccggatcaatattggcgtattgatcctcgttgggttccaaggctgagagcagctgggttgttgacgtttgcacggttggtcgagccttcacgtgcaaggtccgaacgaatccacattgacgcggcgcttatgagtgctcttgtcgatagatggaggcctgagacccacactttccacctcacagttggagagatggtgcccactctgcaggatgtgtcttatttgttggggctgccgatagctgggccagcagttggcccaacaatggtgaatgctggatgggcggatgaccttctggccagttttggtggtgtgctgcctgttgcactggaggatctcacagatgggcacgggcctacgaaaagttggttgaatcagtttcgacaggatgtcttccctgatgaccaggaggagtggatcgtgcagcggcacttagtcgcttacctgttgtggttgtttggatgggtgatgttcacgggaactcacgctgactccgtggacaagcacttcatccactttgcggagcagattgcagagttacctatcgcggagattccacagtacagttgggggtcggcggtacttgcggcgacatatgccggactgtgtgatgcttgcgtgaggaacagcaagcaaagttcactccctggatgcccgttgctacttatgttgtgggcgcacgagcgcttcgacattgggaggcctcagcttgactcgtacgcaaactacggtttgcgagagatgtacaggtctggtgttgatgacatcgacgatcgtcccactatgggatccttgtggacacaccgtgagccgcagtgggttagcgggacgacacgtcgtgtctacactcagtttgtagctgactttgatcagcttacgcctgaccgtgttcggtggactccctacactcagcacgatgtcaatgatcgtgcaccgcacggtctcgcggatctttgcacgcgagatatgcaactctggaggacgacttgtcacctcgtgctggacgtgcacgtcgagccacacaatgtccacagggttctcaaacagttgggcatgtatcaggacttccctccgagagatggtcgtcctttggcagatagtcttcataggtacttcagaaaggggctcgggctttcctacgagctagttattgtgaccacggttcagccgacggtacaagagtgggagcacgcagctgataacttggcacttcagacacctccagacgatgggagttattatggagcttaccttcgttggtaccgcagtgttacacgatggaggtgttttcctccacaaagagatagcaccgtcccccaccaggcagcgattactgacacgtttgcccctcagcctagatcagcttacaagtcaatggcggaatttgttgagcacgttcacgtggagtccgacaccctgctgcaaagactagaggcgagacctccagtcgtcaggtctgacgacgtggcgagtgtccttcgcaacttccgtgcacgtgctgccgcactactacgtcgtgtctcctgtcggagcgcggcagatgtggtgcagacgtcgggccgacggctgtcgcgcccagaaatttag

SEQ ID NO: 12246 - DNA, 318 bp, Oryza sativa
  Clone ID: TFbOSC29397j.C1.o1.fg
aaccaagcactgcttgatcagctgtttgatctgaagagcaaggagcaacagctgcaagatctcaacaaagacttgaggaaaaagttacaggaaaccagtgcagagaatgtgctccatatgtcctggcaagatggtggtgggcacagcggttctagcactgttcttgctgatcagcctcatcaccatcagggtcttctccaccctcacccagatcagggtgaccattccctgcagattgggtattcttcttttcttccagttacagttaatttcttgcctgaaaaaattcccaaaatgcagaggtcatgttctttttaa

SEQ ID NO: 12247 - DNA, 1101 bp, Oryza sativa
  Clone ID: TFbOSC401166j.C1.o21.fg
atggtgcgggggaggacggagctgaagcggattgagaacccgacgagccggcaggtgaccttctccaagcgccggaatggcctcctcaagaaggcgttcgagctctccgtcctctgcgacgccgaggtcgccctcatcgtcttctccccccgcggccgcctctacgagttcgccagcgcccccagtactcgtattgtgtatcttactcctagttctcttgcacccactccagctggagagtggagagagtggagagaagatctatctagaaaattcttgagtttgcaagctatgatatgcaacgaactttcttctaatgtggagctgaaaccgtttggttgggctctagctcaaggagaggtggagttggagctttgccgtatgggcccaatgtatataaaaaatatctataatttggttatagagtatttgtatttcaatgggaaaaagctgagctcgaactattctttagtgtacaggcaacacgccccaattctacaagtgctgcaaccaaagctttcaatactggttttgccggaaatacccgtaccgcttgctggttgttacttcttccgtttcataatcctacagaaaaccatcgaccgctataaagcatacacaaaggatcatgtcaacaataagacaattcaacaagatatccagcaagtcaaagatgatactttaggcttggccaagaaacttgaagctcttgatgagtccagacggaaaatattgggagaaaatttagaaggattctctattgaagaactgcgtggtctagaaatgaaacttgagaagagcctccacaagataagactaaagaagaccgagcttctggagcagcagatagccaagctgaaagagaaggagcggactttgcttaaagacaacgaaaatttacgcggaaagcatcgcaaccttgaggctgcggcgctggtggctaaccacatgacgacgacgacggcgccggcggcgtggccgcgggacgtgcctatgacgagcagcacagccggcgccgccgacgccatggacgtggagactgatctgtacattggattgcccggcactgagcgctcctccaaccggtcggagacaggttga

SEQ ID NO: 12248 - DNA, 1452 bp, Oryza sativa
  Clone ID: TFbOSC101782j.C1.o2.fg
atggcggcggcggctgcaggcatgggcggcggaggaggggtgcagcatcaggagacgacgacgacagtggtgcaggtagcggcggaggcgagtcggaagaaggtggaggtgagatctgcagggcggcgcgggcggcgggagatgcggcggatcgaggacgcgacgagcaggcaggtgacgttctcgaagcgccggagtgggctgctgaagaaggcgttcgagctgtcggtgctctgcgacgccgaggttgctctcatcgtcttctcccctcgcggccgcctctaccagttcgcttctgcctcctccgacttgcagaggacaatcgatcgctacctgaaccacacaaaaaactcatctgcacatgaagaaggagaggaatcatgcgtccagaagtggagatcggaggctacaaccctgggaaagaagatagaagcaattgagggctacaagagtaagctgttgggggaaggcctggggtcgtgttcagtgcaggagctacaagagcttgaagtgcagctggagaagagcttatgtagcatcaggcaaaagaagcaaaagatgctgatggatcagattttggagctcagggagaaggagatgaacctcttgaaggagaatatggtactccgtgatcagtgtaaggctctgtcatcgccatggtcgacgtctgtgggagagctgaagaataagcaggcggatgatgatgttcatcgtcatgaggattattccggcggcggcgtacgcgacgacgatgatcggcgcatgatggaggacgtggagacagatctggccgcggccaatcaggcgggcaaagtcttgaagaaaggtaagaagaaacaagccaaggatgaattagatcgccagaagcaggctgagaagaagagacggcggctggagaaagcgcttgcaaactccgctgccattatatctgagctggaaaagaagaagcagaagaagagggaagaacagcaaaggctggatgaggaaggtgctgcgatagctgaagcagttgctcttcatgtcctcattggtgaggactccgatgaaccctgccatttgatgctaaacaagcacagaagatgcaaccattgggatcactcagctggttttgatttcgccgtggatgcacaaggcgctgatatttatcctcctgatggactgatacagtgcgctgatcatgtttatgctcccaaagggaggtgtattgattgggggattggccagccattgccatcttggggagaggtgaaggacttgcagttgcaggcaccgtgctaccaaggaatgttccaccagtcagttgcatgcccaggtttcatagcagctcaagcggtctcctccttgcaaatcggaggagattcgtcagatattacctctccaagccaaggagcgactgtcgttaataggatgcttggtgccaccaacaggctcaacctttacagagagatataa

SEQ ID NO: 12249 - DNA, 837 bp, Oryza sativa
  Clone ID: TFbOSC407812j.C1.o10.fg
atggggcaagggaagatcgagatgaagaggatcgaggacgcgacgaggcggcaggtgacgttcagcaagcgcagggctgggtttctcaagaaggcgaacgagctcgccgtgctgtgcgatgcgcaggtcggcgtcgtcgtcttctccgacaagggcaagctcttcgacttctgcagcccgccggtcatcttgatggagctgtttcaccgttatgagatcaccaccagaaacactcggcttcaggagacaaaccgtgatgatgagcaaatggtcatggagatcacaaggctaaggaatgagatcgaccagctcgaagccagtttaaggaggcaaactggagaagacctgtcatctgtgtccacagtggatgagctcagccagctgcagctgcagcttgaatcatctctcagcaaagttcatgcgaggaaggatgagctcatgagccagcagctggaggatatgcgtcgcatggtacactactcccttattgtagtcgcagttgtggtttttgctgatgagtgcatcagaccgtgcatgagcagaacaatttcttgtgccgcatggggtgagctgcagctatggagttccttgccggtgggggagcagcagatgagtgagaactggcacagcgagaactggcagagccctggttccggggaggcgtcggcaatggaggcgctgacgatgctgccgccggcggcggcggcgacgacggcggcggaggcgttcaattgcttcttcccggaggaggagaagggggtggcggcgtcgagcacgttgctgcagctgtggccgcagccgcacgacggcgaccagcctgacctgcggctctggtag

SEQ ID NO: 12250 - DNA, 705 bp, Oryza sativa
  Clone ID: TFbOSC400881j.C1.o2.np
atggggagagggaagatagagataaagaggatcgacaacgcgacgagccgacaggtgacattctcgaagcggcggagcgggctgttcaagaaggcgagggagctctccatcctctgcgatgccgaggtcggcctcctcgtcttctccagcaccagccgtctctatgactttgccagctccagcatgaaatccataattgagagatacaatgagacgaaagaagatccccatcaaaccatgaacgcaagttctgaggcaaagctttggcaacaggaggcagcaagcttgaggcagcaactgcataacttgcaagaatatcatcgacagttgttgggacaacagctttctggtctggatgtagaagacttgcaaaatttggaaagtaagctggagatgagcttaaaaaatatccgtctgaggaaggacaatgtcatgatggatcaaattcaagaattaagcaggaagggaagcctcatacatcaggaaaacatggaactacacaagaaagtcagccttgtccatcaagaaaacatcaatttacagaaaaaggttgcggtgcctacagcctagaacaaacttgactatggagtttcaagcagttgggaagcatatgacatgaaagaagacaatataacattacatagcaatatagagcccccaaggcagggaagcaccaaattacagtggctacccagtacctagcac

SEQ ID NO: 12251 - DNA, 606 bp, Oryza sativa
  Clone ID: TFbOSC400524j.C1.o33.fg
atgtctttcaccggcacgcaggacaagtgcacggcgtgcgacaagaccgtccacttcatcgacctcctcaccgccgacggcgtcccgtaccacaagacctgcttcaagtgcagccactgcaaagggattctctcgatgtgcagctactcgtccatggacggcgtcctctactgcaagacccactttgagcagctcttcaaggagacggggagcttctccaagaagttcgcgccaggttgcagatctacagacaaggaactggcaagggccccaagcaagatatgttcagcgttttctggaactcaggataagtgtgcagcctgccagaaaacagtgtacccactagaaaagctaactttggaaggtgagtcataccacaagagctgcttcaagtgctctcatggaggctgcatcctgaccacctcctcctacgcggcgctcaacggggtgttgtactgcaagatacacttcgggcagctgttcatggagaaagggagctacaatcacatgaagaagaagagcgagtcccaggaggtgttgccggaagtggtgcccgaagagcaaccggcgccgccgccgccagacgaaaatagagaggacaactag

SEQ ID NO: 12252 - DNA, 1491 bp, Oryza sativa
  Clone ID: TFbOSC27185j.C1.o2.fg
atgaagtggctctgcgctttcctgaaggggacgaaggacggcgaggccaaccgacggcgccctcgggtgacggcaggagaagagaccacgctctgggaagaaccagttagaccaaagaaggaagaaccacctagacataacaatgaagaaatggaccatgcacttgcccttgctcttgcagacgatgccaaaaatacaaaagagagaaaccatgacaagggagaaaacgatgaagaactcgctagagcaatacaggacagtctgaacatgaatccttaccagccttacaatccttgtgcaccctctcagacccaggccaggtcgagaggatacagggtctgtgggggttgcaagcatgagatagggcatggccattacttgagctgcttgggaatgtactggcaccctcagtgcttccgctgttcttcctgtcgccaccctatccgtgagatggaggtgttctcaggaagtgacagtttactttattctgtttcccagttcaccttgctaggtacagatccataccacaagctgtgctacaaggagcttcatcacccaaagtgtgacgtctgccttcaatttatcccaacgaacaggactggtttgatagagtacagagcccatccattctggggacagaagtattgtcctttgcatgagcatgatagaacacctcgttgctgtagctgtgagaaaatggagccaaggaacacaaagtatatgtcattaggggatggacgcagcttgtgcatggaatgcctggattctgcaatcatggacaccggtgaatgtcaaccgctataccattccatcagagactactacgaagggatgaacatgaaactagaccagcagatacccatgctcttggttgaacgtcaagcccttaatgaagctatggaaggagaaagcaaaggaccgcatcatatgcctgaaacacgaggcctttgtctgtcagaggagcagactgtgaccagtatacttaggaggcccagaattggtgcaaatcggttactagatatgaaaacccaaccgcaaaagctaactaggagatgcgaagtcactgcaattcttgtattgtttggcctccccaggctgctaacgggctccattcttgcccatgaattgatgcatgggtggttgcgcctcaaaggttaccggaacctaaaggcggagattgaggaaggtatatgccaggtcatgtcttacctgtggctggagtcagagatccttccatccacttcaagatatggacaggcttcaacatcttacgcttcatcttcgtcgtcctcctgtcgaccaccaccgtccaagaagggtgggatctctcacaccgagaagaagcttggagaattcttcctgcatcagatcgccaatgacacatcatcagcatacggcgatggtttcagagctgcctatgcagctgtgaacaagtatggccttcgccaatcactgaaccatatacggctaaccggaggctttcctgtgtaa

SEQ ID NO: 12253 - DNA, 2649 bp, Oryza sativa
  Clone ID: TFbOSC15565j.C1.o3.fg
atgggggataggccagacatgggtgctggtgtggccttgcgattctcgcataatgattggacccttgaggaagactcaaaagccctacattttctccagccagatttggtactttttacaggtgattatggcaacgagaatgttcaacttgttaaaagcatttcagatcttcagctccccaaagcagctattcttgggaatcatgactgttggcacacgtatcagttttcagagaagaaggtagatcgtgtccagcttcagctagagagccttggtgagcagcatgttgggtacaaatgtttggattttccaacaataaagctgagtgttgttggtggacgaccattttcctgcgggggtaataggatatttagaccaaagcttctgtcaaaatggttgctgtcattcttagttgcttcaccgggttggtttcttattgcatactacttctgctgtgtagtaacatgcagtgaaatcgagctacagtggtatggtgtcaatgatatggctgaaagtgcaaagaggatatatgatgctgctacaaatgcaccaaaggagcatgctgtcatattactggcacacaatgggccaacaggtctaggctcaagaatggaggatatttgtgggcgggattgggttgctggtggtggtgatcatggtgatccagatctggagcaagccatatctgatctgcaaagagaaaccggagtttcgataccgctggtcgtgttcggtcacatgcacaagagcctcgcctacgggagaggccttcggaagatgattgcctttggagctaaccggactatatatctgaacggcgccgttgtgcctagagtgaatcatgcgcaatcaagcaggcagcctgcaatctccacaagcgaaaagactgggctcgaaggattaacaggactgatggttccgacatcgcgggcgttcaccattgttgatctctttgaaggcgccgttgagaaaatctccgaggtctgggtgacggtgggtgatgccaggacggagcttgagcaggaattagtcttgtacaagcaaccacataaaagtgtcccttccaacattgccatttggagctctatgggttggttgaccaaattttttagaggttcaacccacaaaatctcggaagggcaataccacagcaaacccgcggaggagacgatatggaatggaccctctaattccgcagttgtgacgatggtgtacccactagagtccacatttggtcaactcgacttgctattgttggctactgatctccgtcaacttgtcattgacgatgtagattgttgtgatttggatgtcccgtcagaatttgacaatgaagatatcgctcgtgctatatcactctctctattagaggaggaacaaagaaaggcaaaggcaatagaaaaggacatgcatttggaggaggatgaacaacttgcaagagctatccaggaaagtttgaatgttgaatcgcctcctcgtgctcgtgaaaatggcaacgccaatggtggcaatatgtatcaaccactgccatttatgttttcttctggattcaggacttgtgccggatgtcacagtgagattggtcatgggcgtttccttagttgcatgggagctgtttggcatccagaatgttttcgctgtcatgcttgtaatcaaccaatatatgactatgagttctccatgtcgggaaaccatccataccataaaacatgctacaaggagcgctttcacccaaaatgtgatgtctgcaagcaatttattcctacaaatatgaatggcctgattgaatatagagcacatcctttctggttacaaaaatactgtccatcacatgaggtggacggtactccaagatgctgtagttgtgaaagaatggagccaagggaatcaagatatgtattgctggacgatggtcgcaaactctgcctggagtgccttgattctgcagttatggatacgagcgagtgccaacctctttatcttgaaatacaggaattttatgaaggcctaaatatgaaagtggaacaacaagttcccttgcttcttgtagaaagacaggctttaaatgaagccatggaaggagagaagactggtcaccaccatcttccagaaacaagaggtttatgcttatcagaagagcaaactgtcagcacgatattgaggagaccaagaatggctggaaataaagttatggaaatgataacggagccatataggttgactcgtcgatgtgaagtgactgcaattctcattctttatggtctcccaagattgttgacaggttcaattttagctcatgagatgatgcatgcgtggttgcgacttaaaggatatcgcacacttagtccagacgtagaagagggcatatgccaagttcttgctcacatgtggattgagtcagagatcattgcaggatcaggcagtaatggtgcttcaacgtcttcatcctcatcagcatccacatcatcgaaaaaggggggaagatctcagtttgagcgaaagcttggtgattttttcaagcaccaaattgagtcagatacctcaatggcctatggcgatggttttagagctggcaaccgagctgttcttcagtatggtctaaagcgcacccttgagcatatccggttaacagggactttcccattttga

SEQ ID NO: 12254 - DNA, 1875 bp, Oryza sativa
  Clone ID: TFbOSC900069j.C1.o4.fg
atgccgttaaggagtggtcatggtccttggaagtgtcgtcgttgtcgacccaacaagcgcaagggaaggctttcgcttgccgcctacttggcaacttgccactcgtaccattgctccgccaacatcaagcatgttggcaacgatttgctcataggggtaggggttcataggggcgttcttgggtggggagagatcaagaaccggagctgtccgtggccggtggttcgcctgtcccgagctcgattagttaccctttgtctcggttcttggtgcgtggtcaatcgggactacagagaattggagtttcttgtgggagtttcagggtcacttcgaggtgaaagcggactgagcgggaggcgaggcgatcgacggcgaactgaattcctagtttgttgcaggctcaagctttggttttctgaagtactggaaacgttctcgattggcgaaaagtttgtgagatttttgtcttctggctacagaaaattcgaccctcagataacctcgagtcatgggttgggagcgtatgatgaaagtgataatgaagatatagatcgtgctattgcactgtctttatcagaagaacaaaataagggaaaagctgttgatatcgattataatttggaggaagatgaacaacttgcacgagctctccaggagagccttaatgctgactctcctccacgtcagaatattcctgttgagaatgttccatcagagcccccaagagagctgcctccgattctatttgcctcaagtggatccagaacttgtgctggatgcaaaaacccaattggtcatggacgttttcttagctgtatggattcagtatggcatcctcagtgcttcaggtgttttgcttgtaacaagcccatctctgagtatgagtttgctatgcatgaagatcagccataccacaaatcatgctacaaagattttttccatccaaaatgtgatgtctgcaagaactttattccaacgaacaggaatgggctgatcgaataccgagcacatccattctggatgcaaaagtactgtccttcccatgaagatgatggcactcctaggtgttgcagttgtgaaagaatggagccgatggacatcaaatacatcacattagatgatgggaggaaactctgcttggaatgtctcaattcttcaataatggatacaccagagtgtcaacagctgtatatggacattcaggaattttttgaaggtctgaacatgaaagtggagcaacaagttccaatactcttggttgagagacaggctctaaatgaggctttagaaactgagaaaaatgggcatcatcttcctgaaacaaggggactatgtctttctgaagagcaaattgtcagaacgatcttaagaagaccaataattggaccgggaaacagaattatagatatgatcacagcaccatataagctggaaagacgatgtgaagtgactgcaatcctgatattatatgggttgccgagattacaaactggctcaattctcgcccatgaaatgatgcatgcttatctacgtctgaaaggatttcggtctcttagtcctcaggttgaagaaggcatatgccaagttctttcccacatgtggctcgagtcagagatcatctttggttctagtatcgacatatcagccacctcagtggcatcttcgtcgtcgtcatcttcaactccaaccacatcaaagaagggcgcaaagaccgaattcgagaagaagctcggagcattcatcaaacatcagatcgaaacggattcatctgaggcatacggagatggttttcgagctgccaatcgggctgtcgaaagctatggcctgagaagtacccttaatcatatgaaaatgacagggtctttcccatattga

SEQ ID NO: 12255 - DNA, 1554 bp, Oryza sativa
  Clone ID: TFbOSC100716j.C1.o3.fg
atgacttttgtttctgttaaaaagtacaggagttcaggcttgaaagtggtggccagatcgtttcctctacaaacctatagtgtaagaatccagaagggaactagtggctctaggcttggaaagtgcaggtacaaggattttcgtctgccaatacttgaaaacatgggttggctgagcaaaatttttaaaggttcagtaaatagagtatcaagagggcactacaatggaaacacccatgaaggccactcagcatggcacactaaagcctatgagcatgacagtgaccatgaagacatagatcgtgctattgcattatctttatcagaagaagatcagcggaaggggaaggctgttgatgaggtagatattgatcatcgtttacatgaagatgaacaacttgcacgggctctacaagagagtctgaatgatgaacctcctcgtcagaatgttccagtaaaagatgttcactcagagagtactccagcaactttcatgcccccatatatattcccttcaactggattaagggtttgtgctggatgtaaaactccaatcggtcaaggacggtttcttagttgcatggattctgtttggcacccccagtgcttcaggtgttttgcttgtgataggccaatatcagaatatgagattccaacaaacaaagatggccacattgaatatcgggcccatcctttctggatgcagaagtattgtcctgcccatgaaactgatcgtactcctaggtgctgcagttgtgaacgaatggagccaaaggatagtaagtacataacattagatgatggccggaaactctgtttggaatgcctgaatacttcaataatggacacagacgaatgccaaccactatatattgatattcaagaattctatgagggtttgaacatgaaagtggaacaacaaattcccttgctgttggttgagcgacaagctttaaatgaagccatggaggccgagaaaactggacatcaccttgctgaaaccagaggtctctgcctatctgaagagcaaattgtccgaactatactaagaagaccagtaattggaccaggaaacaagattgtagacatgattacaggaccatacaaactggttagacgctgtgaagtgactgcaattcttatcctatatggccttccaagactgttaactggctccattctggctcatgagatgatgcatgcttacctccgacttaagggataccaaactcttgatccaaaggtcgaagaaggcatctgtcaggttctagctcatatgtggctcgagtcagaaataacatcaggatctagtagcatcattgcatccatcgcagcatcatcatcgtcatcgtcgtcatcttcagcaccctcatccaaaaagggtgtacagacggacttcgagaagaaacttggagagttcttcaagcaccagattgaaacagacccttctgatgtatatggagatggttttcgagatggcattaaggccgttgaacgctatggcttgagaaaaactcttgatcatatgaagcttacaggggttttcccgtgttga

SEQ ID NO: 12256 - DNA, 588 bp, Oryza sativa
  Clone ID: TFbOSC900047j.C1.o2.fg
atggcgacttcctttcaggggacgacgaccaagtgcatggcgtgcgacaagacggtgtacctggtcgacaagctcaccgccgacaacagggtctaccacaaggcctgcttccggtgccaccattgcaagggcaccctcaagctcgcgaactacaactcgtttgaaggagtgctctactgcaggcctcactttgatcagctgttcaagaggactggaagtttagacaagagctttgaaggaactccaaaggttgtcaagccagaaaaaacagttgagaatgagaatgctattaaagtctcgagcgcatttgctggcacgagagagaaatgcgtgggatgcaacaagacagtctatccaattgaaagggttactgtcaataacaccatgtatcacaaaagctgcttcaagtgctgtcatggaggatgcaccattagcccctcaaattacatcgcacacgaagggaagctctattgcaagcaccaccatattcagttgatcaaagagaaggggaacttcagccaacttgagaatgaccatgagaaggcatcacaatctggatctgtagaggatgaagattcagaatattag

SEQ ID NO: 12257 - DNA, 675 bp, Oryza sativa
  Clone ID: TFbOSC400879j.C1.o19.fg
atgacgttctctggtacacaggacaagtgcaatgcttgtgacaagaccgtgcatttcattgatctccttaccgcggacagtattccctaccacaagtcttgcttcagatgcagccactgcaaaggcacactttcgatgtgcagctattcgtccatggatggggttctttactgcaagacccattttgagcagctattcaaggaaacaggcaccttcaagaagaacttcccctcaggtacaaaggcaaacagtgaacaggctaagattcccagcaagctgtcctctgtgttctgtggaacccaggacaagtgtactgcctgcaagaagactgtgtatccattggagaagatgaccatggagggtgagtgttaccacaggacctgcttcaagtgcgcccatggcggctgccttctgacgaacgcctcctacgcctcgcacaacgggatcctctactgccagaaccacttctggcagctgttcaagaagtccggcagctacgacaacctgctgaagcccgcctccgccgccgccgagaacaccgtcgaatccgaggtcgccgtcgcggagcccgcgaaggaagacccggagacggaggaggcagccaaggaagaagaagaagaagcgtcaccggagcaggtcgcggaagctgttgtagaggaccaggagcactcatga

SEQ ID NO: 12258 - DNA, 591 bp, Oryza sativa
  Clone ID: TFbOSC27184j.C1.o1.fg
atgtttagcgggacgcagcagaagtgcaaggtgtgcaccaagacggtgtacccgatggaccagctctccaccgacggcgtcgtcttccaccgctcctgcttcaagtgccaacactgcaagtccaccctctcccttggcaactactcctcgattgaaggagtgccatactgcaagccccatttcgagcaactgttcaaggagaccgggagctacaacaagagcttccaatcacccgcgaaacccgcatcggagaagttgactcctgagctgacaagatcacctagcaaagccgcacgcatgttttcagggacacaggagaagtgtgccacttgcagtaaaacagcgtatcctctagagaaggtgacagttgaaggacaggcctaccacaagtcctgcttcaaatgttctcacggtggctgtgccatttcgccatccaattatgcagctttggaaggtatcctatactgcaagcaccatttctcccaacttttcaaggagaaagggagctacaaccatctgatcaaatgcgcatcagtcaagcgcgccgaagcacagccggcaccaccaccggccgctgcagattcctcctga

SEQ ID NO: 12259 - DNA, 621 bp, Oryza sativa
  Clone ID: TFbOSC401780j.C1.o2.fg
atgtcgttcaccggcacgcaggacaagtgcaaggcgtgcgacaagaccgtccatttcatcgacctcctcaccgccgacggcgtctcctaccacaagacatgcttcaagtgcagccactgcaaggggaccctctcgatgtgtaactactcttcgatggatggtgtcctgtactgcaagacgcactttgagcagctcttcaaagagacggggagcttctcaaagaaattctcgcaaggtggtaaatcttcagagaagagcgaccagggaagagctcctagcaagctatcttcagcattctctggaactcaagataaatgtgcagcctgccaaaaaactgtgtacccattggagaagctaactctggagggtgagtcttaccacaagagttgcttcaagtgctcgcatgggggctgcatcctgacgacgtctttctacgcggcgctcaacgggatcctctactgcaagatccatttctcgcagctgttcaaggagaagggcagctacaaccacttgatccagaccgcacaatcgaagcagaaagagtccgaggaggctgcaccggtggcggccacagaggccagcgagaaagaacaggaagtgcccccacaagacgcgacatag

SEQ ID NO: 12260 - DNA, 5406 bp, Oryza sativa
  Clone ID: TFbOSC423043j.C1.o3.fg
atggcggcggcggcgtggggcggcacgacgcagaagtgcgactcgtgcgggaggacggtctaccccgtcgaggagctcgccgccgacggccgcgtctaccaccgcccgtgcttccgctgcacccactgcaaggccaccctccagtttagtaactattcttctgtcgaaggtgtcctatattgcaaacctcactatgaccagatattgaaatcaaccggcagtttggagaaaagttttgaagggacatcaaaatcagctaaagcagaaaaatcgaatggaaacaaggggcaaccgaacagattctctagcatgtttgttggcacacaagacaagtgcgtagtttgtaacaagactgtgtaccctcttgaaaaggttaatcttaacgggagctcatatcataaatcatgcttccgttgcacccatggaggctgtactcttagcccatccaacaatgtcacacatgaaggcaaactttattgcaagacccatcactctcaattatttatggttaagggaaacttcagcaattttgaggatagtactccaaatgcaaaagtggatatcgagaagcaaccagaacatgaagatgctaccaagaatccaggaggcccaggtcaaggtgatgggctcactgagaaacctttagaaagtgaactcactcctgagaaaccgtcacaagacgatattgtggctgaaaagcaatcacaaagtagcgttgatgtcccaaaacaatcagaaagcagcacaacagttcagaggtcagaagaaggggaaagggttaccaagggtgagtcaaatagtcatgtagtcagcaagaagccattggaaagcagtgtagaaaagccattccagagcagtgcagttaacttacagccatcaggaagtagtgcagccgtaagaaaaccatggcagcgcaatcttcccacagataagccattgctgagtaacacaaccactgaaaagtcaactccaagcagtgctgccattgaggaatcattgccaagtaatggggttgatgcaaaacagccagaaagcagcactgccagcacagtggtaaaaaggccatggcaacggagggtagctacggagaatctaccgcagagcatttcgccatcagataagccatcatcaaccagtgcagatgatgtgaagccatcagaaaacagcaaattgatcagaaaaccatggcaacgtgctgtggctgctgaggcgcagatacagaacagtggaccaactgagaagtcatcattgacaaatgatacaaagccatcagaaagcaccacatcaattaaaaggccatgggagcacaaagtggtcaatgagaagccactgcagaacaatatagacacggagaagccactgcagaacaatacagacactgagaagtcatctagcagtgctatcgatgtgaagctggcagaaaccagtacaacacccactgtgccacaggaacacagtggaatcacggagaaaccttcacagaccagtgcagatgatgtaaagccatcagagagcactgcagcagtggttaaaaagcaatggcaacgtaacatcggattccagaaacagccccagagcagtgtaactgatgcaaagacacctgaaagcaggggaatgggcaaaagattgtggcagcgcaatgttccaactgaaaagcaatcgcaaagcggtgcgtcggttgtgacaccatcacaagttagtgtggctagcaccaacccgctccaaagcagcgtggttgtgaaaaagccatggcaaagaagcgtgtctagagaaaaagagccagagaaggatatatctagcaacaaaccgttacaaaaccgtgtacttgctgaagaagcagagaaaaccaatgtgactgctgataacaaatcacagatcattcaagataaaaagaacaatggtgctaccacagagaattcatcacaaataagtgaaagtgccaaaaaactaccacttactgcaaataaatcgcaagctgatacttccacagaaaaattgtcagaaagtgacatacttgctgtagcatcatctcagatcactgaaccatctaagaagccatcagaaaacactgctgaaaatgagaagccatcacagactgatattgctactgacgagctacccctgacccaaagtgtagaagccatgtcagaaccatctccaagtgatgcagctcatcaggaaatctccgagagggagatactgacagataaattaccagaaagtaccatggctgttgagaagctatctcaaactgctactctaaccgaaaagccatctaaagaagatgctgcagagaagctaccgcaaaccaatgaaccttctgagcagccacacgagagtgaagagactgctgagaagccacttcaaaatgaagctaatgctgaaagcacaacaaaacaaagtgatctcagtcttgagaagccacctcaggttgatgccaatgttgggaatcctaccgagcctgaaagtgatgccacttctggtgtgaactcatcagatgctcaaatcaggccaactgctgagcagttagtaggacctcaaggcattgtatctgccgagaagacatctgaccagatattagaagctaacaccgatccagctgctgaccagtcatcagagtcccaagatgttgcacctgctaaagttgcaacggagcaaccattagaaaatcaaaaggctgcagcttcagagcagccattggaacctcaacacgaagcatatgaagagaatccacaagagcataatagtgatgcaactgccaaggagtcatcagaacctgaaagagatactgcttctgatcagttggctgagcagccatcagaatctcgaactgcaggtgagaaggcaacactgcgtgaaagtgatgtggttaccgaggatccagcagaacctcaaattgatgcagctgctgaaaggtcagctgaggtgttatcagaatctcaaactggagttgagacaccagtgctgcatcaaagtgatagaactaacgaggttccatcagaacctcaaactgatgaagcttctgacaagtcaactgagcagccattggagcctgaaaatgatgcatctgtcgaggatgagaagccaccggaaatcgaaagtgatgatgtgcatgataaaccatcagaaagcaccccagatactgaaaccctgcctcataacactccaaagagtagcataagcattagcgaagctgcagacggcaacgtttctgaggaggcaccacctcagagcagtgcatccatagaaacgccatcagaaagtgccatagctgtcgaggaaccaaaacacgacgacgaggccagcataaagccatccgaagacagcagtgctcttgaggagccgccgcaggacgatagcgccagcgtggagccatcagagaacactataactcttgagaaggcatcagaggaagatgagggaagtgtaaagccatcagaaggcaatgatgctcttgagaaaacattggaggaggatgaggcgagtgccaagctaccagaagacagtacgacctttgagaagccatcggagaaagatgatgctggcaccaagcagacagaggaccctgtaactcttgagaaggaaccagaggaagacaagggaagtgtggagccaacacaggacaatgctggtcttgagaaaccgttggaggaagacgaggcgagtgcgaagccatcagaggacagtgtggttcttgataagccatcagtggaagatgatgacagcgccaagccatcagaggatagcatggaccttgaaaagccagaggctcacaaaccatcagaggaagaagatggcgcgaccaagtcatcaccggaggatgctgccgttgaggaggcgccattgcaagtcagcgaggaagggagaaggcgggagttctccatggctccgaagcggaagccgccggcgagggcggcggcggcgaagttggaccccgacggcatgttccgcggcgtctccgccttcgtcgtcccccacgccgtccagtctcgccgcctcgaggtcgcggctccaccgagcaatccatcccaacccccaccaactctctctcctgtgcttagggtttcctggctttcgtcgtcggtgcaggtgtggaagcagaggctggcgcagatggggggacgcgtccaggagaagctcgccgccaagggcggcggcggcgcggtcacccacgtcctggccgccgacgccaaggcgctgctccgggagctcgacgccgcctggctccaccgctttcgcgggagcgtggtgtcattcgagtggctggaggagtgcctcaaatccggggagaggctaccggagcacaagtttgctatcaactacgaagaggaatttaagccgaagaaggaaggtggtgctgcaggttcaggaagcctcttctggagaatcctcaacgtatgctctccagacttgaacaggaacataactgagatttttggaaagctgatcaatatatatagagccctgggagatgaccgaagatcatttagctattacaaggctattccagtgattgagaaattgccattcaaaatagaaagcgctgatcaagttaaagacctccctgctattgggaaatcattgaaagaccatattaatgagatagtaaatacaggaaagctttccaagctagagcactttgagaatgatgagaaggttcgaactgtcagcctatttggcgaagtttggggtgttggtcctgcaactgctctcaagttatatgataaaggacatcgtacactggatgaccttcaaaaagacgattcacttacaagtgctcagaggattggcctgaagttctttgacgatatcaaacaaagaataccccgacatgaggttagtgagatggagaagcttttgcaagaagttgggactgatatcttgcctggggtgataattgtatgtgggggatcatacagacgtggaaaatcttcttgtggtgacatggatattattatcactcatcctgatggtgaaagtcatgtaggctttttaccaaaatttgttcagcgcttgaagggcatcaattttttgagggaggatcttattttcagcatacacagcattgagggaactgattgtggagttgacacatattttggtctttgcacatatcctgggcgtgagctgcgccatcgcatcgacctcaagaaggtatacccaaggaacagacatgcatttgggctgcttgcttggactggcaatgatgttctgaatcgacgattaagaatactagcagattccaaaggctacattcttgacgacactggtttgtatcttgctacaccgggcagtggtggaaagcgtgggggaagatcagatgctataattaattgtgacaccgagaaggatgtgttcgatacacttggattcccctggttggaacctcacgaacgtaatctctag

SEQ ID NO: 12261 - DNA, 5622 bp, Oryza sativa
  Clone ID: TFbOSC423046j.C1.o3.fg
atggcggcggcggcgtggggcggcacgacgcagaagtgcgactcgtgcgggaggacggtctaccccgtcgaggagctcgccgccgacggccgcgtctaccaccgcccgtgcttccgctgcacccactgcaaggccaccctccagtttagtaactattcttctgtcgaaggtgtcctatattgcaaacctcactatgaccagatattgaaatcaaccggcagtttggagaaaagttttgaagggacatcaaaatcagctaaagcagaaaaatcgaatggaaacaaggggcaaccgaacagattctctagcatgtttgttggcacacaagacaagtgcgtagtttgtaacaagactgtgtaccctcttgaaaaggttaatcttaacgggagctcatatcataaatcatgcttccgttgcacccatggaggctgtactcttagcccatccaacaatgtcacacatgaaggcaaactttattgcaagacccatcactctcaattatttatggttaagggaaacttcagcaattttgaggatagtactccaaatgcaaaagtggatatcgagaagcaaccagaacatgaagatgctaccaagaatccaggaggcccaggtcaaggtgatgggctcactgagaaacctttagaaagtgaactcactcctgagaaaccgtcacaagacgatattgtggctgaaaagcaatcacaaagtagcgttgatgtcccaaaacaatcagaaagcagcacaacagttcagaggtcagaagaaggggaaagggttaccaagggtgagtcaaatagtcatgtagtcagcaagaagccattggaaagcagtgtagaaaagccattccagagcagtgcagttaacttacagccatcaggaagtagtgcagccgtaagaaaaccatggcagcgcaatcttcccacagataagccattgctgagtaacacaaccactgaaaagtcaactccaagcagtgctgccattgaggaatcattgccaagtaatggggttgatgcaaaacagccagaaagcagcactgccagcacagtggtaaaaaggccatggcaacggagggtagctacggagaatctaccgcagagcatttcgccatcagataagccatcatcaaccagtgcagatgatgtgaagccatcagaaaacagcaaattgatcagaaaaccatggcaacgtgctgtggctgctgaggcgcagatacagaacagtggaccaactgagaagtcatcattgacaaatgatacaaagccatcagaaagcaccacatcaattaaaaggccatgggagcacaaagtggtcaatgagaagccactgcagaacaatatagacacggagaagccactgcagaacaatacagacactgagaagtcatctagcagtgctatcgatgtgaagctggcagaaaccagtacaacacccactgtgccacaggaacacagtggaatcacggagaaaccttcacagaccagtgcagatgatgtaaagccatcagagagcactgcagcagtggttaaaaagcaatggcaacgtaacatcggattccagaaacagccccagagcagtgtaactgatgcaaagacacctgaaagcaggggaatgggcaaaagattgtggcagcgcaatgttccaactgaaaagcaatcgcaaagcggtgcgtcggttgtgacaccatcacaagttagtgtggctagcaccaacccgctccaaagcagcgtggttgtgaaaaagccatggcaaagaagcgtgtctagagaaaaagagccagagaaggatatatctagcaacaaaccgttacaaaaccgtgtacttgctgaagaagcagagaaaaccaatgtgactgctgataacaaatcacagatcattcaagataaaaagaacaatggtgctaccacagagaattcatcacaaataagtgaaagtgccaaaaaactaccacttactgcaaataaatcgcaagctgatacttccacagaaaaattgtcagaaagtgacatacttgctgtagcatcatctcagatcactgaaccatctaagaagccatcagaaaacactgctgaaaatgagaagccatcacagactgatattgctactgacgagctacccctgacccaaagtgtagaagccatgtcagaaccatctccaagtgatgcagctcatcaggaaatctccgagagggagatactgacagataaattaccagaaagtaccatggctgttgagaagctatctcaaactgctactctaaccgaaaagccatctaaagaagatgctgcagagaagctaccgcaaaccaatgaaccttctgagcagccacacgagagtgaagagactgctgagaagccacttcaaaatgaagctaatgctgaaagcacaacaaaacaaagtgatctcagtcttgagaagccacctcaggttgatgccaatgttgggaatcctaccgagcctgaaagtgatgccacttctggtgtgaactcatcagatgctcaaatcaggccaactgctgagcagttagtaggacctcaaggcattgtatctgccgagaagacatctgaccagatattagaagctaacaccgatccagctgctgaccagtcatcagagtcccaagatgttgcacctgctaaagttgcaacggagcaaccattagaaaatcaaaaggctgcagcttcagagcagccattggaacctcaacacgaagcatatgaagagaatccacaagagcataatagtgatgcaactgccaaggagtcatcagaacctgaaagagatactgcttctgatcagttggctgagcagccatcagaatctcgaactgcaggtgagaaggcaacactgcgtgaaagtgatgtggttaccgaggatccagcagaacctcaaattgatgcagctgctgaaaggtcagctgaggtgttatcagaatctcaaactggagttgagacaccagtgctgcatcaaagtgatagaactaacgaggttccatcagaacctcaaactgatgaagcttctgacaagtcaactgagcagccattggagcctgaaaatgatgcatctgtcgaggatgagaagccaccggaaatcgaaagtgatgatgtgcatgataaaccatcagaaagcaccccagatactgaaaccctgcctcataacactccaaagagtagcataagcattagcgaagctgcagacggcaacgtttctgaggaggcaccacctcagagcagtgcatccatagaaacgccatcagaaagtgccatagctgtcgaggaaccaaaacacgacgacgaggccagcataaagccatccgaagacagcagtgctcttgaggagccgccgcaggacgatagcgccagcgtggagccatcagagaacactataactcttgagaaggcatcagaggaagatgagggaagtgtaaagccatcagaaggcaatgatgctcttgagaaaacattggaggaggatgaggcgagtgccaagctaccagaagacagtacgacctttgagaagccatcggagaaagatgatgctggcaccaagcagacagaggaccctgtaactcttgagaaggaaccagaggaagacaagggaagtgtggagccaacacaggacaatgctggtcttgagaaaccgttggaggaagacgaggcgagtgcgaagccatcagaggacagtgtggttcttgataagccatcagtggaagatgatgacagcgccaagccatcagaggatagcatggaccttgaaaagccagaggctcacaaaccatcagaggaagaagatggcgcgaccaagtcatcaccggaggatgctgccgttgaggaggcgccattgcaagtcagcgaggaagggagaaggcgggagttctccatggctccgaagcggaagccgccggcgagggcggcggcggcgaagttggaccccgacggcatgttccgcggcgtctccgccttcgtcgtcccccacgccgtccagtctcgccgcctcgaggtcgcggctccaccgagcaatccatcccaacccccaccaactctctctcctgtgcttagggtttcctggctttcgtcgtcggtgcaggtgtggaagcagaggctggcgcagatggggggacgcgtccaggagaagctcgccgccaagggcggcggcggcgcggtcacccacgtcctggccgccgacgccaaggcgctgctccgggagctcgacgccgcctggctccaccgctttcgcgggagcgtggtgtcattcgagtggctggaggagtgcctcaaatccggggagaggctaccggagcacaagtttgctatcaactacgaagaggaatttaagccgaagaaggaaggtggtgctgcaggttcaggtgtgttgcagtctgcaaagaggagcaaaatatcatcagacggtcctgagaatcggaaggaaactgctgggggtaatcgagaatctcgagatgcaattgcacatccaaatgaagattcggatgttgtaaaggggcctagcacgtgtacaagtagccaaagtgcctctggagattctaaggaaaccatagcttctcaaaatgcattcaaagctgaggaagcctcttctggagaatcctcaacgtatgctcctccagacttgaacaggaacataactgagatttttggaaagctgatcaatatatatagagccctgggagatgaccgaagatcatttagctattacaaggctattccagtgattgagaaattgccattcaaaatagaaagcgctgatcaagttaaagacctccctgctattgggaaatcattgaaagaccatattaatgagatagtaaatacaggaaagctttccaagctagagcactttgagaatgatgagaaggttcgaactgtcagcctatttggcgaagtttggggtgttggtcctgcaactgctctcaagttatatgataaaggacatcgtacactggatgaccttcaaaaagacgattcacttacaagtgctcagaggattggcctgaagttctttgacgatatcaaacaaagaataccccgacatgaggttagtgagatggagaagcttttgcaagaagttgggactgatatcttgcctggggtgataattgtatgtgggggatcatacagacgtggaaaatcttcttgtggtgacatggatattattatcactcatcctgatggtgaaagtcatgtaggctttttaccaaaatttgttcagcgcttgaagggcatcaattttttgagggaggatcttattttcagcatacacagcattgagggaactgattgtggagttgacacatattttggtctttgcacatatcctgggcgtgagctgcgccatcgcatcgacctcaagaaggtatacccaaggaacagacatgcatttgggctgcttgcttggactggcaatgatgttctgaatcgacgattaagaatactagcagattccaaaggctacattcttgacgacactggtttgtatcttgctacaccgggcagtggtggaaagcgtgggggaagatcagatgctataattaattgtgacaccgagaaggatgtgttcgatacacttggattcccctggttggaacctcacgaacgtaatctctag

SEQ ID NO: 12262 - DNA, 1272 bp, Oryza sativa
  Clone ID: TFbOSC34548j.C1.o5.fg
atgctgagggcggtgcggcctgcgccgtcggcggcggcggggcccgccgcaccgccgggcgacggcgaggcgcgcgcctgctacggcatcgtggtggcgtgcgtgtcgctgctgctgctgtgcgcgctcgtctccgccgtcggcgtcgccagggccttcgccgccaccggggtgctcgtcctgctgctcggcctcgccggctggctcgcgcccacggacgccttcgccgtcgcgctggcccccgagctctacgcggggaacgccggcggcggcggcggtagcgcccgcgcggcgccggcggtgcggctgcaggtgcgccggtgcgcgtcgtgcgggctcgccgcccaggccatcgacgcgctgcccgcgttcgcgtacgagccccccgccgccgacgtcgaggacggcggcgagggcaagccgcgcggcggcggcgcgctgtgtgcggtgtgcctggaggacgtcgtggccggcgagacggtgcggcggctgccgtcgtgcgggcacctcttccacgtggactgcatcgacatgtggctgcacgcgcaccggacttgcccgctctgccgccgcgacctctcgccggagaaggtcaccgcgaaatcctccgccgccgccgcgacggtctcctccaccgacgtgctgccgccgcatttcgtaggaatttggcacgaaataaatcagttcaaatcatcggagaaatcgctggtcgggatgcccgaggcggcggcggcggaggaggaaggcggtgatggctgctcgacgaggctagggtgctacggcttcatggcggtgaacgtcctgatggggctgtactgctccatcgcctacgccgtgagcgccaccgtggcgggcgccgtcgccgtcgcggtcgcgctcctcctgctggcgctcgccggcaggctggcgcagacgacgggaggaggctccgccgcggcggcggcgtcggggcggcggcggcggctgctgagctgcccgtgcgcgtgcgggctgatggcgcccggcgcgggggggatcggcgtgctgccggcgttcgcgtacgagcccggcggcggcggcggcggcgtgctgtgcgcggtgtgcctggaggacttgcgcggcggcgagatggtgcggcggctgccggcgtgcgggcacctgttccacgaggactgcgtcgacgtgtggctgcgcgtccgccggacttgcccgctctgccgccgcgtgctcccgccgcgcaagtccgtggcggccgcggcggcggcgtcggccgctgtgctgccgcctgtctga

SEQ ID NO: 12263 - DNA, 621 bp, Oryza sativa
  Clone ID: TFbOSC15905j.C1.o2.fg
atgtcgttcaccggcacgcaggacaagtgcaaggcgtgcgacaagaccgtccatttcatcgacctcctcaccgccgacggcgtctcctaccacaagacatgcttcaagtgcagccactgcaaggggaccctctcgatgtgtaactactcttcgatggatggtgtcctgtactgcaagacgcactttgagcagctcttcaaagagacggggagcttctcaaagaaattctcgcaaggtggtaaatcttcagagaagagcgaccagggaagagctcctagcaagctatcttcagcattctctggaactcaagataaatgtgcagcctgccaaaaaactgtgtacccattggagaagctaactctggagggtgagtcttaccacaagagttgcttcaagtgctcgcatgggggctgcatcctgacgacgtcttcctacgcggcgctcaacgggatcctctactgcaagatccatttctcgcagctgttcaaggagaagggcagctacaaccacttgatccagaccgcacaatcgaagcagaaagagtccgaggaggctgcaccggtggcggccacagaggccagcgagaaagaacaggaagtgcccccacaagacgcgacatag

SEQ ID NO: 12264 - DNA, 331 bp, Oryza sativa
  Clone ID: TFbOSC17444j.C1.o1.hg
atgcatctggatgcttcttacttctcacttgctccagatctccttgatttggtgcagatgatcctgcgggcgctcaaggagcttccagatccgatcatctccagccgccgtgccatcgccaagtacatctccgacaacttctccggcctcccttctcacacgacgcgctcctcaccgttcacctccgccgcctcaggtcacagggccttctcctcatgtctggacactcgtaccttctctccacctccgccaccgccgctcgaggacggggacgaggacgaccgcccaagaaagcttcctcctccgcgccgcctcaaaagcgcggacccgg

SEQ ID NO: 12265 - DNA, 882 bp, Oryza sativa
  Clone ID: TFbOSC419704j.C1.o6.fg
atggcgaccgacgtggcagcgactgagcccgaggtggcggcggaggaggctgcggccgccgcgcctgagaccacggccaccgccggggattccaagccggcgaaggaggccaaggccaagaaggccgccgcgccgaggaaggcacgctccaccgccacccacccgccgtacgccgagatgatctcggaggcgatcgcgacgctgaaggagaggaccgggtcgagccagtacgcgatcggcaagttcctcgaggacaagcacaaggaccacctgccatccaacttccgcaagcagctgctcgtccagatcaagaagctcgtcgccgccggcaagctgaccaaggtcaagaactcctacaagttgccgccgacgcgcgcgccggccgcggccaagcccaaggcgaagcccgccgccgccgcaaagccgaagccgaagccgaaggccgcagctaagcccaaggcggctgccaagccgaaggccaaggctccagccaagtccaaggccgccgcgaagcctaaggcggctgccaagccagccgcgaagccgaaggcggcggctaagcccaagtctccggctaagccagccgccaagcccaaggctgcccccaaggctaaagccaagccggccgcgaagccgaaagccaaggcggctcccaagccgaaggcggcagccgtgacgaagacgaaggcgacctcggctcccgcccggaggccggcgaaggcggcgaagacgtcagccaaggacacgcccagcaagaaggcggcgccggcggccaagaagcccgccgccgcggcgaagaaggcgcccgccaagaaggccgcgccggcgaagaaggcggccgctccggcgaggaaggtgcccgcccggaaggcgaagaagtag

SEQ ID NO: 12266 - DNA, 1416 bp, Oryza sativa
  Clone ID: TFbOSC400493j.C1.o13.fg
atggccgccgccgacgaagcctccaagccgccgcctctcccgccctacccggagatgatactggcggcgatcgaggggctgaacgagaagagcgggtcgaacaagtcggcgatctccaagttcatcgaggggaagtacggggacctgccgccggcgcacgcgtcgctgctcacggcgcacctggccaggatgaaggagtccggtgagctcatcttcctcaagaacaactacttccgcgccgacgcgcccgacgcgccgcccaagcgcggccggggccgcccccccaagccgcgggaccccaacgcgccgccgccgccgcccaagccctcctcgccgcgcccccgcggccgcccgcccaagtccaaggaccccatctccgacgccatccccaagtcccgcggccgcccgcccaagaaggccaagacggctcccgcccctcctcccgccgccggcgacggctccgctcccgtcaagcgcggccgcggccggccacccaagttagtctggcctctaatggtggcgaccggtgttctcgttagcggcggtggtgggagttggtacctctgcgcctcgtggacggcgaatcgaagacatggcggtcaaatcatccccgagcaagagccccaaagtaagatagagtttccggatctggatggccttggtggtggtggaggaggagcttctggcagtggttgccgacaccctgctcgtgtgcgggtttgtgttggtggtggagacggagtctgcgtcgcgcctggcacttcggtggtcgtcgttgaggtggcgacggtctctgcgctgtcctcggcgttacgacgtctgtcgtcccccttcgccgtgcccgagctagcggtggcgttgtttccctctgtcgcacctatgctagctgtggcgccggcaggcgtcggcatgtgtgctatgatcggcgcttcttcctctgttggcggcagcggttggctcgtcgtcatctacatcctccttcaagccgaagcctttggaagccttgtgattgggtgtttgttctgctcaaaatcttatggttccatgttgcaggtcgccctctccttagccatctcaggcctcaaagcaagacagaagtctattggcagcctctcaaaagccccattgttgttggttggctggtctacgttttggccctctcttttgattcctagtagcagaagccgcacatggtttgtcattcgggttgagctcggaccccctgtgcaatttcgattgtcagggttgttagaattcctcagattcaatgacgaatcctatggggatgttttgctgagtccggtgacgctcacaccaaaaatctacggctcaacaaccaacctcgatcttgtgccgttcccgtggaggcaaccgaaggggattaacggtttgtcaagtggtgtgcacttcaactga

SEQ ID NO: 12267 - DNA, 918 bp, Oryza sativa
  Clone ID: TFbOSC400044j.C1.o34.np
atgggcgccccgaagcagaagtggacctcggaggaggaggaggcgctgcggcgcggcgtgctcaagcatggccccggcaagtggcgcaccatccagaaggatccggagttcagccccgtcctctcctcccgctcgaacatcgacctcaaggacaaatggaggaatttgagttttagtgcaagtggactgggttcaagggataaattaaaggttccaaggataaaagggccttcatcttccacatctccaagctctcagactccgcttctcgtcctacccccaaataaagttgctgaggcttcaccatccgcagatcctgagaaaagctctcaggatgtgaagattccaaagtacagttccatggtaatagaagctctttgtgaaattggggatccaaatggttcggatgttgatgcaatttgccactacatagagcaaaggcacgaggtgcaagcgaattttagaagattgcttactgcaaaattaaggaggcttatagcagcgaaaaagattgaaaagattgacaggtcctataggatcacagaatcttatgcagccaaagtttcgcaagcaaataagtctccaagtccaaagaaggatccagccaagccactgaaggcatcgcagaatttaggttcatttgctggtacgagtcctgccctagaagcagctgcagctgcagctatgaaagtggctgatgcggaggccaaatcacaccttgcgaatgagcacatgacggaggctgaaaggatcttcaagcttgctgaggagaccgagtctctcgttacactcgcaacagagatctatgaacgatgttcaagaggagagatattaacaataatgcaagtggcgcaaagcaattttgaattccaatctgttagcggcaacggcagcggcactggttctactgtacttgca

SEQ ID NO: 12268 - DNA, 894 bp, Oryza sativa
  Clone ID: TFbOSC400039j.C1.o45.fg
atgggggcgccgaagcagaggtggacggcggaggaggaggccgcgctcaaggccggcgtggcgaagcacgggacggggaagtggaggaccatcctccgcgacccggaattcaccgcgctcctgcggctgagatccaatgttgacctcaaggataagtggcgcaacttgagtgtcactgctggaggatatgggtcaagagagagggcaagggtagctttgaagggaggcaagcgagggcctaaggcccttgctgaaccgatggatgccgacgaaaagaaccctgacattgatgataatgcaatcattgatgcacaaccgttggcagtggttgttgagcccatgcaacttgagagtactccagagaaagagaaatcagttgctaggcttgatgaccttattttagaagctataaagaagcttaaggaaccgtctgggtctaatagaacaacgatttcttcatacattgaggagcaatactggccacctgaagattttcaacgattactttctacaaaattgaaagcattggttgctactggaaaattaatcaaggtgaatcaaaagtacaggattgcaccaagttcgaactcttcaggtggaaagagcatcaaggtgtattccactggagaaatgaacatagaaaataataatgttagacagctgagtaagccgcaagtggatgctgaacttgataagatgaaaagcatgagtaaggaagaggcagcatcatttgctgctagggcagttgccgaggcagaagcagccattgctgaagctgaagaagcagcaagggctgcagaggccgcagaagccgaggctgacgctgcaaaggcttttcttgatgctgttgtgaccacgatgcaaaacagaaatcatgcttctgcggtatactga

SEQ ID NO: 12269 - DNA, 2844 bp, Oryza sativa
  Clone ID: TFbOSC417639j.C1.o19.gm
atgtggggccgggtgtgtggtggggcccggttgtcagtggcggtgtgggtgttgactgttcgtctgggcgtggaagcttctggaaggggaagaaggaagaaatggaccgcggaggaggagtccgccctcaaggccgggatcgcaaagcacggggctgggaaatggcgcaccatactcaaagacccagacttcagcaacgtcctgcgctaccgctccaatgttgacctcaaggacaaatggcggaacatgaacgtaaccgtgaacgcgtccggtgcccgcgacagggtgaaagcgcccgtcgttaagaagccaagatccgctcctaagcatgaaggccactctacctctacagctattgccgcggtaacttcagatggtgatgatgatgttgcggagcctgtgcctcttgcaacgtctacttcatccaagagatccctctcgaggctagacaatatcatagtagaggcagtaaggagcttgaatgagcctacagggtcatacaagacagccatagctaattacatagaggagcaatactggcctcctgctgattttgatcatgtcctgtcttcaaaactgaatgatctgacagcatctgggaaattgataaaggtgaatcgaaagtacaggatagcccctagttcatctttgtcagaagggcgaagctccaaagtagtgctgctcgaagatataaaaaaagaaccaacaaagttagatagggaagatgttgcagtcctcactaaatctcaaatcgatgctgaattagctcggatgagaaccatgactgcagaagaggctgctgctgctgctgctcgtgcagttgcagaggcagaagctatcatggctgaagccgaagctgcagtaagagaagcagaggctgcagaagctgatgctgtagctgcacaagctttcgcggaggcagcaatggcaacatttaaaaacagaagttcagcaaaattggatgggttccatgaagctaagctccaagccggatgcattcacaaggcgagggcaagcatgttccccctgctttcaaagagtgccatcctgggaagattgattgaggagaattcagacagcgatgaatgtgtcatcatattgtctgacatccctggtggcgcaaaatcattcgagttagtggcaaggttctgttatgggctgaagatagagctgtcttcagaaaatgtcgtctacctacgctgcgctgctgaacatcttgagatgacagaagaaacatctggggataatctgattaatcagacagagtcattctttaaccaagtagtcctccgaagctggaaagattccctggaagcgcttcggacatgtgatggccttctccctcatgctgaagaccttcacattgtgaagagatgcatcgaatcattggctggcaaagctagcatcgatccggacctcttcggctggccagtctcggaacatagtaccatgcaaagccccgggggaagtgtcttgtggaatggcataagcacgggtgcgaaggttaggaactgcagttcggactggtggtatgatgatgcttcctccctgagcttccctacatacaagaggcttatttcttccatggagtcaagaggcatcaaacaggagatcattgcgggttcgctcacatactacgccaagaagtttctcccagggttgaataggcgtcaaagcaccggaccaatgcccctgccggctgctaccctgtctgatgaagaacagaggcgcctgcttgaagagattgataggatgttgccacttcagagaggtttaatatccacaaatgttttgctctggctgctccggaccgccatgatcctgaaagtcgaccgcgcttgcatttcaaacttggagaaaagggtcgggatgcagctggacgaagccacattggaggatctactgctgccaaacttctcatacaccatggacacgctctacaacgtcgagtgcgttcacaggattctcgaccacttcttggcaatggatcagaccatgggtggcggtggcgcctccccatgcttggatgatgtgatggcatctccttcgttggcaccgatcaccgctgtcgcgaagctgattgatggctaccttgcagagattgcacctgatatcaacctaaagccactgaaattccagtctctggcagctgttttacctgaatatgctcggccactggatgacggtctttaccgcgccattgatgtatacctgaagtcgcatccgacgctgcctgaagctgaacgggagcagctatgccggctgatcgactgccagaagctgtcgctggaggcgtgcacccacgccgcgcagaacgagcggctgccgctgcgggtggtggtgcaggtgctcttcttcgagcagctgcagctgaggacgtcggtggccggctgcctgctcgtctccgacaacctggaggcctcgtcgaggacgctccgcggcggcggcgcggtggcggcgtccggcgaggccgggtgctgggccacggccgccgtgagggagaaccaggcgctccgggtcggcatggacagcatgcggctgcggctgatggagctcgagcgggagtgctccgacatgcgccaggacatccgcaagctcggccgcggccgccgccgcctccgtggcggtggtggcatcgtcgccggtggcaaggacggcggcgggtgggcagcgcgggtgcagcggatgctgacgccgaggatgatgaagctgcagatgtgcagcgcgcagcatgacgccgccgagcagcagcggatgaacaatgagcacaagaaggtggagaaggtggccaagaacaagaagcagctgtccatggacgacggtgacgacgaggaggaggcctga

SEQ ID NO: 12270 - DNA, 567 bp, Oryza sativa
  Clone ID: TFbOSC400798j.C1.o19.fg
atggccaagcccgcctcccgcgctgccaagcccgcgtcggcgccgaagaagcagaaggcaaagccctccgccgccgccggtggctcctcccacccgccttatttcgagatgatcaaggaggcgatcacggtgcttaaggagaggaccggctcgagcgcgcacgccatcgccaagtacatggaggagaagcacggggcgtcgctgccggccaactacaagaagatgctctccatccagctgcgcgggttcgcttccaagggcaagctcgtcaaggttaaggcctcctacaagctctccgacgccgccaaggactcgcccaaggccaagcctgccgcccccgcccccaaggcagcagcgccgaagccagcgaaggacgccgccaaacccaagaaggacgccgccgctgccaaacccaagaaggcccccgccgctggcaccaagcgcaaggcgccggagaagaaggtggtcgccaagcccaagaagtctccggcggcgaaggcgaaggccaagcccaagaccgtccggtcgccggccgcgaagaagacccgcaaggcacctgcagcttga

SEQ ID NO: 12271 - DNA, 549 bp, Oryza sativa
  Clone ID: TFbOSC900103j.C1.o6.fg
atggcggcggccgaggcggaccccaagcccgccgccaccccgtcttacccggagatgatactggcggcgatcgaggcgctggacgacaggaacgggtcgaacaagacggcgatctcgcagcacatcgaggggaagtacgaggggctcctcccccccgcgcacccgtcgctcctcacagcgcacctcgcccgcatgaagaagaacggcgagctcgccttctccaagaacaactacttccgcggcgacgacccgtccctcccgccccaccgcggccgcgggcaggcgccccaagcccaaggatgttccccggccgcccccgcccgcatgggcgcccgccttccgcggcgcggcgggtctcttgccccgccccccgcgggccgttttgctacccccctaggacccctcccccccacggcggccgggaagggctcttccgcgtctgcccccgcgcacatgaccgctcccccaccaagagccaggggtgatcagtcaaccccccctttccgcgttcctcaacgagcattcatgttcccccccgccgcctcttga

SEQ ID NO: 12272 - DNA, 1827 bp, Oryza sativa
  Clone ID: TFbOSC26017j.C1.o2.fg
atgcagcacgggagaaggggagggtggcggaagggcgaggcggcggcggcgggtgaacgcggtggcgggctcgtcctccccgatcacactctccggcatggggaaaggatggcgcaggcggcggaccgcgcgggagaccagcggcaggcggtcgtggatgcggcgctcacgcggggctgggctggccgcgcggtcgtggttggcggcggggcaacggaggacagggagaggaggagatggttgagccaggggagcgcgggagggggagtggcggcctcctccggggtcgccgtcaacatcaccaccgggcccatgacggagacggaggacgacatggccgtcgccgaggaggaggaggtggtggcggcgtcggcggagacggaggagcacgtgcagcgcatcctcctcgccattgacgccttcactcgccaggatccacaaggagaggagagggtggagaggtgggaggacgagatccgggagctgcgcgcccgtgacgtcgccaatgagcaggcacgctccctccgccgccaccgctctcgcctgccgacgtcgcatcgttccagcccgccgatgccgcaccgctctcgcccgccgacgccgcctctccgcaaccgtgctcgcccgccaccgtcgccgcttcgcctgctctggccgccattctggtgcggcgacggcgcccggttgaagaggtgccccttgggccgccctgcgccgtcgcctccggccggcttgcccagtcgccagaagataagagaagaaccacaaccacaaccccccttctcctctcagatccgcgtcgcggcggccccaaatcccacacgcgcacagcgcagcaccaacgccggaaggagacagcgcccctcgcccccgccaccccaaccctacgagagggagggagccagccagccagccagccaggcatggccacctccacttccactggccaccgcgccgccgacctcgtcctcccctcctaccccgaggcacgctctctttctaaaccctagctgttcctggccagatgcccagatctgtggcggaattgaccgggtttcttgggttgtcttctccttctctttgctgcagatgatcgtggaggcgatcgcgtcgctggcggaggagaacgggtctagccaggccgccatcgcgcgccgcatcgaggcggcccgcggcggcggcggcctcctcccgccgtcgcaccccgcgctcgtcgcggcgcacctctcccggatgtcagccgccggggagctcgtcgccgtcgcgggtgggaagtacgcgctccgcccgactcctccgccgccgccgccggcggatccggcggcggcggcggcggtggcggaggaggaggaggaggaggaggagttcctcgccgatgatgactcggccgacgacttaccgccgcctcctccgcccaagcgaggccgcggccgtcccccgaaggtgcgccccccgggctacccggccgtacccgccgccgccgcacccgtccccgtccccgtcggtgcgccggtcgacggctccgtcgccgccgccgcccccgccgtgccgcgccggcgtggccgcccgcccaagccgcgggacccgcacgcgccgcccaagatcccacgcccgcgagggcgcccgcgcaagaaccctctcccggaagggatggtgccgccgccgccgacgcgccccggcgcgacggccaagccgcgcccgcagttcgccgagtggttgatttcaagcaagaactgcaaaggactcactgcttccctgttgtttgctgttgttcctgctgcaaaattgatgatggtcaatgctcattgtcttcagcttgatccataa

SEQ ID NO: 12273 - DNA, 1536 bp, Oryza sativa
  Clone ID: TFbOSC400747j.C1.o13.gm
atggcagcatcgggcatgaagctcgccgtggcggtggcgtgcgcgctggcgctcgcgtcggcgtgccacggcctgcagctgggctactacaagcagtcgtgcccccgcgtggaggccatcgtgagggacgaggtgaagaagttcgtctacaaggacgccggcatcggcgccggactcatccgcctcgtcttccacgactgcttcgtcgagggatgtgatggctcggtgctcctggacccaactccggcgaacccgaagccggagaagctcagcccgcccaacatgcccagcctccgcggcttcgaggtgatcgacgccgccaaggacgccgtcgagaaggtctgccccggcgtggtctcgtgcgccgacatcgtcgccttcgccgcccgcgacgccgcctacttcctcagcagattcagggtcaagatcaacgtcccaggtggacgcctcgatggccgccgctccctcgactccgacgccctcaacaacctgccgccgcccaacttcaacgtgaaccagctcatcggcgcgttcgccgccaagggcctcgacgccgaggacatggtggtgctctccggcgcccacaccgtcggccgctcccactgctcctccttcgtctcggaccgcgtcgccgcgccctccgacatcaacggcggcttcgccaacttcctcaagcagaggtgcccggccaacccgacctccagcaacgacccgacggtgaaccaggacgccgtcacgcccaacgcgttcgacaaccagtactacaagaacgtggtggcgcacaaggtgctcttcgcgtcggacgcggcgctgctgacgtcgccggcgacggcgaagatggtgtcggacaacgccaacatcccggggtggtgggaggacaagttcgccaaggcgttcgtcaagatggcatccgtcggtgtcaagaccggctaccccggcgagatcaggaggcactgcaggcaaccagcaacggagaagaagatcgacgtcatcatcgtcgcgatggcgttgcaaggcatggagcaagaagcagcagggcaacctcccgcctcggccgctttcccgtcttccgcggaggcggcggcggcggcggcgagcccgacgagcggcgggaagcgcatcgtcctccgcatcaggatcccgccggcgtggatgcccgaggaggacgcgtgcctggcgcgcctcgccgcggagaacggcttccgccactggcgccgcgtcgccgagggcatggcggcggcgcgctcggggcgccgcccccgccgctcgcccgggcagtgccgcgacaggtggcgcgaccacctcgcccgcgacgtgtaccaccgccccttcaccgccgacgacgacgccgagctcgcccgcctcctcctcaagcgcgacggcgacggcgagcggtcgtggaaggacatcagcagggcggcctactgccgcacgtcgcgcggcatgaggcggcggtggggggagctccgcgacagcgacgcgttcctcaggaagctgtggtgtcctcctccgccgccgatgcagccgtcctgctga

SEQ ID NO: 12274 - DNA, 1038 bp, Oryza sativa
  Clone ID: TFbOSC403480j.C1.o2.fg
atggtctccgccaaccagccgccgcccgacgcggccgcggcagcggcgggctcggctggggaggacgccagcaagaaggtgcggaagccgtacaccatcaccaagtcgcgcgagagctggacggagcaggagcacgacaagttccttgaggccctccagcttaatcataattactatgaaatgcttccaacgtattggtccccctatttgcatatgattgccaataatgtgttttggcgcaccaaaaacactgcatttgttgctgttgaattcaagtatctgtacaaaagctttgatcgtgattggaaaaagatagaagcttttgttggatcgaagactgttattcagattaggagccatgcacagaagtattttttgaaggttcaaaagaatggaacaagtgagcatgtcccacctccacgaccaaagcgtaaagctgctcatccataccctcaaaaggcctccaaaaatgagccaggatataccataaaggcagattcatcttccatgcttagagaactcaggcatgaatgccactgtttcgtcatggacacacaattctatcccaccaattgtagcctcatccatggtgaaaggtttgttgtccgtgttatgccagattttgcacaagtatacagcttcttgggcagcgttttcgatccaagcacaagtggccatttacagaaactaaaggagatgaatccaattgatgttgagacggcattgttgttaatgagaaatctctccatcaatttgactagtcctgattttgaagatcagaagaagttgctatcttcatacagtaccccgtctgatgggcttgagctaggaagcaccagaagctcagttctagctgatagaccattaagtgctccattcataatgtgtaagggtgcaaccgtgtacagtaggcttgcacagctggtgatggcattctcgtttctgtcatctggcagagaaggcactactgccccaagtgacccatggcatagccagaaacagaatgctccatcagtccatctgatgagatatgtgtga

SEQ ID NO: 12275 - DNA, 342 bp, Oryza sativa
  Clone ID: TFbOSC401124j.C1.o47.gm
atggagaagattatgggggaaaatgagatcaggacccgttcgcccgtttcaagacgagacatggcatccagctccaaggcctcgtcctcgtcgtcggcgtcggcggcgtcgtcggagtggacgaagcagcagaacaagcagttcgagcgcgccctggcggtgtacgacaccgacgccccggaccggtggcacaacgtcgcccgctacatgggcggcgccaagtccgccgaggaggtgcgccgccactacgagcggctccaggcggatgtcgagcagattgaggccggcggcgtgccgttctccttgggctacggcgccacgccacaggccggccgccgctag

SEQ ID NO: 12276 - DNA, 1266 bp, Oryza sativa
  Clone ID: TFbOSC404834j.C1.o14.fg
atgactcccgccgatgccttcctcatcctcgacttcctcgccggcaaccgcctcatcccccactccgtcttcaccaccctcctcgcctccctcccatccgtctcgccccacacctctcctcgcctccgcgcaggcctcgctctccgcgctctcgactccgccctctcgatctcggagtcgtcggagatggacgcccccaccctcctgcgcaaggcgcgggctgtcctcgcggatccagaccttgcccccttctttccgcagcacctcgctgcacccgcctctgccgacgacgccccggccgccgccgtggctcacctcaaccgccttctcgacgttgagtgggcgagcctccctccttcctcgctcgagatcgcggccgaacggatcgttggctctcaagccctccattcgtgggcaaatgccgaccacgcccaacgttcaaagcttcgtctactcgctgaaaaatactccacttctttgtatcagttttactcacccttagccgtttctgcagtaggagagtccacagcgcttgagattttagacacgcttcaacggccggatgcatccacaaatcatccaggaacgctgcctcaagttgataatgcaccggaaacaaacggtgcttctcattgtgctcaacaaaacgatggggccaagagcggtcttgttaaacaaaatgctgaagccgatcgtcctcaacaagatagcactcgacatcaacaagactcggtgcaaggagcatccaattcccaacttaaagaaagttcagtaacaatggaatctattagaggcacgggtcctgatatcacaggctttatggaagaagctacacctcgtgttgctggacagtttgcccctgacaacatcaagaaccatcaagtcacaggttctaagcgcagtttaatggagaggaatccgactgccagcacttatgagggggagcatttgtgtaatattatggtggtatctcatcgtatttttgaagtgcagtgggatggcagcgattccgaagggaaaaggcctgcagcaaagcgccggttacccatttttgaaaggacagcaaaaccttctcctacagctgcacataagacgagaaaaaagtggagcgagaaacaagaaaaaaccttgctggaaggggtggagaagtatggaaaaggcaactggaaagatatcaaaatggcataccctgatgtatttgaagatagatcgacagtagatttgaaggataaattcagaaatttggaaaggcatctatgcgcttga

SEQ ID NO: 12277 - DNA, 897 bp, Oryza sativa
  Clone ID: TFbOSC400903j.C1.o89.fg
atggagtggacggcggcagagctggcggaggcaaggtcggtcatcgctagggtcagcgacgcctacaactccggcgtaggcagcagcagcagcgcctgcgacaccaagcacgaccgcattatgagggagctccaggcgaggttcccgtcgaggaccatggtccaggtaatcgatctgtacgttaatctcacggtggagacggcggcgcagccgcaggacgccggcagcgccggcgacgccgccgccgtcgtccaccctacttttgccggcggcatgcccgttgtgaacaacaacgacggcatggtgcatggtggtgctgctatggaggtgggggcggtggcggtgaacggcggggacggtgaggtggtgaacccggacaatgctgatgacgatgtgctttggactgattatgagcacaggctgtttctgactgggatgcgtgtgtacgggcgtggcgactggagaaacatctcgaggtacttcgtcagaagcaagacgccggagcagatctccatgtacgccgacaactacttccacatgatggagatcgccgcggccatggaagccgacggcggcgacgacgacgacggccaccatgaaatcaataacaacaacaacaacttgggcggcggccagctgcacgccgtcgtcggcgccgtcgggcacggccccggtgccgggcacattgctccggcgaccccctccaacaacaacaccgccgccgccgccgtgaacaacaacgtcgacacaccgttctgggttccgctgctgtacaaccccgagatagagcagcggatgatggagatgcaggcgcagtcgcagaaggcctgggatgatcagcagatgaagatggctgaagctgcaactccaaaggaggagggagcagctgataagtga

SEQ ID NO: 12278 - DNA, 657 bp, Oryza sativa
  Clone ID: TFbOSC404185j.C1.o1.fg
atgcaggcaaaaccacttgggggttgtttggatcaaacgggaacgttcaggggtaatcgcttaagcacctcccaatttggagatatggatgatgagtataacgaacaagacaactgggacaacgacaggactgagaatcatgtggtcgaaaatacaaccaaacttaattaccattcatacatgaacagacaaacacgagccaaatggtccaaatctgaaacggacaagttttacgagggtcttcaacaatttggtagcgattttgcaatgatacagcatctcttccctgataagagccgtaatcaggtgcgacaaaaatttaaagctgaggagaaaaaacatccaatgcaagttcatgatgccataatgcatcgctcgagagataatttgtattttaaagaagtaatcaaaaagctcaacatcgaagatgtccagccagatatcaacaatacacatgaacaggagggtacatcaaatgaagaggaccctggaaataagaatataccgggtggattaattaatgaggaggaagaaaatggtttagattggtcagataaagagctggacatgcacagatctgaggtcgaagagaaggagcacgtttctacaaatgatgatgatgatgatgatcttggtgatgtttttgattggtactaa

SEQ ID NO: 12279 - DNA, 183 bp, Oryza sativa
  Clone ID: TFbOSC10045j.C1.o14.gm
atgcaacagatcgcggcgaggctgccggggaggtcagataacgagatcaagaacttctggaacgtgcggctgcgcaagggcaagaagctccggcagacgtcgtcgtcgttgtcgatggcggcggcggcgaccagacaccgcctcagcgaggctgaccggagtcgactgtcacggcgtggctga

SEQ ID NO: 12280 - DNA, 387 bp, Oryza sativa
  Clone ID: TFbOSC5376j.C1.o1.fg
atgctggcctcctacatccaggagcacggcgccggcaactggcgtgccgtgccgaccaacaccggggtgatgcgttgcagcaagagctgcccgctccggtggacgaactacctccagccggggatcaagcgggggaacttcactgagcaggaggagaagctcatcgtccacctccaggctctcctcggcaaccggagggatcatatggaggtgatttcaccaatgaaagatggaacatttattgattgggatattgttgacaatatatggaatcatgctttcagcttttatgctgaggagcatcctatgttgatagttgaaccatctacaaacacagggcagcaaagagagaagtatctattgactttaaagatcatgaaggcataa

SEQ ID NO: 12281 - DNA, 327 bp, Oryza sativa
  Clone ID: TFbOSC102271j.C1.o7.gm
atggccgtgccaagcctacaaatcgattcatcccgagtccccgaccatgtgactacgggagatgggctgcaggtgccggtgacgaatgagctcgtggcggcgcagggaacaggagcaggacaagatcttcctggacgccccgcgaccgcgacggcgacggcgccccacgaccacgagcagttgggatcctctccaaaattccaagcttccaacgtcttggcccaatccaatccccagccacaggtcgcggtcaccgccaagctcaccacacgggtatttgatggagttaaaggtttaattcgaggtggatttaggggttttttctaa

SEQ ID NO: 12282 - DNA, 330 bp, Oryza sativa
  Clone ID: TFbOSC412948j.C1.o9.fg
atgagttcatcatggacgacgaagcagaacaagctgttcgagagggcgctggcgacatacgacaaagacacgccgggccgctggcagaacgtggcgcgggcagtgggtggtggaaagacggccgaggaggtgaagaggcactacgacaagctgcttcaagacctgcaccacattgagtcggcaggccgtcagggttcccaatacggcggcagcagcagcagcaaatccaaaggtggcagcagcagcggggagcagagatatcggaacagagactggaagcagcaaccagggctccatagtggtgccgtgaaaagagcctctcagtattag

SEQ ID NO: 12283 - DNA, 123 bp, Oryza sativa
  Clone ID: TFbOSC400524j.C1.o37.gp
tgtgacacttacttgttgcccattgtagcgtgcaggttcatgacggtttcttcttcctctcgggaaaacatgccgtgcttcagccccggcctcaggtaattgatccatctcagcctgcaactc

SEQ ID NO: 12284 - DNA, 264 bp, Oryza sativa
  Clone ID: TFbOSC400935j.C1.o12.gm
atgtcttctaggtcaagcagctcctcccgcaacagcaacagtgtcaacatggactcagagtggagcaaaaaggagaacaagctgttcgaggaggctcttgcctactacggcgagggcgcgcctgacctctttcacaaggtgtctcgcgccatgggaggcaccaagacagccgatgaggtgcgccgccactatgagatcctcgaggacgacctcaagctgatagaggcaagaagagtcccgttccccaagggtggaagcatctga

SEQ ID NO: 12285 - DNA, 1083 bp, Oryza sativa
  Clone ID: TFbOSC401559j.C1.o1.fg
atggacgcgaaggacatcctcggcctccccaagaccgccttcccgtccgtccaggagaagaagccccgcgcgcccaaggagccgcagcggaagcccgatggcgtctcgcgcgaggtgtacgcgctcactggaggggtggggatggctccactcatgccgaccatcgaggcttcgcacctgaagcggcgaccagctgttgagaaggagaagatagcatggcagtggctacctttcacgtcctctgcacggactgacaaccttcaactttaccattgggttagagttgtaaatggtgctccacccactggtgactatcactttgcaaaatacaacaagaaggcggatgttctcaaatacaccgatgaggagtatgagaagtatttaaccgatcctgcatggagcagggaggaaacagataaactatttgaactatgtgaacgctttgaccttcgcttcatagtaatagttgataggttcccaactgatcgcagcatggaggatttgaagagccgttattattctgttactcgtgctcttctgattgctagagctcggtcatttgatgaagttgctggtaatccccttgtgaaggaaacattcaatgctgctcatgagaccgagagaaagcgtgctttatctgcacttctctcccagacaaaacagcaagaacgaaaggatgctgagattttagcagaagcaaaacgcattatggaaactcgtgctgctagcaaacatactgaggaagcgggagcactggcacactttgataatgttgatggtgtatctcccttgagcaacacacacccattgtcaactgctacacttccagctgcagcagtgaataactccatacctgcttcactgcgaatggtgaatttgaagcccaaggtcccgacgaaagcagtttgcgtcgagcatcttgaactacggaatgagatacttacactgcttaacttacagaagcagctgcaaaataaagaagctgaagtttcagctaacagagaaaattcctttacagaggcaccaagcacacctaaggatagtgccaagcagtggcaactgaagctcactttcaatacatga

SEQ ID NO: 12286 - DNA, 1284 bp, Oryza sativa
  Clone ID: TFbOSC411335j.C1.o19.fg
atggacgcgaaggacatcctcggcctccccaagaccgccttcccgtccgtccaggagaagaagccccgcgcgcccaaggagccgcagcggaagcccgatggcgtctcgcgcgaggtgtacgcgctcactggaggggtggggatggctccactcatgccgaccatcgaggcttcgcacctgaagcggcgaccagctgttgagaaggagaagatagcatggcagtggctacctttcacgtcctctgcacggactgacaaccttcaactttaccattgggttagagttgtaaatggtgctccacccactggtgactatcactttgcaaaatacaacaagaaggcggatgttctcaaatacaccgatgaggagtatgagaagtatttaaccgatcctgcatggagcagggaggaaacagataaactatttgaactatgtgaacgctttgaccttcgcttcatagtaatagttgataggttcccaactgatcgcagcatggaggatttgaagagccgttattattctgttactcgtgctcttctgattgctagagctcggtcatttgatgaagttgctggtaatccccttgtgaaggaaacattcaatgctgctcatgagaccgagagaaagcgtgctttatctgcacttctctcccagacaaaacagcaagaacgaaaggatgctgagattttagcagaagcaaaacgcattatggaaactcgtgctgctagcaaacatactgaggaagcgggagcactggcacactttgataatgttgatggtgtatctcccttgagcaacacacacccattgtcaactgctacacttccagctgcagcagtgaataactccatacctgcttcactgcgaatggtgaatttgaagcccaaggtcccgacgaaagcagtttgcgtcgagcatcttgaactacggaatgagatacttacactgcttaacttacagaagcagctgcaaaataaagaagctgaagtttcagctaacagagaaaattcctttacagaggcaccaagcacacctaagcgtgctaatagagatgttgatagaccctttgttcctgatactgttgggtttgcaggtgagagagcaggcaagcgggaccacaagcggaagatagtgctatggatcaactccattcttgcttggaagcttcccggcgtgcactttcaccaagagtttgctcccgtcggtagaagccgttcttggcttttgtctgtacagtgcatctgccctgagaaggttttcttcgtactcctcgttggaagatga

SEQ ID NO: 12287 - DNA, 3819 bp, Oryza sativa
  Clone ID: TFbOSC900117j.C1.o6.fg
atggaggctgtcgcatcatattgcttggatgtatgtggttttgcacaaagcagaatgatctacctcgcgccgccggaggagtccttttgtagccgctcccgcgttaaccgcccagctcatcccgcgagggtctacgttccccggaatccccaatttcgtgccctcgtcgtctgttggagatcgaggactcacctggcactcagggctgtgcgcattggattatttgtgaattgcgtctgcggtggcaatttgtgtgccacggagtgtgtgttaccatggaaagtgagaaatgtgaataaacgatatgccaaaataaatgaagattggcaggacaaagatgcaacaaatgtgcataaaagtaaagtgcgaaagaaaaaactgtctgacatgctaggttctcaatggagcaaagatgagctagagcgtttttatggatcctatagaaaatatggaaaagattggagaaaggtggccagttctatccgtgatagaacatctgaaatggtggaggctctttacaacatgaataaggcatatttatctcttcctgagggaacagctactgctgcagggttaattgcaatgatgactgatcactataatattctggatggaagtaacagcgatcatgagagtaatggttcaccaaaaacttccagaaagccacgaaagcgtggtcgtgcgaaatttcaatctgtgtcgaaggcttctgatacacaacatcctgatcaattgcaatctcaacctgcttcgtcaagctatggatgcctttccctgttgaagaagaaacgatctggagggaacaagccacgtgctgttggaaaacggactccacgagtgcctgttgctagtatgtaccagcgagatgagaagatagggccgacaaatagacaagccaaaccagatggtaatggtgatgatgaaggtgcacatgtagctgcactagctttggcagaggtgtttcaaagaggaggttcacctcaggattctcaaacgcctggaagatctggtgaccgtatgttcctgtctcctgtaaaaagtacagacagaaagaatgctgattcggagatgggaagctcaaagctacatggattccaagtagatgctgatttccctgaaggtagtttaggaagtagggaagcagagactggcgattatcccaaatatgcatcctatttgatgaataacgaaggttctgcgtctggcaagtctcagcaaaaggtgaaaagaactcagaggaggagaaagaaagctgcacggaaaacagatgatcaacttgaggatgacagagaggcctgtagtggcactgaagaaggccatagcgccaaaaagactaaagatgaatcagaggtgaatggattgggccgtaaaggaagatggccatctaagaaatcaaacaaaagaaatcgccagctgttctttggtgatgaaagctcagcccttgatgcattacatacattagctgatctatccgtgaatattcttcaaccttcttctatcgttgaatctgaatcatcagcacagattaaggatgaaaacaaagataatgattctgatgaaaagcctagtatgcctgcagcagtgtcagtacttgagaagaaagataaatccaaaagtacagtgaaaaaggttaaaaggcagtcagaactcgcaagcgctgacatggctgctcgcaaaaaagctagaattgccaaagttcctaatcgtgatggaatcgctatttctgaaacaaagcagctagattctaaatttggtgttcaaacagagaaaaagaaaagaaaaccttccgcggcaaagatttctaaagatgaaaaaagtgcacttaaagatgttgagaagactgagtggatggaaattagtgacttggacaacgtttctgctgaagaagggaaggtatcttctaataaagccatggatactgtggatacaacacaaggtgccacaactcagcaagctgacttagcatcaaagggtagaagtcgccgcaaaataggcattctgaaagcacttgctccagaatgtagacctactgatggtgctgatgatctccgaagtgataaattctcttacgctgtgaataatgtcattgatcttaaggactcactctctcattgcttatcttcacgtttgctccgtagatggtgcacgtttgaatggttctatagtgcaattgattttccatggtttgaaaagagtgaatttgttgagtatttgaatcatgtgaagttgggtcatgtgccaaggctgactcgtgtcgagtggggtgtcataaggagctcccttggaaaaccacgtcgattgtcgaaacagtttttgcaagaagagagagagaagcttgctcagtatcgtgagtctgtcaggcaacactatgctgaacttcggtctggtgttcgagaaggtctaccaaccgatcttgctcggcctttaggagttggacagcgtgtcatagcctgtcatcccagaacaagggagcttcatgatgggaatgttctgaatgttgaccataatcgttgccgggttcaatttgatcgacctgaactgggtgttgagtttgtaatggatattgattgtatgccactacatccactagaaaatttcccagagtctctcagacggcagaacattgttaacaaatattacaatagtttctcagaagcaaaattcgaggatcggtccaaagagttaggtactggaggtccaacaagattcacatcaaatgtgtgttttgatggtggtgatgcaacctccaacataccttctaattacccaataaatactttaatgaagcaagcaaagggtgacacggttgattcaattgcacaggccaaagttgcagtaaatgaggttgctgttgctgctcagcagtcaatgtacagtcagccgtgcacactgtcacagatacaggaaagagaggctgatataagggctcttgctgaactatcacgtgctcttgataaaaaggcaagtttgaaaggcttagtcctcatgttctctgttgaagctttgttggtagaattgaggcacatgaacgaagaggtgtatggaaggcaaaaggatggagaagcttttagagattttgagcacttcagaaaacaatatgctatggtgcttgtacagctaagagattctaatgatcatgtggcttcagccttgctttctctgcggcaacgcaacacgtatcatgggcatccagcacaatcatatcctaaacccatggaaaatggagccttaactggcacaccagacctgtataacctttttggctatattaatcaggaatctgggtcccaagtgatggaagttattgagacttcgaggtcccgagcaaaattgatggttgatgttgctattcaggcaatgtgcagtgtgagtgaaggagaggatgcttatgccaaagtaggggaggcactcgataatctgaacaatcgcagcactggctcgggttccagtatactaggcataagacggatacctcctgattctggacaggccaattcatctcatcaagataacaccacatctggccactttgatcctgcaacaaataacatttctagtccaagattgcccaatggttgcgattctgaaccgcaatttccctcagagttgatttcatcgtgtgttgctacgatccttatgatccagaactgcacggaaaagcagtaccatcctgccgaagtcgcgcacatcctggattcagcgctttcgcgcctacagccttgcagctcacaaaatgtaaccatcttcagggagatcgagatgtgcatgggcatcatcaaaaaccaaatgctggcgttgatacccaccccaagtggctag

SEQ ID NO: 12288 - DNA, 2622 bp, Oryza sativa
  Clone ID: TFbOSC400431j.C1.o41.fg
atgggtccagcaaaaggttctcgcacaattaccaagatcacaataaaggggtatgacgatcgacagcatgacgaggatccaaatagttcaagcaaggttaaactaaaaaagagaaaaatgtcagatttaggtcctcaatggagcaaggatgagcttatgcgcttttatgaagcctaccgtcgacatggaaaaaactggaaaaaggtcagtgcatctgtgggtggaaaatcagcagatacagtagaagccctttacagtgtgcaccggactttcttatctcttccagaacgtgaaggtactgccatgggatttgttgcattggtaactggtcatcacaatgtttcggatgaatccaagagtcataaaggaagtgatcaaacagttagagcatctgggaaggtacggaaacgtgaagctacagggcagaaagagaaggaagcacctcatgctcaccgctcctatcatgaaagaagaacttctggattatcttctttcaagaaaagatactatggagaacttgtcaagaacattccaagacatccttcagggaaacgtactcctcgtgtaccagttatttttcctgcagacatgaatgttgctcatgctggcataccagaaacagaaaatgccatcaactgtaccaaaaaggctagtggagctaccaataatgagcttgaatgctcatctcatggaagtcctggaatctcagaatcagccaagtttgttcaaggccagactttcctggaagctaaaggaactggaagcttgaaaaagagaagaattgagcagagtatggaacaaggtcagacaattaaagatgagcataaaaccgcaatggtggctaaagaagggaatgaccttactgaatatcagagacttaccaatctattttccccagatgagatgttggtcttagatgtcttggagagtttagtgactgtacccagtaaaatatcagagcctaagattaatattccttcaggtacacttggaagggatgattctgcattgtctcacagaagggaggaaggtccttcagttaagagatccaaacaagggaagcaagttggtgaatgcagtgcctccaagacaaggaataaaaggagaaagaagttaatagctgaagaggtgcctactgaaggagtcacttctaatcatttagatttgccagaagagcgtcaagttgatgccactgagtgcgccttgaattctgatctggaaaggggaacagttgatttacctgaatcaactgcaaatatttctaccaaaatccctgatttgccatcacaattaaaacctgagataaatatgtcgagaaggagcaaaagaaaatccaaaagtccttgtggttctaagtatgtcgtttgcaatggagcagataatttacaggctaggagattgcagcattgcttgtcatctgagtcacttcgtagatggtgtacatatgagtggttttacagcgcagttgattatccatggtttatggataatgagtttgtgaactacttgaattttgcgaatttgagccatctgtcaaggctcactcggtccgagtggagcacaataaggagctcacttggcaaaccccgacgtttttctgatcattttctggcagcagaaaaagataaacttgaaaattatcgcaaaaaagttaggcaatactatgctctactaagtgaagattcgtgggattctctaccaccagacctagctcgaccattttcaattggtcagcaggatcgttataatgtccagtttgataggcctgaccttggtgttgatgaagtaaaggacactgattgtatgcctgtaaactggttggataatctgcctgatgacctcaaaaagaggagcttcctttcaaataattcacacaacagagtagaggttgagcaaattccaaagtttacttcaaaagagaactgggatcatatcagcggagaggccgagccatccaaaaccatgcacataacttcagatgaacaggttgaggttttgctgtccaaatctatttttaagaagcattacgatcatagtctatctatccatgggcaggttgaaattgctgtggatattgaaagactatccaacaagagtacatctggtaattgtggaccattacagccgctccagtctgttgatgacaatgtacggagtagaggtttgtcagagcacaggaatggtcacaatgatgagctagattcttatattacttcctttgtccaaatgtcattggcacaagccaagcagatggttgacgaagccatgaaggaaatctctgagaatggtaaaagttctctagaagaaacaggcatatcaaatgaagcgacggattgtacaggcccagaaccggaatctgctgctaattctgaacttccgcgcaacctgatattcaactgcattgccacgcttcttgcaatcaagcattttagcgagggccgacatccacctcctaacatagcaggcgtcctggagcgtgcttgcttaatgctgcgaccaagctgtgcagagaacctgcccatctataacgaaatagagaattttatcgctgtcataaagaaccagatactagctcttgtgccatcggcatcaagcaatgccaggctacccatgtacatgtaa

SEQ ID NO: 12289 - DNA, 1437 bp, Oryza sativa
  Clone ID: TFbOSC421143j.C1.o4.fg
atggcgagcagagcagtggagggggaaggggagggggaggaggagggggaggggaagggtaacctggaggatgagtcacttattcaaatgattaacatatatgggcataacaactgggaaactgttgcacgcgctatacctggtcgaaatgcacaacaatgcagagtaagggagcatgcatctaaccacttcaaaaggctttctgaactaaaattgttaaagtcgcgtacaagcaggacaagtgctgcaatcaaagaacactggagaggtcctatgaaaagaaaattaaattcgtatttagcttcaggattgctcaaaaaatctcctggtctgcctgaaaatctatcagtttcgcagagtagtgactcaaatattcttcagcagtgtgatgtttcatctgatgagaataaactgttatcagatttacgaccaagcctaaaatctaaagaaggggtgagctcaaaatgtgatggttcatcttctgataatcaactgttatcagatttacgagcaagcctaaaatctaaaggggcaagctcaaagtgtgatggttcatctggtgataatcaactgttatcagatttacgagcaagcctaaaatctaaaggggcaagctcaaagtgtgatggttcatctggtgataatcaactgttatcagatttacgagcaagcttaaaatctaaaggggcaagctcaaaatgtgatggttcatctgatgagaataaactattatcagatttacgagcatgcttaaaatctaaacaaggggcaagctcaaaatgtgatggttcatctggtgagaatcagttgttatcagatttacaagcaagtttaatgtctaaacaaagaacaagctcaaaatataaacaaggggcaagctccaaatataaacaaggggcaagctccaaatctaaacaagggacaagctcaaagtctaaacaagggttcatagacctatgtgaaaatactgatacatcagaaggagaaagttctgagttgatatgtacagaaagaccagatcctgattcaggtgaagcttctcagaggataagggatagattgaattggcgtaaaagagcaaggaagaagctggttttcctgtcaagcccggtggagctcaaggtgtctgctgtggcagaatctgaaaggcacttacaggaaagtaaagaaatgagtccagaagttaacatcgtttctccaccagctgtactccaaggtttttcaccagaagttccatcagtatgtgaaaagattgtcgaaccaccactggctgatttcaaccaagctaagaatgtttgttctttggagacctcctcagacccatgcacactggagcaacatctggcgaatgtctcagatcttctagacatgtcatacatcgatggcttgatgatcattcctccttcaggttgcccatacgatggtgatttcatatga

SEQ ID NO: 12290 - DNA, 264 bp, Oryza sativa
  Clone ID: TFbOSC401872j.C1.o1.fg
atggcggcgtcgtggagcgagagtgaaaacgcgaggttcgagcaggcgctggcgacgtacgacagcgacaatcccaaccggtgggagctcatcgccacggcggtcggcggcggcaagacggccgacgacgtcaggcgccactacgaccacctccaacacgacgtcaccaccatcgacgacgaccactcccacgccgccggcgaagccctccccaacggcaacaacaacaataatactaacaaaggaaaccgaaaccaggcatga

SEQ ID NO: 12291 - DNA, 1026 bp, Oryza sativa
  Clone ID: TFbOSC21837j.C1.o42.fg
atgggggagggtgatgcagggcaggaatcctaccatgctatgagcaaatcacggccaccggatcagtactggatggacggacaggatctgtgcaggaagcccgcgtggaaatcggctacgcgggccaaatcgccccccatcgattttgaagcccacgagacagaagaggaggaccggattataatcgccgctcatgctatccatgggaacaagcgggcatgtattgcaaagcttttggatgggagaaccgacaatgctataaagaaccacttggaattctactctgaggcgtcgatccttcaacgatggtcgatgcaaacatggttgttacaagggatcttgaatccgggagtgcaatctgcaagcgttcccccagagttcaagatcttccgaatcccccttactcggaacggtggcggtggcggtggggacgaggcggaggggaacggtggcggcggtggcggttggggagcggcagcgacggcggtcgggagcagcggttgtggcctcgtaaggacgcccgatggcacgacaaagttgctgatctggagcacagagatgttgtacggcaccacgacgaccaccctcttgattgtggcgttcaccagcgcgctgcgcgtgaaggaggagctcgccggcgacgagctccatctgtctgtggtcatcgttccggctatcccggcgctaggctcaggttgcgcgcgctcctcggtcatacatgtgatttccactgatgcacgagagaggaggcgatttggtcggatggcgatttcatcggcgcggctgccggtggagtggattccttcgtcggagagatccccgagcctcgtatcttccactgctctatcctcttccgccttcgcctttgctgctgctcttcatgtgctgccaccacctcttcgtccttccctagccgtcattgccattggccgcaccaccatctatgaggacgctggccggcgtcgtactcttcatctccaccatgctgccgctccctctcctcacctcaccccttcccttctctag

SEQ ID NO: 12292 - DNA, 1169 bp, Oryza sativa
  Clone ID: TFbOSC102044j.C1.o1.gm
atggtggaggggagagagcgtgaacgtctctcctccttttgcagaagaaacaccggggcggcgttgagtgatcagttggccggcagcgggcgaagcggcgatgggggagcctggcagcggagcagcggctggctgctggcggagcggacggcggtggccagtgcgccgacgggcgtcgactcgctgctgctaccaccaccatgggcaactggcgtctcgcggctgccggtgagaacacggttaggttggagagaggatctggtagttgatgcccttgctgttgtgcggaggtggatgcggctgaggagctcctctgtcctcgagagcggcggcgcggcgacagagggggagagaggtggccggcggcggagcggggacggcggcagcgggagagggagagagaggcggtccgcccgatggcagcggcgggagaggaggaaaggtggcggccggctcgacggcgagctcggcggcggagatgttcgaacgcgccgggtgctcgaccacagccccgacctcaagcgcggcaacttcaccgacgacgacgacgagctcaccatcaggctccacgcccttctcgggaacaagtggaacacgcgcatcaagctcaagctcttgagccagggcatcgatccgcagaagcatcagccagttagtgcccggaccagcgttgctgcggcaagcgagctaaccacgacggccagcactgtcagctttccgcccctagcaccggcgccggtgcgagggagctcaaggaggaaggagggaaggctgggaggggtcttcctcgtagtcgtcgctggcggcagaagggtcgccgcgtgctcgcccattgccgctctgccaccgcgctcgccctccgcttctctgcccgctgtcgcgctcgcgctccactgctcggcccgccgccgctccgctgccgcgctcgccctccgttgcgccacccgcatcctggctcgcactccgccgctccacccgccgccgcgctcgcccatcgccgctccgtcgccacgctcgccctccgcttctttgcccgccgctgcgctcgcactccactgctcggcccgcctcgctcgcgcccgcggccgctccgctgccgcgctcgtcctccgctgcaccacttgcatccgcgcgcgcttctccgcctaccgccggcctccctcactaaa

SEQ ID NO: 12293 - DNA, 2109 bp, Oryza sativa
  Clone ID: TFbOSC101063j.C1.o16.fg
atggacgcggcggcggccggcgggggcggggcggcaaagcggaagcgcagcttctccgaggacgacgcctacctcatcctgcacaggtaccagccggcgacgatcctgacgatgctgcaggagatggggaagcaggtgggcgcggggaaggggatcgactggagggcgctggtgcggaggacgagcaccgggatcacctccgcgcgcgagtaccagatgctgtggcgccacctcgcctacggccacgagttcgtcgagagcgtcgagcccgcctccctgccgctggacgatgggagtgatctagaatgtgagattgagattgtccctgctccgggtaatgaagcattagctgaggccacatcgtttgccaagactattatcaccggatcttcacgtgaacaaacctctggtcaacgtgtcaactcagaagctgctgcgctaaacactccaaatgaaaagatagtgcgtgttccatctgataaacagcttgtgcctggtcaccgtctaacaaacggtacaggtccggtttccagctcaaagcagccctcccacacaggctcatctcctgatcctttggaccctaatggacatcccaaaaagaaaaagaagcctaaaccatggtccagagaggaggacatggaactaggagcaggtgtacagaagcatggtgaaggaaattggatggaaattctgcataaatataaatttgatagttcaaggacgcatcttcaacttcaacagagatgggcgcttatttgcaagcgtcaggggtcaaccaagcctgctacccctaaaatacccaatgttatgtcggaggaactaaaggcagcacaaaaagcattttcattggccattgggacgaccagatcgtctacattaagaccaggaggtgtgccacatcacaatccaatggttactactacgaatcctgaggtgaaatctgttacagcaccttcaccattgccggtaccggtgcatgttgttccggtgcctgttccagtgcaaccagtacaagtgcagttaccaccacctcagttgcatcaagcacctgcgcaatctgcacctccacctccaaaagtatcaaatgcttcaaataagtcacgaaataattctaagaaacaagttgcccaatcaattcctgtgaatggccctttgtcgatacaagaggcagctcttgctgctggtgggcgaattgccgaaccaagtgttgccaccaattttttaaaagctgcacagtccacaaaagctgtgcacataagatctcgaggaacaggatcttcaaaatcttctacgggatctaaaacacctactgtggctggtgaacctgggacacagcttggcagtgatcaacacctagaattacaaagtactggtggtccatctcaagttttgactgcacatgcaactgaacaagttcataatgtttcagaagtcgctggggttaatcctctgggacaatccgctggagtgcatttatcagaaactaagaaagcactgaacaccacaccagtgtctggatcttctgacaaaatggaaatagatgacaactctaattattttgcagtcacaatggaggacttgttccctgaggatgtgaagcaggaagatgttcaagatcccaagattgaggaggccatagaccccaaggatgcagacatgttagaatttgatcgctttgtggcccaaggatgcttaaataaggataatgtggataagagcaaggctgccaagattgctccagaagctcaaagcgttattggcagccagaaaaaacagctgaagacgctgcccacagttggcaaaagcaaccctgtatttgctggacctccagcaactgcgaaaaagaccaaagctccagttccacagggtgggatgtctagcggcatagttggcgtgctgaatagatcattaggagggaaggcacctgctcctgctaccacaggcacccaaagtactgtccagaagcagcaaagcatgagctcaaagggcaacttgttagtgcccaagaatgtggcgcctggcaccgtaacaccagccaacaaccgggccaacacagcggtgaacggggctagcaaggtgaatccaccagccagccagaagccagcctaa

SEQ ID NO: 12294 - DNA, 719 bp, Oryza sativa
  Clone ID: TFbOSC900320j.C1.o9.np
atgcaccgatctcctttctgtacgtggccggcggcggagcggggacggtggcagcgggagagggagagagaggcgatcgacgcgacggcggcggcgggagaagaggagagtctctccctccccaaggcgatggggctgctccgctgccgaaagagctgctgcctccactggatgaactacctcagccccgacctcaagtgcagcaacttcaccgacgacaacgacgagcttaccatcaagctccacgcccttctcggcaacaagtatctgctccggttagctcttcttgtgttcttggtgctgattgattggttctgcaggtggaacacgcacatcaagcgcaagctcatgagccagggcatcgatccgcagacgcatcaaccggttagcgccgggaccagcgttgccgcggcaagcgagctgaccacgacggccagcactgtcggcttcccatccctgcaggcaccggcgcccgaggcggcggtacgcgtccttgatctcccgcgcgctggcccccgcgtggaggccgaggacgtcgtagaacgaggcggcggcggcggcggccacgtggtccggcgcgacgacggaggtcgacggggagaaggaggccgagagcggcggcggcgcggcgtggaggcgcggggagggcggcggcgaggggttcgtcgtgggcgacgccgccgcgggacggaacgcgaggaagctggaggaggacagcg

SEQ ID NO: 12295 - DNA, 306 bp, Oryza sativa
  Clone ID: TFbOSC409191j.C1.o3.fg
atgagttcatcctggacaacaaagcagaataaggtgtttgagagggcgctggcaatatatgacagggatacgccagatcgctggcagaatgtggcacgggcagttggtggtggaaagtcagttgatgatgtgaagaggcactatgaaaagctgatcaaggacgtggatcgcattgactctacaggaggccatcaaggatcccattacaacagctccaatgctagcagcagcagcagcagcagcagcagcaactctcggggcagtgccaatgaggaccagaggaggaggtaccacaactttcagtga

SEQ ID NO: 12296 - DNA, 336 bp, Oryza sativa
  Clone ID: TFbOSC413644j.C1.o7.fg
atggcgtcggcggccggctcgaagcagcagcaggcgatgatgtcgttgccgtcgtcccgcggcggcggcggcggcgggtggacgcagcggcagaacaagcagttcgagtgcgcgctggcggtgtacgacaaggagacgccggaccggtggcacaacatcgcccgctacatgggcggcgccaagtccgccgacgaggtccgccgccacttcgaccacctcgtcgaggacgtctcccgcatcgagtccggccgcgtccccttcccccgctactcctcctcctcctcctcccgcggagccgacgacggaaacagatctaggtacctgaagtatcagtga

SEQ ID NO: 12297 - DNA, 1560 bp, Oryza sativa
  Clone ID: TFbOSC33166j.C1.o2.fg
atggcggacggatcggacggccccgacgtgtctccggcggcggcggcggcggcgggaggaggaggtggaggtgagatctgggggacgttggaggagctgctcttggcctgcgccgtgagcaggcacggcacggggagctgggactccgtcgccatggaggtgcagacgcggagccccctcgccgcgcgcccgggcctcacgcccaccagctgccgcctccggttccgccacctccaccgccgcttctccgtcggcggggcggcggaggaggacgacgacgacgaggaggcggaggagggtggccccgacgcctccgccgcggacgggtggatggacgagctccgccgcctccgcgtcgccgagctccgccgcgaggtcgagcgatgcgatctctccatcggaacgctacagacgaaagtgaagcggctgagagaggagagagaacaaagcatccacggcggcggcggcggcgaggggaagccggagacggcgaacggcgacgagcggctgtcgagcgaggagcccggccggtcgtgcagggagtccaattccacagatctgaaacccgcggcgcgcgccggtgaccatagcgtcaaggcggaggaggaagacgaggacgcggcggcggcgaagcagcaggcctccggcgagtcggtggccgcgtccaaggagagcagcgacctgcggagctcggtcagactgcgccgccgccgctcgtacaagcccggcgccgacgaggacgccgacggcgaggaggcctccgcgctgcggccgccctcgcagtcgccgtcgtcgtcgtcgtcgtcgcagccgctcgccgcgctgctcgacacgttcgccgccaggttcggtcccctgctcgagcggctgcacgaaagccaggagagcgacgcgtaccgtggcgcgatcaggcgccacgtggacatcgagatggccgcggcggcggcgaagaaggaggagagcgcggagaagggtgaggccgccgaggaaggggaggggagcgacgacggcgagaagaaggtctccgtgtcggcgtcagcgagcaaggacaaggcgtgggggttgaggacgaagaaaggccgcggccccggcaagaactcggccagcgtcggtggccggaaaatggccaagctctcggaagcgacggaggcagcgaccgacggaagcaagaagcccgacaagaagatcgccgccgacgcagccacgcccgccaagaagcggaacgccgtggacttcctcaaacggctaaaccagggctcgtcgccgtcgaagaagaagaagaaaggctcaccaatggggacacggaagcgtgctgcggcggcgacgtcgccggagcagccgcagaagacgcgtaaggggcccggcaggaaggatgccggccgcggcggctccaagaagggcggcaagagcgccacgccgaagagaagcgtggggcggccaccgtcgaagcgaggtgccgccgccgcaacgacgccgccgccgtcgaagagggccaaggtgaaccggtcggagaagacggcggcgacggcgacggcggcgaagcggggtgggaggaggtag

SEQ ID NO: 12298 - DNA, 1944 bp, Oryza sativa
  Clone ID: TFbOSC33171j.C1.o5.fg
atggcggacggatcggacggccccgacgtgtctccggcggcggcggcggcggcgggaggaggaggtggaggtgagatctgggggacgttggaggagctgctcttggcctgcgccgtgagcaggcacggcacggggagctgggactccgtcgccatggaggtgcagacgcggagccccctcgccgcgcgcccgggcctcacgcccaccagctgccgcctccggttccgccacctccaccgccgcttctccgtcggcggggcggcggaggaggacgacgacgacgaggaggcggaggagggtggccccgacgcctccgccgcggacgggtggatggacgagctccgccgcctccgcgtcgccgagctccgccgcgaggtcgagcgatgcgatctctccatcggaacgctacagacgaaagtgaagcggctgagagaggagagagaacaaagcatccacggcggcggcggcggcgaggggaagccggagacggcgaacggcgacgagcggctgtcgagcgaggagcccggccggtcgtgcagggagtccaattccacagatctgaaacccgcggcgcgcgccggtgaccatagcgtcaaggcggaggaggaagacgaggacgcggcggcggcgaagcagcaggcctccggcgagtcggtggccgcgtcgaaggagagcagcgacctgcggagctcggccagcctgcgccgccgccgccgctacaagcccggcgccgacgaggacgccgacggcgaggaggcctccgcgctgcggccgccctcgcagtcgccgtcgtcgtcgtcgtcgtcgcagccgctcgccgcgctgctcgacacgttcgccgccaggttcggtcccctgctcgagcggctgcacgaaagccaggagagcgacgcgtaccgtggcgcgatcaggcgccacgtggacatcgagatggtgcggcggaggctggacgcgtcgccggccggtggcggcggcggcggcgccgccgccgccgagttctaccgcgacctcctgctgctctgcgccaacgcgctcgtcttcttcccgcgcgccgggccggagcgcggcgccgccgcggaggcccgcgcgcttgtgtccgcgtcgctccgcctccgcgagccgaagcaggagcctggcaccgccgccgccgccgcggtggcggcggcggccgggtcccctccggctgaggatacgcggagagctgagggcgtcgtctccgtcggcggcggcggcggcggcgctggcatcgtcgggtcgctgatcgagaagggagggaagccgctcatcgtttgccggaagcggagctccatcgcgaaggccgcggcggcggcgaagaaggaggagagcgcggagaagggtgaggccgccgaggaaggggaggggagcgacgacggcgagaagaaggtctccgtgtcggcgtcagcgagcaaggacaaggcgtgggggttgaggacgaagaaaggccgcggccccggcaagaactcggccagcgtcggtggccggaaaatggccaagctctcggaagcgacggaggcagcgaccgacggaagcaagaagcccgacaagaagatcgccgccgacgcagccacgcccgccaagaagcggaacgccgtggacttcctcaaacggctaaaccagggctcgtcgccgtcgaagaagaagaagaaaggctcaccaatggggacacggaagcgtgctgcggcggcgacgtcgccggagcagccgcagaagacgcgtaaggggcccggcaggaaggatgccggccgcggcggctccaagaagggcggcaagagcgccacgccgaagagaagcgtggggcggccaccgtcgaagcgaggtgccgccgccgcaacgacgccgccgccgtcgaagagggccaaggtgaaccggtcggagaagacggcggcgacggcgacggcggcgaagcggggtgggaggaggtag

SEQ ID NO: 12299 - DNA, 885 bp, Oryza sativa
  Clone ID: TFbOSC900351j.C1.o10.fg
atggcgccccccaatcgccccgtcgttgtgcccctcctctctctctctctctctcgcacacccccaccccgccgccgcctccgcctccgtacccctacgccgtgccatcgcgcctccaccactcgtcgcgccctccacacgccgccgcatcagcgcacgcgtcttccccctctctcggtcgctccctccgcatctcccctcctcaacccctcgatccacgtcgccgcagccccctccctcggtcgctccctccgctttcctcccccgcatcgctcgcgctcgctatccaaccgccgacgccactcctcccacctcttcgccgcgccccgccacgcctccaccgccggcgcccccatcgccacgctgcgctactccgcggtgctcgggattgaggccgccgtgctcgttggcacagctcgggactccacctcgtcgccgatcccgccctcttccactggagctccctcgctagcccgatgcaactacataaatgcaaataaatgcaagctgcagaggaagcaatttccggttagattgagctttgcattgaccatcaataaggcgcagagtcaaacaattccaaatgcaggcgtctacttaccggagcctgtcttctctcatgtagtaaacattactttcggtgggattttggcaaggcctatatacaccattacagactatgacaaaggaaatttggatgcaggcatgtcacaaactgatttcatcattatggaatctgcagaaattccaggctttggtggtactagctggactgaccaggagaccttgcttcttttggaagctttagtaattttgcaagcaaaatggggtgacattgcagagcatgttgatacaaaaaccaaagcacaatgcatgctgcactga

SEQ ID NO: 12300 - DNA, 765 bp, Oryza sativa
  Clone ID: TFbOSC3807j.C1.o1.fg
atggacgtcgctaagcttcgagctcacaggagttggttgagggtgaggcggtggcaccagcaagtgaccacactgccgcgtccagcaatcgcgagcatacaggggaggggaatggcggccaccactagcccgtgcctgccgagaatgacgaaacacaagcaggccccagcagcggaagagggggatgagaaatatccaaagttgattaattcatgcagactgccctttactcatatggttattgatgtgtcctaccacttgattttaatttgcaggctgttccttcttggacttgagaagtacggcaaaggcgactggaggagtatctcaagaaactttgtgatctcaaggacacccacccaagtagctagtcatgcacagaagtattttattcgcctgaactcaatgaacagagagaggcggcgatcaagtatacatgacataaccagcgtgaacaatggagatacatctgctgctcaggggccaatcacaggtcagccaaatggcccatcagcaaatcctggaaaatcctctaagcagtctctacagccagcaaatgcgcctccaggcgtcgatgcttatggtacgacaattggacagccagttggtggtcctcttgtgtccgcagttggcactcctgttacacttcctgttcctgctgcacctcatatagcctatggcatgcatgcccctgtccctgaagctgtagtccctggtgccccagtaaacatgcctccaatgccctaccccatggggatcctctag

SEQ ID NO: 12301 - DNA, 273 bp, Oryza sativa
  Clone ID: TFbOSC413644j.C1.o6.fg
atggcgcagcaggcaagggcgcagtggccgcagaagcagaacaagctgttcgagcaggcgctggcggtgtacgacaaggagacgcccgaccggtggcacaacatcgcccgcgccgtcggcggcggcaagtcggcggaggacgtcaagcgctactacgagatgctggaggaggacatcaagcacatcgagtccggcaaggtccccttccccgcctaccgctgccccgccgccgccggctaccaggccgaaaggttgaagcatttgaagatctag

SEQ ID NO: 12302 - DNA, 2799 bp, Oryza sativa
  Clone ID: TFbOSC900286j.C1.o9.gp
tttcaccaaaactccagcaggcaaaggagtaaactcagttaggaatcattaccacattacaatgatctgtgtgaggtttctgcataaatactgatagacataccaacaaacatccttgtcagccagcggacagcatgaccaacacctctagcaaaacctacatcactgttaacaggtaaaaactatcaagtatggagcggctgcagcaaaaaagaaaggtacaaaaagttaataccagcgataaatttaaacgaacttctactgcaaatcctacaacaatatggacaggaaagccattcactttcccatgtttagtttcatcccaagttacaaaaactaagtatgatacagagagcaagaaagcattgcactattgccgctaccaacactacagacgctacctgcttcctatgtctttccatgtatccacgtcgttgctgctgctcaacatcttcgaaccagagccgtactgtgccttgagagcagccacagggtcagatacaccgctaaccaggaccccagcacccccaagcctcccaggctgctggaaccccgaaaggagttcgattccattcctcttatgaagatcggcaaagttttctagtagtttgtgatctgatgtatgtggcggcattgaaggttgctgaaattccgcaaacacgctgagcgcgccatttttggttgagtaaactggtacaccagctgacggtctctgacactttgccaccataaccataggctcaggctgtattgttcgcccatccatatggtcaaaactcctcatcgctctctcctctagccccaagttagcaatgattggaggcctggaagaataaaccaggcgttcccttggattactcaacaacctagaagaagctggcttatcaacctttggtgaggggggcttgcttttgcttccatgaactgatgaaccagagctttgcaaggatgattgatggctaagaatttgcccaaacaacttgacatcaccaggccgcttttgctgctcctcattcccagcacttgtcttgacagaacaaggcctaaacaagccttcacgtgcttcctctcttctcccagtcgatagaaccccaagatttccattcgaaaggcccaagctgctgggcctgccattctggaatttcgatactgtgaactggtccgactgggaaatgcctgtgctttcagataagccacatacttcagttccaaagtgattatttcgtctctgttgcatgtacccatcgacattagaaaacagtgcatcatgacgattactggactggtctttaaatgttgggaacatgttcacatcttttgcccctgaagcaatgctggctctgttgccatgatcctcaaaattgggtgtagttatggcagctataccctcaaaacagattgaggtaggatcaggcagcgacgaactaaattggacaggcattaaatcctttggggtaaggggcttcggttttgattggattggatctgccagcttactttgctgataatttgaagtaaatgcaggactaatggaggaagcaccatccatgttcgagaagtggatgatattttccttactaaccccattttctgcaggcaagcaaacagacggtgttgattttccacctttaccaattgtactctcatgtgaacatccttcgatcctggaaacatcaatgccaatcccttcagaatgtaaactggatctactttccacatgcgctgccgcaacctgttcaactgaagtggccatgagatcatctccatgcatgttcactggtgttacatcctctatgtcttgcagcttatctgtgctctcaggacagttgatgtcgatacgagcacatgatgtttgattaatgtcttcacgtaactgtttatgatcaacaagaatgctgcagtctttttctgctttgctttcaccttcctcgacatttatgtccacaacatcaggcatgtttgatttgtcagcttctggctgcctagaggcaatatcagaaagaggattatgtccttgaatttctccatcagaaacaggacatgcatctatctccactttaggacatgactgtgcactacagatagctgaatccatctcagcaatacaggctccatctgtaccactccttcctccattggcatcacctgtagggaaaccagcatcagcagcaccttgatggatcagatccaaaccaagtgatttccgagccttgctgaaaaaaaccttgcattgttcaaatgacttgctcttcacgtatgacgaaattcgagcgaaatccttcccatatctattcatagcctcaataaaacttgacttctcatcatcattccaatcaactatgtcaacttcacactcctgatctgagagagtgccgtcatcatcaaagtttttatctgcttcaggagttaaaagatgctccattcttgagatgatccctatcttctggccaggatcagcagaactggtaatgcatgagcccatgccttctggggagagagttccacatatgcctgccaagacatcagcagctacagattctctctcgtgcaaagaaacatccccaacacaatccttctcggatcctttggtagaattatcaacaccacaaacagtcctcaggatagatttcgcagaatttttcttcacttcattcacatattcaaggccttgggctgccacctctgtggccaccccaagcatatcaagtgatgccgcatttgcctcaggattccatttctttccagatactgctcctaggtaattgttggcaggttgctgttgctgccgaagatcaagaa

SEQ ID NO: 12303 - DNA, 2455 bp, Oryza sativa
  Clone ID: TFbOSC400017j.C1.o12.fg
cggcggtgcgagcggccgccgctgctctgagcgagggggacacagtggtgccgtggcagtggacctcgccaatgagtccggcgccgagatggctgctagtcactcaggccctggaagtccatggtcgagctttgaggatcaggctcttgttgtgcttgtacatgatatgggtcaaaactgggaactggttagtgacgcactgaacagcattgttcaattgaagtgtatatatagaaggcctaacgagtgtaaagatcgccataaacttctcacagaaaaaggttcaggtgatggtgcggatagcgcagatgactcgggctcatcacaacactatcagtccacattgcctggcatcccaaagggtagtgctagacacctgttccagcgccttcaaggaccgttcgaggaagagactcttaaggcacacttcgagaaaataatattccttggtcaaaagttgcatccaaatcgtagaaagggtgagagccaagagctcaagcagataaacccactccattcttctcatcttcatgcactttctcaagcatgtgcacctggagtcattttgatgccgcttgatctttgtgatgcaatgactccaaacccggatgcactttctattggttactcgggatctcatgcaagtggtttaatgcttccaaaccatcccagttccattggccccacccttcctactggtaatatgaatactaggctaccagggtctcctggtatggttttaggcaatactttgccatcaccttcaacaccaaatactcctagggattctcagaggtacggaatgcctagacctacctctctgcagggtgatgagcaacaaagaatccagtacaatcagatgctcaacagcagaagtcttcagcaacctggggtgcctgttcctggtgcgcctgctggagttgatcgtggtgttcggatgatgcctggtgctcatggtatgggggtgatgactggactaaatcgtggtactccagtgaccaggccgccctttccaaggcttggttcctcaggaatgctaaatatggtttcacctggaaacatgcttcccaacaatgggcaaggcatgcaaaacacggtgaatgttcatcctggtaccatacctggccatggaaatactatgttgaggccacgcgatccaatgcagatgcttcggcctggccagaacatggaagaacataggcagatgatgcagggagtttcagatgcaattcagtcatcccaaccacatcagatgccacaacaatcacacgtgcttggaaatacacatcacccccatattcaaggaacaacccagtcaagcccacagcagcaggcttatgctatgcgcttggctaaagatagacacatgcaacaatgcatgatgacccaacaacagcacccactttctggagccagtgcagtgtcgactgtacagaatggttcacaaatgcaacagcagagccaagggccagcttccagtgctatcccatcttcgcagtcacaacataaacagcagcatccggcacaaaattcactagatagctcagtgcctcccaaccagcctgttaatacatcgcataagcagaagaagcaacagggtcagcagcagtctagacaaaaccagcagcaaagaaatcaaggtagccagcaagctaagcttatgaagagcttaggccgagggaatatgatgcaccagagttcaccagttgatgccactcaagcaagcggtatttctacaacctctaaaaaccaagtttctgataaaagtatggtgcaacagggcccggggtattttgctggtaataagggcttggttccatcagtggttcaacctggtaatcaacccaagatatatgggtctcagatgcctcattcaccaatacaaacatcagatgtaggtagtcaaagctcaatgcagggttctcctaaccagactatgttaacttctcaacaagctccacttcattcgtcatctccattggcacagcagcagcaacaacggtacatgaatccatcacataacaacatccagagattggtgatgcaacaaaaccgtcatatgaacactgatggtaggatagaatcacctgttgaccaagttcaacataatcaggcaattccctccacatccattgcaaagagtacagattcaggtagcccaggtggtgtttcatctataaaccagcggagacaagagtcatctcatgatccaactacagttccatcaacctcgcagttagctagctcgcctcaagatacctttgttggaaatgaaatgctgttgtcagtgtctagccaaggcatgttgcaaaggcaaatgtcaggtggcgtgcctatacatgggcatggtattggtgggcagaggcagcagctgcaatctcggcagcaacagcagcagaagcctgctgttcaaggcagtgtgtatgctcatccttcaaattcaggaccaggatga

SEQ ID NO: 12304 - DNA, 2793 bp, Oryza sativa
  Clone ID: TFbOSC900031j.C1.o3.fg
atgaaccctactcagccagtggttatacatgacagacattgtgttggtttgcttcctgcaagccatattgctgccggcaatacgatgcgaatatgcgcacgagtctccgaaagctttggggctcggaaatatattttagatgccaaaagatggtgcatcatagggaaaaatatggagtcacttgagccagaagacggtgatggacaccaatcagatgctacagatgacgacttaccaccacgtatatgcactggaaaagcgtaccaagcagagatccctaatcttgccacagaggatgagcgtcgtcagtacatgagcaacacaactgatagttgcatggcacttggttatgattgccctataccaattatgtggacattaccaagtgaattcaataagaaggaagaggaaatacaaaagcagcattcttcagaaaccaaggctatagaaaatagcagagatggggatagccaaacgacctcaatttgcccaaccagtaataacacaagtggacagtgttcaacatctcaggatccgcatccagagctacctgatcagatagtatctgacagtcatcaagcacacgatgataaattggctccatgttccactcaagaaggtctaaacttcactgataaggccatggcagatcaaggagaaattgaacagtttattccagtgcctaattcatccacttccatttggagtgatcaggaagcagaattattgctccttggcctctatatttttggcaaaaatctgcatgtgttgagcagatttgtaggtagtaagactgttggggatgtgctttcctactattatggaaagttctacaaaggagaagcatataaaagatggtcagcctgcagaaaagcaaaaataaggagatgcattcttggggaacgcatttttataggttggcgaaggcaggagcttatatctcgccttaaatctaaaatccctaaagaagctcatgatctgttggatgagatgttcaaatctttcaacgacagccaaacatcattaatggattttgtttttcatctgaaatctgttgttggaatagaagcttttgttgaggcggttgcgatcggtaaagggaaggatgatttgactggttttgttttggacccatccaaaccaaaccaagtcctttctgttcagcccggcatgcctgcaggcaaagattgttcctctcttgcttcagaagatataatcaaattcttaacgggtgatttcagaagaagcaagacaagatcaaatgatcttttttgggaagctgtctggcctcgtttgcttgcaagagggtggcactcagagaagccaaatgatgtcagcacaacgaagaattgccttgtattcattgtgcctggtattcaaaggttttcaagaagtgaacttacaaaaggcactcattattttgattctgttagtgatgtcctcaagaaagtggtagcagaccctgttcttcttgagatagaggttgatggaatgggcaatggtgttaatgctgagaaaaatggctttgacacagccatgaaactgaaccaagatgttcctttcgatggctatcacgagcttccaaagtttacaataatcgatactagcttggtccaaggggaagagccctcgcaagtgagggagctgaggaacttgcctgctgatgcaaatattagttttggccctttgcgtcatacacataatatggtgagtgatagttcctcagacgaacatgacacagatgacagatcatcagattacaaggaaggctacgcaggagttacagctgatgagaatggcactgaaatggtttcatccaagaatgcagacaatgaaagccaagtggactcttttcgaaatatggctgctacatcatgctcagtttttccagttaatggccattcttctaatggcaatggtgacacaattggtgcgacaagcttctttccccagaaaactaaaattgaaaagcgcaagtacttatccccagtgacgaagcgcagaagactaactagctgtagcaatgaccagaccagtcgacgcagcttttctttctcaaaaggccccggtttagaaaaagagaaagtcaagctgccatcaacttcatcaaaaccaactgctattgatgttggtggtagttttcaatccaaatcacttgcgagctgttctggcaaggagaagccatgtcagcagataaaggatgcatcaaactctcatgccaatgacagatcaaatgagaagatgaatgtggcaaggccaaaggagaagccatctgggcataaggtagatacactggcttctgttcattcgaagaccgccgttgaggatacaaaacctgccaaaggagtagctcagtctagtgatttggtggctaatcaggttaaactagaaacaccgcaggatgataagactgtcacaattgcgcacgccccttcatcagacaaccatggtagcatcctcaagaataaggagactacttccagttcaaacaccgagatcgctcatgatgccccggaggcaacaagaggaggacctgccaaccctcagcctgatcttcaggcttcttcgcaggcaatgaatcctcggaggcaaggaaccagagtcaggcctcccacggcaagagcccttgaagcggtcgcctttggcctcctcggaagcgggaagcgcaaggctgaccccactggctcgagcaggcctcgtcagcgagctcgcaagtccaccaaggaggcagcttccgtgtccaccagcagcgacaccgagaagtcgagcatgcactctggagctcggcaatga

SEQ ID NO: 12305 - DNA, 341 bp, Oryza sativa
  Clone ID: TFbOSC4439j.C1.o1.hg
gcacgtcggcggtgcgcctctgaagaagtgcttagcatggagtgcctatcgtcgccgtcgccgtcgccgtcgccggcgtactacgccgcggtcgccgtcgccgcctccaactcgtcgccgaccgtgtcgtcgtcgtcgtcgctggtgtcggtggaggaggccggcgagaagatggccaacgggtacctctccgatggcctcatggcgagagctaggaggaagaagggtgttccatggactgaagaggagcacaggaaattcctggtagggctcgagaagctcgggaaaggcgcctggcgcggcatttcccggcacttgtcacgacaagaacaccgacgcag

SEQ ID NO: 12306 - DNA, 675 bp, Oryza sativa
  Clone ID: TFbOSC23942j.C1.o6.gm
atggcccccggtggtggtgtactgttcgccggtacgtccgtctgctcggaggaggggcaggatgaggatgaggagaccattgtggaaagtcgtgcttttgagcaaagagtaaacttctgggagcagcctaatcaaagatgggggcggctgggcaggggcacagccgaacctggccatggaggaccagcacaggtcctcgcctctagcggccgtcacgtgatgatgagatgtgttggaagggatggagatgatggcctccgtcgaagtgagaatgtggcggccgagatagttgaggaggagaagccttcaccgctcaatgccctcaaccgcctccgcctctcgagctccttcgccccaccgctattgtcctcttcacgcgccgatgggggtagaggagaagccgcgcggccatcaaggagacacgcaccggcactaagcatgggttcgtcgtggacactcgatcagaacaaggtctttgagctggcgctggcgacatacggcaaggacacgccggaccgctgggaaaatgtggcgcgggcggtgggcggtggcaagacagcggatgatgcgaagaggcactataagaagctggaaaatgacatcggccgcattgattcaacaggtgccagcagcagcaactccaatggccgtagcagcagtgaggggcagaggtag

SEQ ID NO: 12307 - DNA, 864 bp, Oryza sativa
  Clone ID: TFbOSC405208j.C1.o4.fg
atggattcatccaaccaaaaattcatagatcttcttagtcaagactctccaaaccatgcagaaaagactagccacaactcccctccccaacaattccccaataattttccccaatctcagtttacccaaagcttcaacccacattttttacacaatttctatccattttgttccccaagcaactatccaccatatggtcattctcctcccagctttcaaggtactcctccaagctttcaaggtattccacatcaaggaaattgggcacaacctaatttagccaccttacaaggtttccatttgcaagaaaatatggtgcactcaccaaatcaggggtttggaactgcaaaccaccaagcaatatttgcactgcaataccccttagttagagccactgtcaacagttcttcccatgggtcagagtcatcgactccctgccctgcaagacaacaagaggcgccagttaatctcgagtcgtcaagtgaaagcagcgaagacgaggtgaggagagcaacacgcaccaattggacagaagaggagaacttacggttaattagtgcttggttgagcaactcggttgatcctatagatggaaatgacaagaagggagagtattattggaaggatgtggctgatgagttcaacaacaaccgtcctacaaatggccacaagaggacagtcaagcaattgaagacacactggggaaatgttaagaaggacattgggaagttttgtggagtttatgctcaagttagacgtacctgtaccagtggacactctgatgacatgatcatggaaaaagctcatctatggtacaagaatcaatcaaatcagaagaagcctttcaccttagagtatatgtag

SEQ ID NO: 12308 - DNA, 2352 bp, Oryza sativa
  Clone ID: TFbOSC402357j.C1.o1.fg
atggagattaattcctctggtgaggaagcggtggtaaaggtgaggaagccatacacaatcacaaagcagagggagcgttggactgaggcagagcacaacaggttccttgaagccttgaaactgtatgggagagcctggcagcgcatagaaggtctcattgcaagatctatgaatggggaggaacacaagcaaggcagacataatccgttggaaaaggaagctatcaacaatggcacttctccaggacaagctcatgacatcgacatacctccaccacgaccaaaaagaaaacctaacagtccatatcctcgaaaaagttgtctcagctctgagacatccaccagggaagttcaaaatgataaggcaacaatatcaaatatgacgaacaatagcactgcacaaatggcaggtgatgcagctcttgagaaactcacttacattcagaaacttcaaagaaaggagatatctgaaaaaggaagttgctccgaagttcttaatctctttcgagaagtcccatcggcatcattttcttcagttaacaaaagctcttcaaatcatggtgcatccagggggctggaaccgactaaaacagaagtcaaagatgtggtcatcttggaaagggattctatttccaatggtgcagggaaggatgcaaaagatatcaatgatcaagaaatggaaaggctcaatgggatacacatcagctcgaagcctgatcattctcatgaaaactgtttggatacctcaagccaacaatttaagccaaaatcaaactctgtggagacaacatatgtggattggtctgctgcaaaagcttcacactaccaaatggacagaaatggggttactggctttcaagccactggaactgaaggaagccatcctgatcaaacaagtgatcaaatgggaggagccagcggaactatgaatcaatgcatccatccaacacttcctgtggatccaaaattcgacggcaatgccgcagcacagccctttcctcacaactatgcagcctttgcaccaatgatgcaatgccactgcaaccaagatgcctacagatcttttgccaatatgtcatccaccttctccagcatgcttgtctccacattgttgtcaaaccctgcaatccatgcagctgccaggcttgcagcatcgtactggcctacagtagacggcaatactcctgatccaaatcaagaaaatctttctgagagtgctcaaggaagccacgctggctctcctcccaacatggcatctattgtcacagctacagttgctgcagcatcagcatggtgggcaacacaaggtcttctccctctttttcctccacctatagcttttccatttgttccagctcctagtgctcccttttccacagcagatgttcagcgagctcaagagaaagatatagactgcccaatggataatgcacagaaggaattgcaagaaactcggaaacaagataattttgaagctatgaaggtcatagtgtcttcagagactgatgagagtggaaaaggagaagtgtcgctccacactgagttaaagatatctccagcagataaggccgacaccaaacctgccgcaggagctgaaacaagtgacgtttttggaaataagaaaaagcaggatcgctcttcatgtggttccaacacaccgtcaagtagtgatatagaagcagataatgctcctgagaatcaagaaaaggctaacgacaaggcaaagcaagcatcttgcagtaactcttcagccggtgacaataaccaccgtagatttaggagcagtgcaagcacaagtgattcatggaaggaagtttctgaagaggtggtcgtctaccagcattccgcatattcacatttatcttactcgctgaacatccatcactgcttttctaattcacatttctgctgtcagggtcgtctggcttttgatgcactgttcagtagagaaaggcttccccaaagcttttctcctccgcaagtagaaggatcaaaggagattagcaaggaggaagaagatgaagtaaccacggtgacggttgacctcaacaagaatgccgctattattgatcaagaactcgacacagcggatgagccaagagcttcctttcctaatgaattgtcaaacctgaagctgaaatctcgcaggaccggtttcaaaccatacaagaggtgctcagtggaagcgaaggagaacagggtaccggctagcgatgagggggaaacagggtgccagagtgggaagaacgtgttcaacgtgcccacttgcaagcatggacaggctggtgctgtgtacaacttcttctctgctacccaacaggggaaaatgcgtgactatgaaaggttgatgtga

SEQ ID NO: 12309 - DNA, 504 bp, Oryza sativa
  Clone ID: TFbOSC400025j.C1.o5.gm
atggggaggtcgtcggcgtgctgcgacaaggcggcggtgaagccgaagcgcggggcatggacggcggaggacgacgagcggctgcggtcgtacatccagcagcacggcaccggcggcaactggatggcctccgccgctgcggcaagagctgccgcctccgctggctcaactacctccgccccggcatccgccacggcgccttctccgaccacgacgaccgcctcatcctcgccctccacgccgccgtcggcaccaggccggtcctcctcctcgccgcccaccagctgcacgttgctagcaccagtagcggcggcatgcacgtcggagtcggagaagaaggacgcggctacgacgacgtcttcgccgccgaatcggagcacggacgacgcgctgatgatgatgatgaattggcacaaccaccaaaaccagctacaatatttgcaaggcaaattacaaactggtgtgcagcagcagcaacttgtatttggcatgccttactggtga

SEQ ID NO: 12310 - DNA, 889 bp, Oryza sativa
  Clone ID: TFbOSC101758j.C1.o2.np
tctactactgtcgtactcggtacatcagcaatttcagcagtgagctcacagcaaaatgttgctacgtgcagctgcgccgctgcagccgccgatggccgtgcctgcaccggcggcggcggtgggggaggaggcgaggaaggtgaggaagccgtacaccatcaccaagtcgagggagagctggacggagcccgagcacgacaagttcctcgaggcgctgcagctgttcgatcgtgattggaaaaagattgaagcatacgttggctcaaaaactgtgatacagataaggagccatgcacaaaaatactttttgaaggttcagaaaaatggtacaggtgaacatctgcctccacccaggccaaagcggaaggcagctcatccatatccacagaaggcctctaaaaatgcagaaatacaaatgccagtgctgtagtaccctcctgggacaattctattgctcaacctttaagtgcaagtcgcacgcaaggtatgtttacctactatgctcataaacctctgtccaaaattaatgagaaaaatccaacaaatgccattgacgaactaaatttggcaggtacaggtgctgttgctacaaataactgctctagtagcatagagagtccttctactacttggccaacttctgaagcagttgaacaagaaaatatgcttcgaccactacgtgctatgccagattttgcacaagtatacagctttctgggaagcatatttgatccagatactagtgggcatttgcagactttaaaggcgatggatccaattgatgttgaaacggtactactgctgatgagaaatctgtccatgaacttaactagccccaactttgcggcacatgtaagttgttctgtttttaaaatgctcattaaataga

SEQ ID NO: 12311 - DNA, 1002 bp, Oryza sativa
  Clone ID: TFbOSC407812j.C1.o29.fg
atgagcgcgacgcccaatccgatcgatgcctccgtcgtctccgccgccgccgccgtcgcgggcggcgggggaggtggggatgggggagggggaggaggagggaaggagaaggagaagcaggtggtggctgcgccgctgcagccgccgatggccgtgcctgcaccggcggcggcggtgggggaggaggcgaggaaggtgaggaagccgtacaccatcaccaagtcgagggagagctggacggagcccgagcacgacaagttcctcgaggcgctgcagctgttcgatcgtgattggaaaaagattgaagcatacgttggctcaaaaactgtgatacagataaggagccatgcacaaaaatactttttgaaggttcagaaaaatggtacaggtgaacatctgcctccacccaggccaaagcggaaggcagctcatccatatccacagaaggcctctaaaaatgtttcgccagctgctatatcacaaccccctcctctgggggagcaaggttgtgttatgtccatggatacatctcctgtcatcagaaatacaaatgccagtgctgtagtaccctcctgggacaattctattgctcaacctttaagtgcaagtcgcacgcaaggtacaggtgctgttgctacaaataactgctctagtagcatagagagtccttctactacttggccaacttctgaagcagttgaacaagaaaatatgcttcgaccactacgtgctatgccagattttgcacaagtatacagctttctgggaagcatatttgatccagatactagtgggcatttgcagactttaaaggcgatggatccaattgatgttgaaacggtactactgctgatgagaaatctgtccatgaacttaactagccccaactttgcggcacatctgagcttgctgtcatcatgtaattctggtggggacccaattaagtctgaaggcatggaaaatcttggatctccacagagttgccatctcccgttcatgtaa

SEQ ID NO: 12312 - DNA, 576 bp, Oryza sativa
  Clone ID: TFbOSC21363j.C1.o1.fg
atggcgaggagcggcggcggcaatggtgggggagaaggtggcggcggcggcggcaatggcggtggcgggggagggttgaagaaggggccgtggacgcaggcggaggacaagctgctggtggaccacgtgcggcggcacggcgaggggaactggaacgccgtgcggcgggagaccgggctgcagcgctgcggcaagagctgccgcctccggtgggccaaccacctccgccccgacctccgcaaggggcccttctcccccgacgaggagcgcctcatcctccgcctccatggcctcctcggcaacaagtgggctcgcatctcctcctacctgcatgggaggacggacaacgagatcaagaactactggaacacgcggctcaagcggcgggtgcgcgccggcttgacgccgtacccgccggagatcgagagggagatcgcgcacctccgcgcgcagaatctcaacctgtccgccgaaggcggcggcggcggccagataatatatctcgtttggtgtgcgtttggtggagcggttggggggtgtgggggcgtaggtgttctgggcttttttggggggtga

SEQ ID NO: 12313 - DNA, 1119 bp, Oryza sativa
  Clone ID: TFbOSC401140j.C1.o32.fg
atggggcgggtgccgtgctgcgagaaggacaacgtgaagcgcgggcagtggacgcccgaggaggacaacaagctgctctcctacatcacccagtacggcacccgcaactggcgcctcatccccaagaacgccgggttgcagcggtgcgggaagagctgccggctgcggtggaccaactacctccggcccgacctcaagcacggcgagttcaccgacgccgaggagcagaccatcatcaagctccactccgtcgtcggcaacaggtggtcggtgatcgcggcgcagcttccggggcggacggacaacgacgtgaagaaccactggaacacgaagctgaagaagaagctgtccgggatgggcatcgaccccgtcacgcacaagtccttctcgcacctcatggccgagatcgccaccacgctggcgccgccgcaggtggcgcacctcgccgaggccgcgctggggtgcttcaaggacgagatgctccacctcctcaccaagaagcgcccctccgacttcccctcgcccgccgtgcacgacggcgccggcgccggcgccagcgcgtccgcgctcgccgcgccctgtttccccgccgcgccgccgcaccacccgcaggccgacgacaccatcgagcgcatcaagctcggcctgtcccgcgccatcatgagcgatccctccaccgcctccgccgccgccgccgccgccgcgccctccgcccccgcggaggacaagccgtggccgcccggcgacatgtccgaggggctcgccgggatgtacgccacgtacaacccggcggcgcacgcgcacgcgcaggcccaggccgagttccggtacgacggggcctccgcggcgcagggctacgtcctcggcggcgacggcgaccagggcacgtcgatgtggagccaccagagcctgtacagcgggagctccggcaccgaggaggccaggcgggagttgccggagaagggcaacgacagcgtcggcagcagcggcggcgacgacgacgccgcggacgacggcaaggacagcgggaagggggcagcctccgacatgtcgggcctgttcgcctccgactgcgtgctctgggacttgcccgacgagctcacgaatcacatggtgtag

SEQ ID NO: 12314 - DNA, 2727 bp, Oryza sativa
  Clone ID: TFbOSC422196j.C1.o25.fg
atggagcccaatcccccgccgccgcccgccgccgccaccgcaacctaccgccgccgcggcaagcccaagcccaaacccaagcgcaaggcagccaagcccccctcgccgtccccgccgcccaagcgccaggcccgggacgaccccccgcacacggggccactcacccgccactcgccgctcaaccctgcgccggaggatgcaccgccccagctccacgccggggagcgcgacccgcctccgcgcgcctggatagagcccgcaaagcttccgccggtgagcgaggaagtccaggccgtcctgtcgcgcggagccggcgtccacgtcgtcccctccttcgcaggatggttttcatggaaggaaatccaccaaattgaaaagcaagcattgccttcgttttttgatgggatatctttacggaggacacctgagatatatttgggaattagaaattttattatgaagaaatttcattctaatcctcaaatgcatttggagttgaaggatttgtctgagttgtcagatggggagatggatgctcagttgaaagtcttggagttcttgtcacactggggtttgatcaatttccacccttttccaccagctgtacagggggtgagtgagctggttgagagcataacaaatgctgatacagaagagaaaatttctgtagtggataaattatttcagtttgaaacattgcagtcatatctcattcctgctcctaaccaagcagaggtgacagctccgattcacaccccgagcttgctttctgagcctactctaactgaagattcgattacccaagctgagtcttctgttgagtaccactgcaactcttgctcagttgattgctcaaggaagcgctaccattgcagaactcaggcagactttgacttgtgttgtgactgttatgacaaaggaaatttggatgcaggcatgtcacaaactgatttcatcattatggaatctgcagaaattccaggctttggtggtactagctggactgaccaggagaccttgcttcttttggaagctttagaaattttccaagcaaaatggggtgacattgccgagcatgttgctacaaaaagcaaagcacaatgcatgctacacttccttaaaatgccaattatggacccatttctgcatgatggagatgttaatgaaatatctcaggaaactgcagagcaggtctcagcagaacaaggtacttctcgtgtaactgagaaaatggaagtagaagacaaaacaaaagaaataaaaactaatgatagaaaaactgctgcaaaaccaaaattgaacttgacagaaacagaagtaaacctagacgacaatgttgttgcaaataatgataccaagagttcaggtgatatcaatgtggatgtatgtagcaatactggtgtatcaaatagatcttcagataccgaacctacaaagaaggaaacttctggggaaaacacatcaaacattgttaatgatgtcctgaaatatgcttttgaggctgttggtcacattccaaagatagagggcttgggttcatttactgaagcaggaaatcctgtcatggcactggtggcatttctatctggccttgtggatcatgacgatgttactacgttgtgctgtagttcactgaaagctatatctgatatgtctcctgctcttcaactggcaacaatgcattgttttattcttcaggatccaccaaatgacctcaaagatccaccgaatagagttgctattgcaaatctcactgattgggaaattggaacttgtagctttgcaaacacagattgtgggcaacaaaaagacaaggatgctacttcaaatccaagtgttactgacaatgatgacaatttaaaagaagagtctgctttatctgtggaagagccaaataccacatccacatcatcgaaaaacaccaggaaattatctaatgcgaaggaatctaaggatgaatctccccaagtggagcccaaacccagtagtgccaacgattgtgacaatccaatttctcaggtggcaaagagggcttctgataatataagaggacacagttccactgtgcttcctgtcagtctgaataatacaaatgaaccttgttccatatcttcccaagaggctagtgcaggaaacacaaaggatacaagtcatacagaacacatagaaggagataaaccaatttatgaggatccaccattagaaggaaaggtagagttgaacaagatcgaacatgaagtcactgacttatctgctgtacagcaacatgagtccatccaaacaagtttgaagaagggctacatacaagatcataacagtattaagaaaacagttgccgatgatgtctccgtacaaaggctacagcgggcagcagccagtgctatttcagcagctgctgtgaagtcgaaactccttgcaaagcatgaggaatatcaaatccagcgactagctgcacttgtgattgataaacagctccacaagatgcaagcgaaaatgtcagttttcactgaagcagataatttggtcctgcgagcgagagaacacaccgagagaactcggaagaagcttctgatggagaggagcgcgataatcgcttctcggatggcggcattgccacccagaccaaaccaccaacctgggatgcctgggagcagattgccggtaggaactatttttttcacagtggttctggttagattaggtaaaaataaatacggggcaaactaa

SEQ ID NO: 12315 - DNA, 828 bp, Oryza sativa
  Clone ID: TFbOSC401367j.C1.o92.fg
atggagaaagaggtaccaaaaaatttattgcgaatttccgtagcttctagtacccaagataccgagaggtatcatacgattttctaccacgtatcgcgtgatactcgcaaggtatcatatgatttcaaccacgtatcgcgtgatactcacgaggtatcatgcgatacctgccgtgtatcagacgatttctaccacgtatcacgtgatactcgcaaggtatcagacgatttctaccatgtatcacgtgatacttgcgaggtatcggatgatacctaccaggtggcggcgaccccgtcgagcgcgatgaggatcatcctccgcattaggctctcgccggcgtggacgcccgaagaggacgcgtgcctggagcgcctcgccagggggtacggcttccgccactggcgccgcgtcgccgaggagatgcagccgagggagcggcgccgctcgcccaagcagtgccgcgacaggtggcgggaccacctcgcccgcgacgtctaccaccgccccttcaccgccgacgacgacgccgagctcgcccacctccgcctccgcggcggcggcggcgaccggtggaaggacatcagcagggccgcccactgccgcacctcgcgcgccatgaggcgccggtggagggagctccgcaagagcgacgcgttcctcagggcgctgtactggcatcccgaccagccggtgccaccgctacttgacgacgcgttgtcgtgcagcgacgtcctcgactccagcgtggcctcctaccgtggtggctgcgacgccgtggccggcggcggcacgatcgttgcaccagggttcgcctgcttcgccgcatag

SEQ ID NO: 12316 - DNA, 1110 bp, Oryza sativa
  Clone ID: TFbOSC900052j.C1.o4.fg
atgccgtgcacgtcggcggcgtggatgttgcacgtgggtggtgcggcggcggagcaggcgtcgtcgtcgtcgtcgtccaagggaggggggagggtggtgacggcggggacgacgacgatggacacgggcgggtacaataatggaggtggtggtgggggtgggggtggcaatggcggcggcggcggcgaccaccaggagagcagcagcagcggcggcggcggcgggcagtcatccaggctcgcggcgcgcggccactggcgccccgccgaggacgccaagctccgcgagctcgtcgcgctctacggcccccagaactggaacctcatcgccgacaagctcgacggcagatccgggaagagctgcaggctgaggtggttcaaccagctggacccgaggatcagcaagaggccgttcagcgacgaggaggaggagaggctgatggcggcgcacaggttctacggcaacaagtgggcgatgatcgcgcgcctcttccccggccggaccgacaacgccgtcaagaaccactggcacgtcatcatggcgcgcaagtacagggagcagtccaccgcctaccgacgccgcaagctcaaccaggccgtccagcgcaagctcgacgccaccaccgcctccgacgtcgtcgtcgcccaccaccacccctacgccgccgcccacgacccctacgccttcaccttccgccactactgcttcccttttccggccgcctcccccgccgccgccgacgagccgcccttcacctgcttgttccccgggacggcggcgacggccgggcgcggcggcggcggtggcatgacatggccggacgccatggccgctggcgaggtcatcgacgacggcgccggcggcggccggtacgtcgtggccgagccgccgccgccgttcctggtgccggcggcgccgcacgggtggctcggaggccacgagatgatggtgatggtgaacgacggcggcgacgtcgccgccggcgtggcgtcgtcgtacgacgggatgataggcagggatcagggcggcggcggctcacacttcgaggcggctgcggcggcagcggcggcgccggcattcatagacttcctcggggttggcgccacatga

SEQ ID NO: 12317 - DNA, 981 bp, Oryza sativa
  Clone ID: TFbOSC406972j.C1.o10.fg
atggggaggcagccgtgctgcgacaagctgggggtgaagagggggccgtggacggcggaggaggacaagaagctgatgagcttcatcctgaccaacggccattgctgctggcgcgccgtgccgaagctcgccgggctgctccgctgcggcaagagctgccgcctccggtggacaaactacctccgccccgacctcaagcgcggcctcctcaccgacgccgaggagcagctcgtcatcgacctccacgccaagctcggcaacagagcgctggctcccactagcttgatttctgtggctaagagaaccctacacgttgattcagaaatagaaagcatcctcttaggtccagttgcctcattggaaaatggaagaaagctttttaaaaaatggtccaagattgctgccaagctaccgggcaggacggacaacgagatcaagaaccactggaacacgcacatcaagaagaagctcatcaagatgggcatcgacccggtgacgcacgagcccctcgaccggaagcaggagagcccggccaccacctcgcagtccaccgtcacggcggagtcgtccaagtccggcgaggcgaccaggcagcaaagccggcagcttgacgacgccgtcgtcagggacatgtccgtgtctgccggtggcgacagcccgccggagtcgagcactaacaccgccagcaccgccggtggcagtagcagcagcagcagtagccatcaccaggaccctctggtgaagtggctgctggaagaggacctgctgcccaccggtgacgagccatggctcaatttcacggccagcaacgacgtcgacgagttcagtagcatcgccgccaccggcgccacgccggcgctgccgtgggacgtcggcatgacgacggactggctgctcgactaccaagattttgggatgggagactcgagcttggtggtcgatgcctccatggtcaacagctcaaatgggtccaacttctag

SEQ ID NO: 12318 - DNA, 1089 bp, Oryza sativa
  Clone ID: TFbOSC400903j.C1.o93.fg
atgctgctctctcattgttttgcagtagcattcgctctctctgcgctgctcgccggcctcgccctcgccatggacgacgcaacgttcggcatggagtggacggcggcggagctgggtgaggcgaggtcggtcatcgctagggtcagcaacgcctacgactccggcgccggcagcagcaacagtgccggcgacaccaagcacgaccgcattatgagggagctccaggcgaggttcccgtcgaggaccatggtccaggtaatcgacttgtaccttaatctcacggcggagacagcagcgcaggcgggggcggcccagccgcaggacgccggcggcgccggcgacgccgccgtcgtccaccctacctttggcctcgcgaacgacaacttcggcatgcccgttgcgaacaacaacgacgacggcgtcgacgccggcatggtgtttggtggagctcctatggaggagggggcggtggcggtgaacggtggggacggtgaggtggtgaacccggacaatgctgatgacgatgtgctttggaccgattatgagcacaggctgttcctgactgggatgcgtgtgtacgggcgtggcgactggagaaacatcgcgaggtacttcgtcggaagcaagacgccggagcaggtctccatgtacgccgataactacttccacatgatggagatcgccgcggccatggaagccgacggcgacgacgatgacgaccaccatgaaaacaataacaacaacttgggcggcgggcagctgcacgccgtcgtcggcgccgtcgagcaccatgaaaattacaacaacaacaacttaggcggcgggcagctgaacgccggcctcggcgccgtcgggcacggccccggtgccgggcacattgctccggcgacctcctccaacaacaacgtcgccgccgccgccgcgaacaacaacgtcgacgcaccgttctgggttccgctgctgtacaacctcgagatagagcagcgcatgatggagatgcaggcgcagtcgcagaaggcctgggatgatcagcagatgaagatggctgaagctgcaactgatccaaaggagggagcagctgataagtga

SEQ ID NO: 12319 - DNA, 1017 bp, Oryza sativa
  Clone ID: TFbOSC400397j.C1.o62.fg
atggctcacgagatgatgggtggcttcttcggccatccgccgccgccgcctgcgacggcggcggtgggtgaggaggaggacgaggtggtggaggagacggaggagggtggccatggcggaggagttcaggggaagctttgcgcgaggggacactggcggccggcggaggacgccaagctcaaggacctcgtcgcgcagtacggcccccagaactggaacctcatcgccgagaagctcgacggcagatcagggaagagctgcaggctgaggtggttcaaccagctggacccgaggattaaccggagggcgttcacggaggaggaggaggagcggctcatggcggcgcaccgggcgtacggcaacaagtgggcgctcatcgcccgcctcttccccggccgcaccgacaacgccgtcaagaaccactggcacgtcctcatggcgcgccgccaccgcgagcagtccggcgccttccgccgccgcaagccttcctcctcctccgcctcccccgcccccgcccccgcgccgccgccgccgccgcagcccgtcgtcgcgctccaccaccaccaccaccggtactcgcagcagtacagcgggtacagcggcgccgccgagtccgacgagtcggcctccacctgcaccaccgacctctccctcagctccggcagcgccgcggccgccgccgccgccgccgcggcggcgaacatcccctgctgcttctaccagagcacgccgcgcgcctcttcctcttccaccgccgcgtgccgcgcgcctcgcgtcgcggcggcggctgacacggtggcgttcttccccggtgcaggctacgacttcgccgccgccccgcacgccatggctcccgcggcggcgtccacgttcgcgccgagcgcgcgctccgccttctccgccccggcgggccgcggcgagccccccggcgccgtcgaccagcgcggcggcgcccaagccaccaccgacagccacaccatccccttcttcgacttcctcggcgtcggcgcgacatga

SEQ ID NO: 12320 - DNA, 909 bp, Oryza sativa
  Clone ID: TFbOSC400045j.C1.o27.fg
atgggacggcacgcgtgctctgccgccggtgtccagcagaagctgcgcaaggggctctggtctcccgaggaagacgagaagctctacaatcacatctaccgctacggcgtcggttgctggagctccgttcccaagctcgcaggtcggctccagaggtgcggcaagagctgcaggctgcggtggatcaactacctgcgccccgacctgaagcggggcagcttctcgcagcaggaggaggacgccatcgtcggcctgcatgagatcctaggcaacaggtggtcgcaaatcgcgtcgcacttgccggggaggacggacaacgagatcaagaacttctggaacagctgcctcaagaagaagctgaggcagcgcggcatcgaccccagcacccaccagcccatctccacggctgctgctgctgcggcggcggcattggacacgtcgacgcaggaccagaagccgccggccaccgccgacggcttcgccctgaagcagcagcagcaggtgttcgacccgttcccggtgatcgacagcttcggcagcgggttcgacgccacgggcatgccattgtacggccacctcggcggcaaggacgcggccgggttcgtggactacagcagcgtgcttgacgtgtcggagaacctgggctacggcgagagctccagcaacagcagcaactggaactgcggcgtgggcgcgccggaggtgaacaatgcgctcgagagcgagccgctgcattgggccaccgagagcaaggtcgagcctttcgtgggctacggcgagggggacgccatggagcacaagttcgggctgccctgccatgggcagcaagagcagggcatgacacatttcgacttcgacgtcagccggagcatggtggtcggcgacttcaacttcgagtacttccgatga

SEQ ID NO: 12321 - DNA, 1062 bp, Oryza sativa
  Clone ID: TFbOSC401533j.C1.o20.fg
atggggagggcgccgtgctgcgagaaggtggggttgaggagggggaggtggacgaaggaggaggacgagaagctggcgaggtacatacgggagaacggggaaggggcgtggaggtcgatgcccaagaatgccggcctgctgcgctgcggcaagagctgcaggcttcggtggatcaactacctccgggccgacctcaagagggggaacatctcgccccaggaggaggacatcatcctcaacctccacgccacactcggcaacaggagaatggagatgcataccgagatgctgtcagcgacaggctttaatttagcgcagagaaaatttcccatgctgctgacagatgacacggatggcggactctcatgcctgtggtccctgatcgccggccacttgcccgggcggacggacaatgagatcaagaactactggaactcgcacctgagccggaagggatacgagttcctccgcggcggcggcggcggcgccgtcgtcgacgtcgacctcagcaagttgcccggcggcgggaagcggcgcggcggccggacgggccgcagcagcagcgggaaggagaagacgaggacgaaggagaaggacaaggcccccgctccagaagctgcgcacaatgacgacggcggcggcggcggcggcggcggcattgacaacgtctcggcagctagccacagccacagggaggagcaggcacaggcgagcgccagtggtctcacatcagatgggctcgaggagggcccactgggcctaagcgaggagatggtgagtgggcccgtgggaccggtgagcccaaagcctgaggtgggccaggatgggtcttctgcagagagtggctgctgtgggcctagtggatccagtggcccaaccgaggctgtgggccaggacatgggcgacaagtccatggactgggacctggtgggcctggacgatggcttcgccaacgatgacatgtggggctcactctcctgggactacggggagttggtgggcccggatggagttcatcagggcgaggtgctatccgacttgttcttcttgggcaacctgtag

SEQ ID NO: 12322 - DNA, 1203 bp, Oryza sativa
  Clone ID: TFbOSC401612j.C1.o9.fg
atggggcaccactgctgcagcaagcagaaggtgaagcgagggctgtggtcgccggaggaggacgagaagctcgtccggtacatctccgagcacggccacagctgctggagctccgtccccaagcacgccgggttgcagcggtgcggcaagagctgccggctccggtggatcaactacctccggcccgacctcaagcgcggcaccttctccgagcaggaggagcgcaccatcatcgacgtccaccgcatcctcggcaaccggtgggcgcagatcgccaagcacctgccagggcgcacggacaacgaggtgaagaatttctggaactcgtgcatcaagaagaagctcatcgcgcaggggctcgaccccaagacgcacaacctcctgccggcgtcgaagacgctcctccatggcggtggcggtggcggcgctgcaaaccctagcggcaacggcctcgcgcagttccagtctaacaacggcgcggcggcggcgggcaccacgccgttcaccatcagctctccggccaaggcggccgcctacgatgtcgcgccgccggcgttgtacgacgtcgtcctccctgctaaccccgccggtggaatgctgatggcgcatgatcaccaccatcatcaccaggtcgccgcggcggcggcgccggtgggatacccctacgccgaccacggcggcaacggcggaggcgtgctgatgagcttcagggatcagaacgccggcgtccacggcgccgcctccatggacttcatgaacggctcctcctcgtcctcttccatggagcagctcggcggcggcggcggcatgtcgtcgaacggcaacggcagcttcagcgcgagcatggcggcgttcatggacgaggaggcggcaatgtgggccaccgccgtcgcgccgccgggcatgggcggcctcgccgggatggatcaggtggcgcagcagcagcagcagcagcaagtgctggtgcaggatgcggccgtgggcgttgcgccgacgacgctgatgatgcacggcggcggcgccgccaccgccggtgcaatggtggtggacaagagcgtggagatggtggacgtctcgtcggcggtgtacggcggcgcgacggcgacggcgttcgatctagacctgatggtggagtcgtgcgggatgttctgcggcggcggcggcgccggcaacgccatggagcagctgcagtgggactgctaa

SEQ ID NO: 12323 - DNA, 732 bp, Oryza sativa
  Clone ID: TFbOSC412577j.C1.o19.fg
atggggaggtcgccgtgctgcgagaaggagcacactaacaagggcgcgtggaccaaggaggaggacgagcgcctcgtcgcctacatccgcgcccacggcgagggctgctggcgctcgctccccaaggccgccggcctcctccgctgcggcaagagctgccgcctccgctggatcaactacctccgccccgacctcaagcgcggcaacttcaccgccgacgaggacgacctcatcatcaagctccacagcctcctcggcaacaagtggtctctgatcgcggcgaggctgccggggaggacggacaacgagatcaagaactactggaacacgcacatccgccggaagcttctcggcagggggatcgaccccgtcacgcaccgccccgtcaacgccgccgccgccaccatctccttccatccccagccgccgccaacgacgaaggaggagcagctcatactcagcaagccgcccaagtgccccgacctcaacctggacctctgcatcagcccgccgtcgtgccaggaagaagacgatgactatgaggcgaagccggcgatgatcgtgagggcgccggagctgcagcgccgccgcggcggcctctgcttcggctgcagcctcggcctccagaaggagtgcaagtgcagcggcggcggcgccggcgccggcgccggcaacaacttcctcggcctcagggctggcatgctcgacttcagaagcctccccatgaaatga

SEQ ID NO: 12324 - DNA, 1659 bp, Oryza sativa
  Clone ID: TFbOSC101345j.C1.o12.fg
atggaggaggaggaggaggcggcgaggctggcgggctcgcagggggagtcgccggcgatgctgcacccgaacggagacggagacggcgacggcggcgatgatgagggtgacgccagcggcggcgaagaggagcagggcggtgtggctagggcgggggttcgtcgccgcggcggcggcggccgtgtgcgcgtgcgtggcaggattccgctgaagaaggggccgtggacgcccgacgaggacaagcggctgcgggagtacgtggaggcgcacggcgaggggaactggaaccgggtgcagaggaacgcggggctgaaccgctgcggcaagagctgccgcctccgctgggcgaaccacctcaagcccgacctcaagaaggggcccttcagcaaggaagaggaggagatgatcatcaagctccatttatggctggggaacaagtgggctaagatggcaaactctacacatttgacatgctgcactcttgtaaatggccttgttaaaaggagtagacaaatgctttgccattattccttgtttgcagagaataacaaaaaacgatactgtcatcaggaaaagctgacatctaggccacaggataagttgccaggccgcacagataatgaaatcaagaacttctggaacactagatgtaagagaattcagagaactggtgaacctctatatccgaaggagtttaatcattttaagttgacagatctggaagtgatgaactgtgaaagccctgatgaatcacgtgccaagaaacgaacaaatgaggttttacagggaaatggtcaaagttacaaagaggtttttttcgataatttagactatagtagaccagaaaattatattcggccaaattgtgtgactccaaattctcttccagttgatgccacaagtccatttggtagtgccattgccacacaagatcagtcagtaccttttggtagtgccattgtcagtggacatccaattcttgatggcaacttctctacttctgggaccatacagaggcccatgaatgtagagctcccttcactccaatatcccaactatgactttaacaataataatgcatggtcatatcacgaccccttaggacatcctattgaccaggttgactttggctccctgagatcagaatatctctctccaaacaacaatggtctgctggatgcattggttcatggaggacatggacaaggggaacttgcaaattcccaaggatcttttgatgcttgttttcctcgtgttcaatgcaatcaagtgattcaatcgaatgctttctctctgagttcttcctttccaatcattggtgatgatctcctcgagaacagttgtcatgcttttgttggcatcaacaataatgcaagcagcctattccttgacagccaacctccacccttggtggaccctactttctggaggcacgatgtatcactagaaccgaatttgccagtttattgccagtttaacgaagaattgccgccctcaaatgagcagtttgccaaagatgcagatgacgctttcggtcatgggggtctttctgatgagaccaatctagctgctgcaggtcaaggcgatgaacatgaccttgaggacccctgggcgagcatgcccggtgcctgtgacatacctgattttccaagtgaatga

SEQ ID NO: 12325 - DNA, 1038 bp, Oryza sativa
  Clone ID: TFbOSC401316j.C1.o15.fg
atggggcgatcgccgtgctgcgagaaggaggggctcaagaaggggccatggacgccggaggaggaccagaagctgctggcctacatcgagcagcacggccacggctgctggcgctcgctaccctccaaggccgggctgcagcggtgcggcaagagctgccgactccggtggacgaactacctccggccggacatcaagaggggcaagttcagcctgcaggaggagcagaccatcatccagctccacgcccttctcggcaacaggtggtcggcgatcgcgacgcacctgccgaagcgcacggacaacgagatcaagaactactggaacacgcacctaaagaagcggctggccaagatggggatcgacccggtcacgcacaagccgcgctccgacgtggccggcgcgggcggcggcggcggaggtgcggccggcggcgcggcgggcgcgcagcacgccaaggccgcggcgcacctcagccacacggcgcagtgggagagcgcgcggctcgaggcggaggcgcgcttggctcgggaggccaagctgcgcgcgctcgcggcctccgcgaccccgggcgcgccgcacctcccggcaccccccgcgtcggcggcggcggcggcggcggctcacggcctcgactcgccgacgtccacgctgagcttctcggagagcgcggtgctcgccaccgtgctggaggcgcacggcgccgccgccgcggcggccgcgcgcgccgccatgcagcccatgcaggcgtacgacgaggcgtgcaaggaccagcactggggcgacgtcgacgccgccgacgtgggcttccccggcgccggagcggggttcacgggcctactcctcgaaggctccttgaaccagatcccgaggccggcggggagagacgcggaagccgacggcgagttccaggagaccgaggaggagaagaactactggaacagcatactgaacctggtgaactcctcgtcggcacctatgtcgacggccgtggttgtgcccgcctcccacgcgtactcgccggcgccggacttctga

SEQ ID NO: 12326 - DNA, 966 bp, Oryza sativa
  Clone ID: TFbOSC400903j.C1.o83.fg
atgggttcaatagtcattgaggggtggacggcatctgagatagaggaggctaggtcactgatcactagccccaacaacggtggcgaaggtggtgatggagaggggaacaagcagaagcattgcggacacatcgtgatggaactccatgaatggttcccttggaagaccataggccaggtaataggtttgtatatgaagctcaatgcggggaaacccatggttatgcatagcttgaataagagtgatgccaacaatagcatcggtgaggttgatcatgtgagtgccctcgcaaacggtaaccctgtgaggctagaggaacatcgacccatgttgaacaatgtgggcttagtgtttgattatccattggaagagatggagatggaaaatcaaacagatcaagagccgaagatggttgtagaggaggaggtgcagcctaaggagggattagtgatcaaggagaaagaggcgggggtgtcaaagattcacactaatagtcaacatgtgacgccatcaataaaaagaagggtgatttggacagaggaagaacacaggctgttcatggtggggctgcgcgtgttcgggcgcggcgactggaagaacatctccaagcaccttgtcaccaccaggacggcggcgcaggtctccagccacgcgcagaagttcttcctcaagatggaggcccgcggcgaggccgtccccccgccggccaagaggcgccgccgccgcatcaccggcgaccagcaggcggcggccgccgagcacgctgccgccctcaggcgccgcatgccagtgccaccgcctccgttcaaccccttcctcctgcccagcctcgtcgcgccggtgatgcaccgcctcctcccacctgggagccaggctgccggcgccgccgcctccggcagcggcggccagggagcttctcttcctcagatgccatggatcaacggcgccaatggcatggggcgctag

SEQ ID NO: 12327 - DNA, 864 bp, Oryza sativa
  Clone ID: TFbOSC900188j.C1.o10.fg
atggctaggaagtgctctagctgtgggaacaatggccacaactccaggacttgcagtggccaaagagttcttgatcacagcatcagcagcagcaacagtggtagtactactgctgctgctgctactgcctgtggtggcttgaggttgtttggggtgcagctgcaggtaggaggaggctcatctcctctgaagaagtgcctcagcatggagtgcttggcatcaccagcatactatggagcttctgcctcgccgtcggtttcgtcgtcgtcatcttcgcttgtttcgattgaggagaacactgagagggtctccaatgggtacctctctgatgggctcatgggaagggttcaggagaggaagaaaggagttccatggactgaggaagaacaccagatgttcctcgccggccttgacaagctcggaaaaggcgactggcggggcatttctcggcacttcgtcactacccggactccaacgcaggtcgccagccatgcccagaagtacttcctgaggcagaacagtatgacacagaagaagaggaggtccagcctctttgatgtggttgaaggtatcaagagggcagcagcaatgcccatttcaggatctgcatctgaactgcagatccccggcatgtcgatcggtgtcggcgtggtgaaggaggaggttgtcctgcctccatgtctgaacctgatgagtaacagttcatcagcatcacagcactcaccttccctgacattgctggcaaatcctcaggtgcagctccagatgcctgacctggagctaaagatgtccacatcccggttatctgaccaatccggtccgtcgccgagcacgcctttcttcgggaccatcagagttacctga

SEQ ID NO: 12328 - DNA, 1344 bp, Oryza sativa
  Clone ID: TFbOSC100940j.C1.o9.fg
atgtccgcgtctgcatccgctgtctgtctccttcctccccgaggaggaagcctggcccgacccgacaccgcactccccccagccagccagccagccactgtcgcggtgaaccaaaatatcccccgcctcgcctcgcctcgcctcgcggtaacatccatcacactcctcccccgccgcggccgccgctgcgcggtagatctcctcctcctccacctccaccgtctcctgctcttcctctctctcttctcggaggaaacccccaatttattccttccccgcaaacccgcagccttcctaaaacgaattaaatctccctcccttatccgccgctgcaatccctccccacaaaatctcgctgcgccgcgcgctgttttagggtttgagctcatggcggtggaggaggcgagcagcagcagtggcggcggtcgtggtgggggtggcggtgggggtggggaggaggggttgtccggttgcggcggtgggtggacgcgcgagcgggagaaggcgttcgagaacgcgctggcgacggtgggggatgacgaggaggaaggggacgggttgtgggagaagctagcggaggccgtggaggggaagacggccgacgaggtgaggcggcactacgagctgctggtggaggacgtcgacggcatcgaggccgggcgggtgccgctcctggtgtacgccggcgacgggggcgtcgaggagggctctgcgggaggtgggaagaaggggggtggtgggggaggaggtggaggtggaggggggcatggggagaaggggtcggctaagtcctctgagcaggagcgccggaaggggatcgcctggacggaggacgagcacaggctgttccttcttggacttgagaagtacggcaaaggcgactggaggagtatctcaagaaactttgtgatctcaaggacacccacccaagtagctagtcatgcacagaagtattttattcgcctgaactcaatgaacagagagaggcggcgatcaagtatacatgacataaccagcgtgaacaatggagatacatctgctgctcaggggccaatcacaggtcagccaaatggcccatcagcaaatcctggaaaatcctctaagcagtctctacagccagcaaatgcgcctccaggcgtcgatgcttatggtacgacaattggacagccagttggtggtcctcttgtgtccgcagttggcactcctgttacacttcctgttcctgctgcacctcatatagcctatggcatgcatgcccctgtccctggagctgtagtccctggtgccccagtaaacatgcctccaatgccctaccccatgccgccaccaacatctcatggatga

SEQ ID NO: 12329 - DNA, 957 bp, Oryza sativa
  Clone ID: TFbOSC401134j.C1.o17.fg
atggggagggcgccgtgctgcgacaaggcgagcgtgaagagggggccgtggtcgccggaggaggacgagctgctgcggagctacgtccgcagccacggcaccggtggcaactggatcgcgctcccgcagaaagcagggctgaaccggtgcgggaagagctgtaggctgcggtggctcaactacctccgcccggacatcaagcacggcggctacaccgaccaggaggaccggatcatctgttccctctacaactccatcggaagcaggtggtccatcatcgcgtcgaagctgcccggccggacggacaacgacgtcaagaattactggaataccaagctcaagaagaaggccatggccatgcatcatcatcatcagccgccgccgccgcagcagcaacactaccaccaccaccaccaccaccgtgtcgccggcggtggcgcgcgcgtcacgctcgtgtcgcctccgcccgccccgcagagccaatgcgcgtccatgcagccgtcgccggcgtccgcctcctcgtccggcggcgacgcgtgcagcttcggcgccgccgccatgtactccccctccccgtcaacccagcaggcgccacaggcggcgacgctcgcggtcgcggggtacacctccgtggcgacggcggcggcggcggcggcggtggcggcgcagcgctcgccgctcgacgagctgatctgccaggtgccaccacctcccactactaccgccgccgactgctgggccagcggcgtgaccctcgacgacgtgttcttgcccgagctcgtcggagccggcgagttccccaacggcgacctcttcggcgggttcggcccgctgctccaggacaggtcgtccatggagctctccgcgtgctacttccccaacgccgcggcggcggagatgtggccggcggccacggacatcgtcaagccggccgggctgtgccacagcctgacatga

SEQ ID NO: 12330 - DNA, 2832 bp, Oryza sativa
  Clone ID: TFbOSC400764j.C1.o2.fg
atgacaagcgacaacggaaaggctccagagaagggtggagaagcttctggaccttcatcagctccccaagaaggtgaaatcagcaatgaaccacaaaggcgccggccgctcagtgggaggaccactggtccaacacggcgttccacgaaaggaaattggacccctgaagaggaagatgacatcattgttcagatggtaaacaaacttggaccaaagaaatggtcaaccattgctcaagctttgcctggacgtataggaaagcaatgtcgggaacggtggcacaaccatcttaaccctggcataaacaaggaggcatggacacaagaagaggaaattaccctcatacatgctcatcgaatgtatggaaataaatgggctgagctgacaaaatttttaccaggaaggacggacaatgcaattaaaaatcactggaacagttcagtaaagaagaaagtcgactcatacatgtcatcaggtttacttacccaagtctcgtgtctccctctaaatgaatactctgcacactgtaattcctcacctgcgttgacccaacaaaacagcgaagacagtggtagctatgctgttcgagaggttgaaaattcatcagtgtgtagtcaatcatcacttgccaaggtttcttgctcccaagtgcacaatgctaatgtggcattgggctgtgatttgcaagtaaatgcgaatgttgacaataatgaagcgcatgattctcaatcttctgtgggtcacgaagcatgctatacttctgtgggggctgttgcaactgctatacctgaggtgcactaccacgtttcttcctctaacttcgatccagatcaacacttgcaagaggagtttgctcaaggattgaatttgcatatgagtatggatgaagtgccaagtaattctagttttgcagacaacccaactatctgtagtatagaaaatcatgaaaggtcattggaaccatatgatgtagcaatggagatgcctctctctatgttaccaagtgattctggagctgagcaaaaactacattttatgtcggaggctgacttcaatagtcctaattgtctgaaatctgaactttggcaggatatttccttgcaaagccttctttctggacctgatgcagttgaaactgattctttttcaagatcaaatcatcaatcggatgtatattcctctcaagcagataatgaatttttagcaccaccctacctattacagacatcaaattcttccagtgtgatggaggctacttatggacagagtccacagatgtcagtaccaccatctcttatctgttcaaatgttatgactgatgtaccttctgataatagatcagaaccaaaagaaatgacagtttctcaggcagaaatggtcacacaatcttccagttcttcaggtgacgctgaaatgtctgctaaccctggtagtagtaatggcagtgatattccttcaatgatggaaaggatacctgaatgtgcggaccaacatgttactaatgcggaagaacctgaagccagtatagagaaagaaccatcggttacaccgagtgctacagcagatgaaaagcaggatgagggagccctattctatgaacctcctcgttttccaagcatggatgttccatttgtcagttgcgaccttgtaacttctggtgatctccaagagtatagtccccttggtattcggcagttaatgcggtcgaccatgaatgtctgcactccaatgagattgtggggctcccctacacatgatgaaagccctgacattttgctgaagagtgctgccaaaagcttcatatgcacaccatcaatactaaagaaacgtcacagagacctcgtgtctcctattccggataaaagaatcgagaagaaatctgggactgaaaaggattgtggggtatcagacacatcctccatcggcattcaaacatgttttattaatgccactaaagatgatgctgttataactaaatcagttttgcgtattgagcgatctgcttcttctaaacctctggaaaagaaacttgagttctctgatgagaacaaggaaaatttggacaacacaattgaacaggcaaaagatggacagagtgcaggaaattacaaacacattgacgagcaggcaaggggggaacggcgtactgcaacaaatataactactacttatgatgatctgccaggcaatttacaacctgcaggtattcttattgagcacaacggtgatgatcttgtttccccagattatggtaaaaacaccatgaaacagaagcaaaacacaaatatggaatctttgtcagtctgtaaggagggagtgtctgctaaaaagcctgcggaacttattgtggagaaatcttcagcatgcataaatgtggattatgaatatgtgaacatattggctgataccccaggcatcaaaagaggactagaatctccttcagcatggaagtccccttggtttgtagatatgcaatttcagggttcatacttcgtcagcccagctaatggaagttacgatgcgctaggattggtgaagcagataaatgtgcagactgctgctgctttggcagaagcccgtgaggtgctggcaagtggtggccaatctgagaacataaattctgataaggaaaacctggagaatccagatgccaagaaggaaccaggagcaacaaccaaattgcaagcaaaaatcaagaccgaggggaaaatcctggatttcaacgaatgtgccacacctataagatcatcagataaaaaagctggcagcagtctgggaagatctttgagctcccctattccttcgtcccatctcctgaaaagttttcgatag

SEQ ID NO: 12331 - DNA, 831 bp, Oryza sativa
  Clone ID: TFbOSC401721j.C1.o17.fg
atggtggtggccggcaagaagcagggacggcattctttttctgcatcatcatcgtcgtcttcgtcttcttcttgttcagtagtgcagctgggtcatcatcagcgcccacagggtgaggaccctctcatcggcatcaaagcagcagcagcaggaggaggaggaataatgagaaagggcccgtggacggagcaggaggacgtgcagttggtttggttcgtgcggctgctgggcgaacggcggtgggatttcttagcaaaggtgtcaggtttgcagcgcagcgggaagagctgccgtctccggtgggtgaactacctgcatccagggctgaagcgagggaggatgagccccgaggaggagaggatggtggtgcagctccacgccaagctcggcaacaggtggtctcgcatcgccaagagcattcctggccgcaccgacaacgagatcaagaactactggcgcacccacctgcgcaagctcaagctcaaacagcaaaagcagcagcagtccgacgaccaccacaacgacaacgacgacgacgacgaccgcaactcctcctcctcttcgtcctcctccaacagcaacagcaacctgcagcagcagccgcagccagaggatgagtcgtcggccagtggcagcctgcaggcccaacatcatgaggaccagcaccaactgttccttcatcctctctggaacgacgacatcatcgtcgacgtcgactgctggagcagcagcaccaacgtcgtcgctccgccgccgatgcccgcctcgccgctctgggatatcgatgacgccttcttctgctcggattattcgctacctctctggggatag

SEQ ID NO: 12332 - DNA, 954 bp, Oryza sativa
  Clone ID: TFbOSC401780j.C1.o5.fg
atggggtgcaagtcgtgcgagaagcccaggccgaactaccggaagggcctgtggtcaccggaggaggaccagaagctccgcgactacattctccgccatggccacggctgctggagcgcgctccctgcgaatgccgggctccagaggaacgggaagagctgccggctgcggtggatcaactacctgcggccggggctgaagcacggcgtgttctcgccggaggaggaggagacggtgatgagcctccacgccgcgctcggcaacaagtggtctaggatagcacggcatctacctgggagaacagacaacgaggtgaagaactactggaattcttacctgaagaagcgagtggagagcggcggcggcaagacgagccaagggccaccaaccacgcctgcgtcagccgcgagctctcccgccgattcagacgactcgcacagcctgcagcagaagccgcacgagccggccaactccgactcgtcggagccggcgcacgagtcgtcgtcggcgtcggccgactcgagctgcctgacggtgaccacggaccacccgcccgtctcgaggccccacgcggcagtgacacccaaggtcatgttcgcggactggctcgacatggagtacatctgtgggcaggtcgcggcagcacctggtctggacgctgccggattcgcggtggttggtggtgctgcaggcgatcagcagcagcagcagcagcaggtgatgagccaggacggatcggttcatcaggccgatgggccatcgtgcggcgtggacgattcttccctgcagcagcagcagcaggaggggttcggtggcaacggcggctgctgggattttcaggagcagttcgacagcatcgaccagatgcaggcgagcggcggcggcggcggcttctgcgacctgctctccatgagcgacttcgacctctgggccgagctggaacgtaccgcgtga

SEQ ID NO: 12333 - DNA, 957 bp, Oryza sativa
  Clone ID: TFbOSC422332j.C1.o21.fg
atgacgaggcggtgctcgcactgcagccacaacgggcacaactcgcggacgtgccccaaccgcggggtcaagatcttcggggtgcgcctcaccgatggctccatccgcaagagcgccagcatggggaacctctccctcctctcctccgccgccggatccaccagcggcggcgcctcccccgccgacggccccgacgccgcccccaccgccgccgacggctacgcctccgacgacttcgtccagggctcctcctccgccacccgcgaccgcaagaagggtgttccttggactgaagaagaacaccggaggtttttgcttggattgcaaaagcttggcaaaggtgattggcgaggaatctctcgtaatttcgtggtctcaagaacacctactcaagtagccagtcatgctcagaaatattttatacgccaatccaatatgaccagaaggaaaagaaggtctagcctttttgacatggtgccagatgagtctatggaccttccaccacttcctggaggtcaagaaccagagacccaagtattaaatcaaccagcactacctccaccgagggaggaggaggaggtagattctatggagtcagatacttctgccgttgcagagagctcttccgcttctgctatcatgccagataatttgcagtcgacctatccagtgattgttccagcttatttctcgccctttttgcaattctcggttcctttctggcaaaatcagaaagatgaagatggtcctgtgcaagaaacacatgagattgtcaagcctgttccagttcattcaaagagcccaatcaacgttgatgagcttgttggcatgtcgaagctcagcataggagagtccaatcaagagacagtgtctacttctctttcattaaatctggtaggaggtcaaaatagacaatcagctttccatgcaaatccaccaacaagggcacaggcatga

SEQ ID NO: 12334 - DNA, 522 bp, Oryza sativa
  Clone ID: TFbOSC400259j.C1.o82.fg
atggatttgtacggcgcggcggcgggcgggggaccggtggcgaggcgaccgtggagcaaggtggaggacaaggtgttcgagagcgcgctggtgctgtgcccggaggacgtccccgaccggtgggcgctcgtcgcggcgcagctcccagggcgcacgccgcaggaggccttggagcactaccaggtgctcgtcgccgacatcgatctcatcatgcgcggcgccgtcgacgcccccgggtcctgggacgataacgacggcaacgaccgccgcggcggcggcggcaagccccgcggcgaggagcggcgccgcggcgtaccctggtccgaagacgagcacaggttgtttctcgaggggttggacaggtacgggcggggagactggaggaacatctcgcggttctcggtgaggacgcggacgccgacgcaggtggcgagccacgcgcagaagtacttcatccggcaggccaacgccggcgcccgcgactccaagcgcaagagcatccatgacatcaccaccccttga

SEQ ID NO: 12335 - DNA, 1077 bp, Oryza sativa
  Clone ID: TFbOSC7723j.C1.o1.fg
atggggagggcgccgtgctgcgagaaggttgggctgaagcgcgggaggtggacgacggaggaggacgagaagctcgccggctacattgccaagcacggcgagggatcctggcgctcgctgcccaagaatgcagggctgttgcggtgcggaaagagctgcaggctgcggtggatcaactacctgagagccggcgtgaagcgggggaacatctccaatcaggaagaggacgtcatcatcaagctccacgctaccctcgggaacagaaagtcttacgttgtgaaacggatggactacgtgtgtttgggcgcacgtgactactgcttccaacaaaacacacacgtacggtggtccctgatcgcgagccacctcccggggaggacggacaacgagatcaagaactactggaactcgcacctgagcaggcagatccacacgtaccggaggacgtacaccgcccccagcgaggccgccgtgaccatcgacgtgaccaagctccaggccgccgggaagcgccgcggcggccggaccgccgggcagtcgcggaagggcgacaagaagcgcgcggaggacgacccgcccaaggagaccgccgccgccgacacgccgttgccggagtcgagcccgcggcgcgcgcagagcgacgaggcgcggagcggcagcgtggtggtcgacccggaggagccgagcagccagcccaacaacggcagcagcggcggcggcggcggcacgccggacgggccgtgcagcgaggagacagccactgggccgacgtcgctggacccgatggagatgggcctctgggaggttgagagcgagttcgccgagatggaggcccttctgtgcggcggtgtggcgcccgacggccccgggataccggggctcgagccgctggacgtcgcggcccaggcggacgacctgctcgacatggactgggacggcttcgcggccgacctgtggggcgatccggcccagaggggcggccttgtccaagacgcgggcgagccaaacggctcgatgggctgcagctcggacgagctcgagtcgttcgcgagctggctcctctcggactcctgctga

SEQ ID NO: 12336 - DNA, 822 bp, Oryza sativa
  Clone ID: TFbOSC400524j.C1.o32.fg
atggggtgcaaggcgtgccagaagcccaaggtgcactaccggaagggcctgtggtcgccggaggaggaccagaagctccgcgacttcatcctccgctacggccacggctgctggagcgccgtccccgtgaaggccgggctgcagcgtaacggcaagagttgcaggctgagatggatcaattacctgaggccggggctgaagcacggcatgttttcccgagaggaagaagaaaccgtcatgaacctgcacgctacaatgggcaacaagtggtcacagatagcgcggcatctgcctggccggacggacaacgaggtgaagaactactggaactcgtacctcaagaagcgagtcgaaggcgcggaggctgcggccagaaaatccgccgagccggccgacgtcgtcaccggcagcccgaaccgcagcgagaccggccaagaacgcgtcgccgctgaccggccggcgagctccgagtcttccgggccggtcgagtcgtcgtcggccgacgactcgagcagcctcaccgagcccgcggcggggctcgccgccgtccggccgcacgcgcccgtgatccccaaggtcatgttcgccgactggttcgacatggactacgggactagcctcgccgggacggcgccgggcctgagctaccagggctcgtcgtcggtgcaggtcgacgtcccgtgcggcggcgccgtggactccctgcacgggctgggcgacggcggcttctgctgggacttcgacgacgcggccgatcacatgcagggaggaggagggctctgcgacctgctctccatgagcgagttcctcggcatcaactag

SEQ ID NO: 12337 - DNA, 1893 bp, Oryza sativa
  Clone ID: TFbOSC401196j.C1.o59.fg
atgagctccgcgccgcagcagttgctcgattcgtcgtctccggggccggggccggggccggaggtggaggacgacgggggaaggagggtgaggaagccctacaccatcaccaagtcgcgggagagctggaccgaccccgagcacgacaagttcctcgaggcgctgcagctgtttgatcgtgattggaaaaagattgaagcatatgttggctctaagactgtaatacagttggttgcctttgttactgaatatttcagagttttacaatttttaaatctaccgggcggagatcttattataaaccttggagttcttgcagcccctcaagttgtcctaccacaacaagcttctcatctaatggagcaaggctgtcttatacctatggacatatctcctgttgctagaaactttaatgcaaatgatgtattttcttcctgggatagtgctcttgcccaaagtttcagtccaaggcatacacatggtgcagcaaataattgttctagtagcgtagagagccaatctggaacttgtccaacttctgaggcaattgagcaagagatcatgcttccaacgctgcgtgccatgccagactttgctcaagtatacaacttcctgggaagcatatttgatccagagacaagtgggcatcttcagaggttgagagagatggatccaatcgatgttgaaacatggtggataccagttactacatgtggcttagataatcttgacatagtgctgttactgatgaaaaatttgtcaataaacctgacaaacccaaactttgaagcacataggaagcatatggcgtgtaaaaagttgtcaaagataaaatcttcacgaaacagtgtggtgtgtactctttccttttgcttggaagcaagtacgagcgtatatatttcttccaagaagaagaagaagaagaagaagaagagattgggtgcaatggtgcaaggtgcgagcggcggaggatggtcatcgaaagtggaggagggggtgatcgtgggtgggttgctggtggtgcagtgcatcctcgccggatacgtggtgttcgtggaccatgtcctcagccttggagccaacccgctgtccctcatcgtcctcggcgccgtcgcctcctccctcttcttccttcccttcgccgtcgtcctcgagaggaagaaatggccttccaagatttctcgcactctcatggcgcaattcgtgttcatagctcttggaggaacaacggtgtttcaagaactgatgcttctgggaataaagaagacaacaccagctatcgcatcagccatgccaaacttgagccctggactcatcttcatcattgcggcttgtttcaggttggagaagtttgacaagggatgcaagtacacaagagccaagatactgggaacgttggtgtgcttggtgggagctatggccatgagcttcttgcagagtcccgtttcgtcttctccacaactcacaacaactagttactatgactggatccttggttgcttctaccttttcctggcagtagttgttctctctatctacacggtgctccaggcagcgacgttggtgagcttccctgcgccattgacgatgtgcagcgtaacatcgatgatgggcgccgtcttcaccgcgatcctgcagttcatcgtggacggcaagatcgacatgggctcgccgagaatcgatgaaaccatcatctcaacgatcgtcctgatgaccgtctgttctgccctcctctctgctcttctcttctcccagttgctctgcctcggaagcttggcagggatggtgctcatgttctgtgggctctacatcgtcttgtgggcgaagagcaaggaaggtcatagtattattcatttggaaggtggcgatgttgagaaggctcttttatcctaa

SEQ ID NO: 12338 - DNA, 579 bp, Oryza sativa
  Clone ID: TFbOSC401693j.C1.o18.fg
atggcgacgccaccgctgccgccgccgcctcgggcgaggtgcgtcgtccgcctcaagctgccgccggcgtggacgcccgaggaggacgcgcggctgcagcgcctcgccaaggagaacggcttccgccgctggagccgggtcgctaggagcatgccacgccgctccgccaggtcgtgccgcgacaggtggcgccaccacctcgcccgcgacgtctaccaccgccccttcaccgcccgtgacgacgacgagctccttcgcctccactaccgcctcggcgaccgctggaaggagatcggccgcgccgtctacggccggacctcgcgcatcatgaagcaccgctggagggagctccggcgcagcggcttcccgctagctgccaccgccaggaaggtgcaggcgctcgacatggtggaaagcgaagtggaggagtcagaccagtcgctgccgccgccagagttgcagcgttctttggcggacgctcttgcctcgagcttcggttattgtagccttgccaacgagcacgcgatggatcccctggccggcagcctctcgctagggttcgcgtgcatggcagtttga

SEQ ID NO: 12339 - DNA, 804 bp, Oryza sativa
  Clone ID: TFbOSC27606j.C1.o1.fg
atggcgtcgtcgtcgacgacgaacacgtcggacggcgccgggaagccggcgtcgtcgtcgtcgtcggcgtgcccgagaggccactggcggcccggggaagacgagaagctccggcagctggtggagaagtacggccctcagaactggaactccatcgccgagaagctggagggcagatcagggaagagctgtcgtctccggtggttcaaccagctggacccgcggatcaacaagcggcccttcacggaggaggaggaggagcggctgctggcggcgcaccgccaccacggcaacaagtgggccctcatcgcccgccacttccccggccgcaccgacaacgccgtcaagaaccactggcacgtcgtccgcgcccgccgctcccgcgagcgctcccgcctcctcgcccgcgccgccgccgccgccgcccacccgccgccgttctcctcctacgccagccagctcgacttcagcggcggcggtgcgtcatcaggcgcgcgcaatagctcgctatgcttcggcttcggcatgatcaacaggtcgtcgtcgtcttcttcttctccggcggcggcgccgttcttgatcaagtcgtttaacggtacgagctatggtacgctgctgccggcgacgacgtccatggcggcggcggcgcagcctgtgtccaccatcaccttctcctccactcccatgagagagacgctggaactgatggatgccggcggccatgagaaccacggcgacgtcgacggcggcggcgacaagcggaagggcgtgccgtacttcgacttcctcggcgtcggcgtgtag

SEQ ID NO: 12340 - DNA, 963 bp, Oryza sativa
  Clone ID: TFbOSC402119j.C1.o10.np
atggggaggaagccgtgctgctccaaggaggggctgaacaggggggcatggacggcaatggaggacgacatcctggtgtcctacatcgccaagcacggggagggcaaatggggagccctccccaagagagccgggctgaagcggtgcgggaagagctgccggctgcggtggctcaactacctgcggccggggatcaagaggggcaacatctccggcgacgaggaggagctcatcctcaggctccacactctcctcggcaacagatggtcgctgatagccgggaggctgccggggcgaacagacaatgaaatcaagaactactggaacagcaccctcagcaagcgggtcgccatgcaacggaccgccgccgccaccagcatgccggcggcggccaccaccagcagcaatgccgacgccgccggcgctgctgcacgacgccggcgatcgccggagccccgcacggtcgtcgtcagcccaatccggaccaaggcgctgcggtgcaacaacaacagcagcagcgggatagtggtggtgcagcaggcaggcgcctgcagccacggcggccgtccgccggagagcggcgcgccgggagacgcggcggctgataaggtggccacgccgcaggcggtgcagcagcagcagcagcaagagctggccggagcggaggatgacgacgacctgccggtgccggccgtctgtatcgaccttgacttggacgacatcgagctgggaggactcgacggcttcctgatcagcccgtggcgcggcggcggccacgacgacggtaacgccgccgccggagcggtgccgaatctgccgatgccgattggctatgagctcggcggcgccggtggcggtggcgaggctggagctgttgacctggaggcgttgctggggcagctggaagcagaggaagacgacgacggtgaccaccaccaccaccaccaccaccaccaccaccag

SEQ ID NO: 12341 - DNA, 1116 bp, Oryza sativa
  Clone ID: TFbOSC400944j.C1.o31.fg
atggggaagggccgggcaccgtgctgcgccaaggtggggctgaacaaggggtcgtggacgccggaggaggacatgaggctcgtcgcctacattcagaagtacggccacgccaactggcgcgccctgcccaagcaagcaggtttgctccggtgcgggaagagctgccgactccggtggatcaactacctccggccggacctcaagcgcggcaacttcaccgccgaggaggaggagaccatcatcaagcttcacggccttctcggcaacaagtggtcgaagatcgcgtcgtgcctgccggggaggacggacaacgagatcaagaacgtctggaacacgcacctcaagaagcgggtgtcgccggagcagaagaagggtgggggcaagagcaagaagaagacgacctgcaccgacgtgctcgtcccgtccccatcgccgtcgtcgtccaccaccaccacgaccaactgctccagcggcgactcagccggcgagcagagcaacacgagcaaggaggaggaggaggagacggacaagatcgagatccccatgctcgagctcgacccctgctgcttcgacttcgacatgctggttgaccccgttgtcccggacacgtactgccccgcggtgtcggcgtcggcgtcggcgtcggcgccgacgtcgccgtgctcgtccacgtccccgtcgtgcgcccgtgcaggcgtggacccgctgctcgacctgcccgaaatcgtggacctcgggccggagctatggagcatcatggacggcggcgccggcgacgggtgcaccgaagcgccgccgccggcgtggagcaatgcggcggcggcggcggcggccaatgcaacagtggccaccacgaccagcctggaggaggaggaggggaaggagtggtggttggaggacttggagaaggagctcgggctgtgggggcccacggacgactaccactgccacccgggcccacaaggtcagcccggtcgcgcgggcccaccaccctccgccgttgtggaggacccagtgtcgtgctacttccaagcgggccccacggcagccgccacgtggcagggacacgagccctcggctgtcatcacgagtaaccccatggattactacgtgtaa

SEQ ID NO: 12342 - DNA, 948 bp, Oryza sativa
  Clone ID: TFbOSC900238j.C1.o10.fg
atgatgaaggagtcgtacatggaggtgctcccgccggcgccggcgcactacttcgtcggccaggctgcggcggcgggcgggtggttcttgccggaccggcgcggcggcggcggagcgtggtcgcaggaggagaacaaggtgttcgagcaggcgctggcggcgctcgaccggaacgacccggagaggtgggagcgggtggcgctgctgctgcccggcaagacggtggccgacgtcatgacgcactacgacgacctcgagaacgacgtctgcttcatcgaggccggcctcgtccccttcccccactacggcgccgccggcggcggcggcggctccgggttcactcttgactgggacggcggcgatgaccccgccggccttgggttcaagcgctcctgctacatggtcggcggcaagcgcgcgcgcggccctgaccaggagcgcaagaagggcgtgccgtggacagaggaggagcacaagttgttcttgatggggctgaagaagtacggcagaggtgactggaggaacatctcccgcaacttcgtgacgagccggacgccgacgcaggtggccagccacgcgcagaagtacttcatccggctcaactccggcggcaaggacaagcgccgctccagcatccacgacatcaccaccgtcaacctccccgacgacgaccacggcaacccctcgccgtcgccgccgccgtccgtgctcaccgcgcactcctcctcctccgccgccgccgtctcggagcagttcggcgtgctcgtcgacggcaagcctccgccgccgccgctcggccgtggcgccgggcaccaccacttcatgccccatccctacgcccaggtgaagatcgaggccggcaattcgcacgtcgccggcggcggccgcctcgacgactccgttctggtgcagatgcaatgcggccagctgatgcagcctctcggttga

SEQ ID NO: 12343 - DNA, 951 bp, Oryza sativa
  Clone ID: TFbOSC419638j.C1.o9.fg
atggggagggcaccttgctgtgacaaggcaacagtgaagaaggggccatggtcacctgaggaggatgcaatgctcaagaactacattgaggagcatggcaccggtggcaactggattgcactgcctcacaagattgggctgaagaggtgtggcaagagctgcaggctaaggtggctgaattacctgaggccaaacataaagcatggggacttcaccccagaggaggacagcatcatctgcagcctctacattagcatagggagcaggtggtcaatcatagcagcacagctgccagggaggacggacaacgatgtcaagaactactggaacacaaagctgaagaagagactccttggccggcgcaaggaccgcggcggcggccaccaccaccgcagccagagcaccgccgacgatcttccggccggtggtgacggcggcatgaacgacggcggcggcggcggcggagagcggtcgctgagcgcgtcggcgatggagaggatccagctctgcatgcagctgcaggagctgcagaacccactgtccatccaccacaaccccttgctctctcatcagtggccaagcaaggccaccattgatgatcagaatcacaacaatgtcactgtggctgaacatggaatgtcaagctctgtgagcgaccaccaccgcctcgatgggcagcagctggagagcggcgccggcgccgccgccatgcagcaggcgtcgccgtcgagcggcggcgagaactccaacgtcgtcgtcgccatcgaggccgagctccaggagcttctctacgccggcggcggcgcgatcgtcgacggcggcgcgccgccgcagggggatgtggactggtggagctatgatcagggaaagcagtcacctgtgacttgctgggatttcacccctgaaaccagctccatcttccaggattatgcaacagtttatgacatctga

SEQ ID NO: 12344 - DNA, 1569 bp, Oryza sativa
  Clone ID: TFbOSC101223j.C1.o1.fg
atggaagagatgatcaagccggcaccggcaccggcgtcgtcggaggaggagaaggaggtggtggctactgctgctactggagaaaggaggcatgaggaggcgacggccgggagagaggagcaggaagaggaggaggaggaggaggaggcgccggtggtgctgaagaaggggccgtggaccacggcggaggacgccgtgctggtgcagcacgtccggcagcacggcgaggggaactggaacgcggtgcagcggatgaccgggctgctccgctgcggcaagagctgccgcctccggtggaccaaccacctccgccccaacctcaagaagggttccttctcccccgacgaggagctcctcatcgcgcagctccacgcccagctcggcaacaagtgggcgcgcatggcctcccatctgccggggaggacggacaacgagatcaagaactactggaacacgaggaccaagcggcgccagcgcgccggcctgccggtgtacccgccggatgtgcagctccacctcgccttcgccaagcgctgccgctacgacgacttctcctcgccgctgtcgtcgccgcagcaatccgcggggagcaatgtcctctctatggacgcagccgatgccgccggcgccgcctcgtccgggtacaccagcgcgcgcccgccgccgctcgacctcgccggccagcttgccatggggagccggccggttcagctcctcgccgcgacgccgttctccgcgccttcgtccccgtggggtaagccgttcgctcggaacgcgcagttcttccagttcccgcactcgtcgcccgtgtcgccgacgacgccgaccgggccggtgcaggtgcacccggtcacgccggagctctcgttgggctacggccttcacgccggcgaccgggccagactcccgcctgtctcgccgtccccgggtgccagagccgagctcccttcaagccaattgcgcccgtcgatggcgcctaccacagccgccgccgccgccaccggcggcttggtcggcggagcgctgcaggatcacccaaacgcggcgagcctcgaggccatgctgcaggagctgcacgacgccatcaagatcgaaccgccggcgccgccggaaaacagaggaacggaagaagaaggcggcggcggcggcggcaatctgcgcggcttccttcatgagcaaatttttgacaaattgatgcccatcaagtctgaagatttttgcatcgtggggttgcattctgtactaatttcacttcaatttccaggtgacggcaaaccggaggtagagctcaaggacgacatcgagacactcttcgaccttatcataccggcgacgttcccggcggcggcgccggagcccgccgccgccgcgacggccgcctccgccgcgcccaaccactccagctccgtctcgcagcacagcagcgacgaccaggaccactccaacggcgccgacgtcctcgacctgcccatcctcaccggcggcggaggcggctcgtcggagcaggacgactggagcctcgacggcgccgcctgccagtgggacaacatctccggcggcatctgctga

SEQ ID NO: 12345 - DNA, 906 bp, Oryza sativa
  Clone ID: TFbOSC102011j.C1.o25.fg
atggggatggaggcggagtgcgataggataaaggggccatggagccctgaggaggacgaggcgctgcggcggctggtggagcggcacggggcgaggaactggacggcgatcgggagggggatcccggggaggtcggggaagtcgtgcaggctgcggtggtgcaaccagctgtcgccgcaggtggagcgccgcccgttcacggcggaggaggacgccgcgatactccgggcgcacgcccgcctcggcaaccgctgggccgccatcgcgcgcctcctccccggccgcaccgacaacgccgtcaagaaccactggaactcctccctcaagcgcaagctcgccaccgccacggacggcggcgagatcgaccggccgtgtaagcgcgtgagccccgggccggggagcccgacgggatcggagcgcagcgagctcagccacggcggctgcggaagcggaagcggcggcgggcaggtgttccgccccgtgccgcgccccggcggcttcgacgccatcagcgcggcggacgtcgtgcggccgccgcggcggcgggacgacaacgacgacgacggcgacgacgacccgctcacctcgctgtccctctccctctccctcccggggttccaccacgacagcgcgcggagccacttccaggagctcccctccccctcccgctccccttcgccgccgccgtcgccgccggcagcatctccatccgcatacccgttcaacgccgatctcgtctccgcgatgcaggagatgatccgcacggaagtccgcaactacatggccggcgtcgggctccgcgccggctgcggcccgggcgccgtggccgagtccttcatgccgcagctcgtcgacggcgtcatgcgcgccgccgccgagagggtcggcgtcgtgacccgccaataa

SEQ ID NO: 12346 - DNA, 831 bp, Oryza sativa
  Clone ID: TFbOSC421872j.C1.o2.fg
atgcctacagatgatgccacggcgacgggcaacggcgacggcgccgctccccgtccggcagccgccgagccagcggcgccgctgtcgtccgtgtggacgcggcgggacgaaaagctgctggagatgctgctctggcgctggcagctggacccgcactgggaccggctcgccgcggagctcggcggcaagacggcgacgcaggtgttcgaccggtacgtgtgcttggccgacgagctgaggctcgtcatggcggcgccggcggtggacacgccgcccgcgtgggacgtgcaggacgaacgggaggccgctgtggcgccactacccgggttggaggccgacgcggcggccggcgccggagagtcagcggaggtgacggccattggcatcgctgccgccgcttctccgaatgcagctgctacgagcgctccgaccatcggcggcggggtggtattgaaatctagagagctgaaaaatccgcggaagacgaggatggccggcggcgggccaaggaagaaggcggagatgtggaccagggaagagcatagccaattcttgcacgggattagtacgtacgggaaggggaattggaaggcgctggcgagcgagttcgtgaagaccaagagctcgacccagatcgcgagccactaccagaagttctgcatcagggaagagaagaggaggctgagcaagtgcaagcgggcgagcatccacgacatcgtcagcccgacgacgacgacgtccgcgcctgaatctgccggcgccggcccgagtgcaccaccgtgcgcgctgatcgaaagcggtgcgctgattgcaggcgacgatgacgcatga

SEQ ID NO: 12347 - DNA, 526 bp, Oryza sativa
  Clone ID: TFbOSC411350j.C1.o2.np
tgctgcgtcgtcctgcgcatcaagctcccggcggcgtggacgcccgaggaggacgccgccctggagcgcctcgccgtggagaacggctcccgccactggcgccgcgtggcggcgcagatgccgcgcaagcgctcgcccgtgcagtgccgcgacaggtggagggaccacctcgcccgcgacgtgttccaccgcccctacaccgcggccgacgacgacgagctcacccgcctcgtcctgcgccccggcggaggtggcgaccgatggaaggacatcagcagagcggtgcacggccgcagctcgcgctccgtgaagcgccggtggatggagatcggcacgagcgatgagctcctcaggaagttggcacccccggtcatcgatgctgtctccggccacggtggtggacgccgtcgtctgatgcggccaaatcaagcttttggatggcgccgttgctagctagggccagttcactgacgcgatgagctcctcaggaagttgtggcacccccggtcatcgatgctgtctccgg

SEQ ID NO: 12348 - DNA, 1029 bp, Oryza sativa
  Clone ID: TFbOSC401516j.C1.o2.fg
atgcagccgccgccgatgagggagaggcagcggtggcggcctgaggaagacgccatcctcctcgcctacgtccgccagtatgggccccgggagtggagcctcgtgtcccagcggatgaaccgccccctccaccgcgacgccaagtcctgcctcgagcgctggaagaactacctccgcccggggatcaagaaaggttcgctcaccgacgacgagcagcgcctcgtcatccgcctccaggccaagcacggcaacaagtggaagaagatcgccgccgaggtccccggccggacggcgaagcggctgggcaagtggtgggaggtgttcaaggagaagcagcagcgggagctccgggatcgggatcgccggcgactcccgccgccgctggacggcgacgagcgcggctgcgccggcgggcgatacgactggctcctcgaggacttcgccgacaagctcgtcaacgaccaccaccgccgaatgatggctgccccgatcctcccgccgtggatgtcgtcgtcgccgtcgtcttcttcctcgccgtcggtgacgcttagcctcgcgtcggcggcggtggcgccggcgcctgcggcgccgccgccgacgtggggtggtggtggaggaggggaggtggtggtggcggagttgatggagtgttgcagggagatggaggaagggcagagggcgtgggcggcgcacaggaaggaggcggcgtggaggatgaagagggtggagatgcagctggagacggagagggcgtgccggcggcgggaggcgacggaggagttcgaggcgaagatgagggcgctgagggaggagcaggcagctgcggtggagcgggtggaggcggagtaccgggagaagatggccggcctccgccgcgacgcggaggccaaggagcagaagatggcggagcagtgggcggccaagcacgcccgcctcgccaagttcctcgaccaggtcgccgcctgccgccgctggccgcccgtagagatcaacggcggcggcggcggcggccccggcggcggccggtga

SEQ ID NO: 12349 - DNA, 590 bp, Oryza sativa
  Clone ID: TFbOSC400608j.C1.o20.fg
atgggaagatcaccttgctgcgatgagagtggcctcaagaaggggccatggacaccggaggaggatgagaagctgctccactacatccagaagaatggccatggcagctggaggacactgcccaggcttgcaggtttgaacaggtgtggcaagagctgcaggctgcggtggacgaactacctgaggccggacatcaagaggggcaagttctcccaggaggaggagcagaccatcctccacctccactccatcctcggcaacaagtggtcggcgatcgcgacgcacctgccggggaggacggacaacgagatcaagaacttctggaacacgcacctcaagaagcgtctcatacagatggggttcgaccccatgacgcaccggccgcgcaccgacttcttcgccgcgctgccgcagctcatcgcgctcgccaccctccgtgaccagctcgccgcgacggcgtgcggcggcggcggcggtggcgacacggcggcggcggcggcggcgcagatcatgcagggcgccggtggtggtggtggcgccgacgttgccatccaggccgccaagatgcagtacctgcagtgcctcctgca

SEQ ID NO: 12350 - DNA, 386 bp, Oryza sativa
  Clone ID: TFbOSC8036j.C1.o1.fg
gtgttccatggactgaagaggagcacaggaaattcctggtagggctcgagaagctcgggaaaggcgactggcgcggcatttcccggcacttcgtcacgacaagaacaccgacgcaggtggccagccatgcccagaagtatttcctcaggcagagcagcctcacgcagaagaagagaagatccagcctctttgacgtgattgaggatgcagaaaaggctccgagtgtgaatgaacgtctgaaactgagacacgagacagcctctgtgcctgctgaaatgggattccctgcactgtcactgggtatcagcagcatggcacagccagaagccatgctgctgcctcctccatccttaaccctgacgccagctgttcatcaccagcagtga

SEQ ID NO: 12351 - DNA, 1392 bp, Oryza sativa
  Clone ID: TFbOSC400860j.C1.o23.fg
atggcgcgttttcaggaaaccaaggcgaggaatgatcaaggacctgttgctgatcatgttgggcaccaaaacctcatggaaaacctcacagatcctctggattccagtggcatggacatgatggacgaagcgcgaattcctaaggcgcggaagccatacacgataacgaagcaaagggagaaatggaccgaggacgaacataagctgttcttggaagccctgcagctccatggccgagcctggcgacgcatccaagagcacataggcaccaagactgccgtgcagatcaggagccacgcacagaagttcttctccaaggtcatcaaagaatcatctggggacaattgcaacagcttgggtgctgcatcatcaattcagattcccccgccgcggccgaagcgtaagcctgttcatccgtacccacgcaatctagggagcacagccagcaagaacgtccctgcactgaaacagctagagaagcctcagctgcaggtgcagtctctctacgaccaggacaatgggtcgccgacgtcagtgttaacagtaccacagatacgggctgatacactgggaagtgagagtggtgggtcgccaacctcgacgattgatattgaagagagatgtcctacaccaagcatagcaactgctgagttagctatggagttgcctcctacaaatgacgaggaggtcaagggcaatggcgatcatgaagaagttacatgtgacagatcaggagttccagtccttaggctatttggcaagagggttatggtgaatgatttacatcagatgtcagcccctgatgccgggaacctgcaaactgtggcagacatggaagtggacgcttcagctgagacaccaactagtggaactgggaaattctcttcccatggtgcagcagaagcaaatacatggaacccatggctgactaacacacagcagtttctgtattatcttcctaacggacaaattttctccgtgcattctgctctcccatgcttcacctaccataatgagggtgttacttgcacccagttttcaaacccacaggtggtagcctcagatcaacagcatcaacaccaaacttctgaagctgtagattacaagggtatacagagggaaggatcttggacggagtcaaatacatcctcaagcagtgtgcctgaaacagcaactcataattcagagactacagaatcatatagaaacggaaacagaaacgaagatgaaatggtaccttctccagattcaagaaaatgtgtgagcccaggttccaactgcaggcgaggctttgtgccgtacaagagatgtgttgctgatagtgaggcgctgctgaagtcacaggcgcctcaggaggaggcagacggagagatgacgaggctgtgcttataa

SEQ ID NO: 12352 - DNA, 301 bp, Oryza sativa
  Clone ID: TFbOSC25059j.C1.o3.np
atggtgagaggttctcatcctcttatcccagccggagtcggtccttccgctctggtcaaagcaaggctcccgtttcacggtgtaataggagcccagaagtcttcacccattaaatgtcctcgaatctcacccgctgcccccggccgaactcacaaagggtggcctcacggttccctggtggaggagttcattctccgacacctcccccgtaatcatggtcatagctgtttcctgtgtgaaattgttatccgctcacaattccacacaacatacgagccggaagcataaagtgtaaagcctg

SEQ ID NO: 12353 - DNA, 1242 bp, Oryza sativa
  Clone ID: TFbOSC401161j.C1.o35.fg
atgtcgtccgaaaccgccgcttcgccgccgccgccgccgccgaatccaccggccgccgactccacccattccagccccgcctccatgaccgacgagacgcacggcgcaggagcccatcccgacgagtcccaaccgcatcgctcctcatcgtcgtcctcctcccctcccgtggccgtcgacggcgagacgcgcgtcccactcccagtccggtccctgccccaacctagccacccatcgccgcctccttcgggggaggacgaggatgacgtcgtcatcaccggccaaatcgcagtgggtgacgccgcgggggcggcgatggaggagcgggtgaaggggccctggtcctcggatgaggacacgctgctgagcaatctggtggagaaactcgggccgaggaactggacgctgatagcgcgcgggatacccgggcgctccggcaagtcctgccgcctccgctggtgtaaccaactcgacccccaagtcaagcgcaagcccttcactgaggaggaagaccgcattataatggctgctcatgcaatccatggaaacaagtgggcggctattgcaaagcttttggttgggagaaccgataatgcaatcaagaatcactggaactctaccctgaggcgtcggcactgcactggtggccgatgcacacaaggtggtgttatgaagagagctattccggagaggcctaggtcggtttcagaagaaccttggccattgggcaatcttagttccttaaatgttagggaagcaatggaagctcccgcacaaacagtatctgaaagttatgttggggcatggcaaatcggggatcagagttgcaaaactgaagttgttgatccaccttatcttgcccgaccagttgcaaaggttggtgcattcaaaccatacaatgtaggacctgctcaatcatcacaaaaggaaatgctgagctttgccaccaagtttgactcaaaccttcatcctttcaagcctgaaaatggggtctgcaagtttgttgatcctacaagttttgctgctgaggtgccaaataaatgtgggcatggctgctgcagttctcatgggcaacttcgtaagaactcattgctgggtcccgagtttaatgagtttgaagatcatccaccaatttcagatagtagttttgcttcgttggtgtcagaaattagcagcattgcctggatgaaaagtggtttgcaaagcagtgacaccttagcgcggtctgttccaccagcttaa

SEQ ID NO: 12354 - DNA, 789 bp, Oryza sativa
  Clone ID: TFbOSC412573j.C1.o11.fg
atggggaggcagccgtgctgtgacaagaagaaggtgaagagggggccatggacggcagaggaggacaagaagctcatcagtttcatcctgacacatggccgctgctgctggcgagcagtgcctaagttggcagggctgctgcgctgtggcaagagctgccggttgcggtggaccaactatctccgccctgacctcaagcgtggcctcctcaccgcagacgaggagcagcttgttgtggacctccatgccaagcttggtaacagatggtccaagatcgccgccaaattaccagggagaacagacaacgagatcaagaaccattggaacacgcacatcaagaagaagctcatcaagatgggcatcgacccagccacacatcagcctctgcccaacaccaaggtggttagccaaacaagaacctccacgctgtccactgccacaaccgaatcagccaagtcaaatggtatggcatatccgttcgatcccgagggaggctgcagcagggacatgtcagtgcccacagactcgatggagcagtcaagcaggaacaccagcagtcatggcctggacccattggtgaactggctgttggaggcagagcttccagctgacgagccatggctaaattttactagcagcaatgaagatgacttcagtggcatcgttaagcagtcagcatgggatggaagcacaacagactggctgcttgactaccaagacttcagcatggacgattcgagcttgattgatggtgcaagggttcagaattcagatggattgaacttttag

SEQ ID NO: 12355 - DNA, 1026 bp, Oryza sativa
  Clone ID: TFbOSC407994j.C1.o11.fg
atggtgaggccgccgtgctgcgacaaggacggcgtcaagaagggcccgtggacgccggaggaggacctcgtcctcgtctcctacgtccaggagcacggccccggcaactggcgcgccgtcccgaccagaacagggctgatgcggtgcagcaagagctgtaggctccggtggaccaactacctgaggcccgggatcaagcggggaaacttcaccgaccaggaggagaagctcatcgtccacctccaggcgctcctcggcaaccgctgggcggccatcgcgtcgtacctccccgagcgcacggacaacgacatcaagaactactggaacacccacctcaagcgcaagctgcagggcggcggcgccggcggtgacggagacggtggcgccgccggcgacgcggtctccccgaagcccgccgcgcagaggcccgcgtcgtcgtccaaggggcagtgggagcggcgcctgcagaccgacatcgacatggcgcgccgcgcgctccgcgaggcgctcacgtcgctcgacgacgtcaagccaccgcatcagcccgacgccgccaacgccgccgcggggggaggcggcgccaccaccggagcagcagcgtccgccggcgccgatagccccgccgcgtcgagcacgtcgggggcgtcgcagtgctccccgtcatccgccggctacgtcctcaccaccgagaacatctcccggatgctcgacgggtgggcccggaagaagggcggcggcggcggcaggcgcgccgccggcagcgggccggccacccccggcgccaccgagagcgcgtccggctcgtcggaagcctccgaggtgtcctacggcggcacggccttgtccgcagcggcggcgcccgcgtccgccttcgagtacgagacaaagccgaccgtcaccgccgccgccgccgccgacgccggcgacgagacgcagctctccgccatcgagtcgtggctgttcgccgacgccgacggcatcgagagtggcagcttgctcgacgcggccatggattacaccttctaa

SEQ ID NO: 12356 - DNA, 1029 bp, Oryza sativa
  Clone ID: TFbOSC410931j.C1.o2.fg
atggggcggtcgccgtgctgcgagaaggaggccgggctgaagaaggggccgtggacgccggaggaggaccagaagctgctcgcctacatcgagcagcacggccacggctgctggcgctcgctgcccaccaaggccgggctgcggcggtgcggcaagagctgccggctccggtggacgaactaccttcggccggacatcaagaggggcaagttcacgctgcaggaggagcagaccatcatccagctccacgcgctcctcggaaacaggtggtcggcgatcgcgacgcacctgccgaagcggacggacaacgagatcaagaactactggaacacgcacctgaagaagaggctcgccaggatgggcatcgacccggtcacgcacaagccccgcgtcgacgccgacgccgacgtcgccgccggcggcggcgcggcgggcggcggcgcgcgttccagggccgcggcgcacctcagccacacggcgcagtgggagagcgcgcggctcgaggccgaggcgcgcctggcgcgggaggccaagctgcgggcgctcgcctcgccgccgccggcaacggccgcgctaagcggggtcgactcgccgacgtcgactctcagcttctcggagagcgcattgttcggcgcaggcagtgcggcccccgacatacacggcgccgcgcgcgccgccgccgttcaggccgtgcagtcatcatacggggaggcgtgccaggagcaccacttcggcggcgccaccgccgagacgagctttgccggagccgggacgctggccggtgtccttcttgactgctccgtcaccggcgccgaccagagattcgcggagaggaccgaggcctgctccggcgagctgcagggggaggacgacgacgacaagggctactggaacagcatactgaacatggtcaactcgtccatgtcgtcgtcttcctcgtcgttgacttccgaggtggtcacggacaccgagatgttcctgccggcgacggcagcggcggcggcgtcggcgacgccggtagagttctga

SEQ ID NO: 12357 - DNA, 2766 bp, Oryza sativa
  Clone ID: TFbOSC1541j.C1.o2.fg
caaaagccgaaaaagtgggaagaaattcgaaccgcggtgtcaacgcccttcctcactcgcttcgcacgtgcctccctcgccggcaacactccaagctcccccaccgccgccgccgtcgccgtcgccgcctcctccgccaccggcgccggcgacgatgcctcctcgcaaggccacctcctccgcaggtacgtgccccccctcctcgcctcgcacttccccctcgcggggacctcctcccgcgctgacgctggcggccaaaaccctacctcccctgtagatgctcgggccaagtggcggaagcggaagcgcaacgcgaacacctccgcggccgaccactccgacgactccgactccgcggtggctgcggcggcgaacgacgacaacgacgacgacgacgcggcgctccacgcgggcaccgcggccgtcaacgggggaggcggaaccctaggcgggggcgatgacgaccccgtggtggacctccgcgaggccgaggtgcaccccacggcgatcgagcgcgtctccgccttcccgcccgcgttccgccgcgtggtcaaccggctccacccctccgtgctcgccgtcatggcggcggagcgcgccgccgccgcggctggtgctggtgctggcggcggcggcgcggccgtccccgcgctcgagaacatctctcacgggcagctccaggtgctctcgtccgtgctccctgaccacccgtccttgtccaacgaccccgacaagccgtcctcctacgtctgcacccctcctctactcatggagtgccgcggcgtggccaagcagttcgatggcaaattgctcatggtacccaagcattcagattggttcttgccaatgacggtgcacaggttggagaggcaagtgctgccgcagttcttctcagggaagtccccggggcacacgccagagaaatacattatgttgaggaatagggtaattacaacgtatctggagcgtcctgcgaggaggcttgcattttctgagtgccaagggcttgtcacaagcacgcctgaattgtatgacctgagtagaattgttaggtttttggacgcttgggggattattaattaccttgcggctgggtctgttcaacggggcttgaggatggcagcaacactaatcagagaggagccaacaggggagctgcatctcatgtctgctccattgaaatcaattgatggtttaattttgtttgatcgaccaaaatgcagtgtccgggcagaggatattgcttctggggcatcactttcatcttctccagggatggaaaatggtgatgctggttttgatgagaagacattgttggagagattgtctgagagcttttgtagtttctgcgcacaacctttgcctagcttgcactacgagtcacaaaaggaggcagacattgctctttgctcggattgcttccacgatgcaagatttgttactgggcactcaagcttagattttcagagagtggatgggaagaaagatggactggacaatgatggggacagctggactgatcaggaaacatttctgttattggagggcatagacaaatacaaagaaaactggaatgctgttgcggagcatgttggaacaaagtcgaaaatacaatgtcttcaccattttcttcgtcttccagtagaagatggattgttagagaatattaaagtaccagaagcatccttttcatcgaaattttggttgatgcaaaatgcttctggctccgtttttaaattgccacaattgtttgccttaggaagcttgcctcaaagcggcgaagctggagaccttcctttcattaacactgctaatcctgtcatgtcactgatctctattatgtctctggccttactgttcagagatgatttgcagattgcatttttggcctcttcattaggaccaagagttgcggcatcctgtgcaagtgaagcattaattgttttgactggaggtgactccaggatcagttcaattggcaatgatgttatgggccatgctgctcgaccgaactgtggtgactaccttattcctaaaattaattcctcattggctgtctcttcagaaaatgttagacatgctgcaagatgtggcttgtcggcagcagcaactaagtgtaaactttttgcggatcaggaggagcgtgaaattcagagattaagtgctaccatcataaatcatcagttgaagaggctggagttgaagttgaagcaatttgcagacatcgagacctaccttttgagggacagtgagcagtccgagaggatgaggcaggggctgcaagctcagcgcatccggatgatgtcagggcttcggttagcttcacccagaggcaacactatggcctcaaatccattgagtcaagcgaacattcgaccgccaggaataccgggatcgatgccccaggccggcactccagctttctactccaataacatgcaggtgcacccacagatggctttcttgcagcagcagatgcagcaacagcaacaaaaacagcagcaacagcagcagatgcagctgcagcagcaacagcagcagatgcaactacagcagcaacagcagcgacaggccttcttgcagcagcaacagcagcagatgcaacagcagcagcagcagctgcagcaacagcagcagcggcagctgcagatgctctctttcgggggtcggttgcctctgtcagcgatgaacgctccctcaacctcggcagcgcccaatgtcatgttcgacaaccctgacatgcccggtccatcgaatcaaggttga

SEQ ID NO: 12358 - DNA, 1926 bp, Oryza sativa
  Clone ID: TFbOSC21652j.C1.o1.fg
atggcgctccacctcacccgtcccttcctccggccgtcgccgccgccgccgcggccgactcgtcggagctcccgggctcattgcctcgccccttctgccagcgcgcggggcccgagcttcaggaggccctacacgtccgtcctggtggtccccaccggagtcggcgccgccgtcgggggtttcgccggcgatgcgcttcccgtggcgcgcgcgctcggtgccgtcgccgactgcgtcatctcccaccccaatgtgctgaacgctgcgatgctctactggccgatgcccaacacgctctacgttgagggatacgcccttgacaggttcgctgaaggatcctgggctctccaaccagttcaccagaacaaggtaggtttggtgttggattctggaatcgaggaggagcttcgactccgtcacttgcaggttgcggatgccgcgagggcttctcttgggctccctgtagtcgagtacattgtgactgatactcctttggagatcaagacatggtttgatccaaaatgtgggaagtctacagggagtgttgggaactctgattctctcctgagggcagttgaggccctggtgaaccgctctgatgtgaatgctgtggcggttgttgcgcgctttccagatgatgatccagaagattcagattgttatcgggaaggaaagggagttgatctgttggcaggagttgaagcgattatcagtcatctaattgtgaagaaattcaaaatcccagctgcccatgctcctgcagttttacccccagttctcagtctgtcagtgtccccaagatctgctgctgaagagattggacatacctttctaccttgtgtgcttgccgggttaagcaatgcccctcaatatgtgatgaggaggaatggaaacatggataatggttgcatagtggctagtgatgttgatagtgtgattcttccaaaagatgcttgcggaggagatggtactattgcctttgctagaactgctacaaagaacaagcccttaatcattacggttcaagaaaatgaaacagttcttgatgatacccctgacaagttcaatatagaggcgctaaatgtccagaactattgggaagccattggagtaatcgcagctcacaaggcagcaaatgctcgggcatatgcatctactgtgctagttcagttagcacctgacttgctgttaatttactgtagtttcctgtcgggtgcgcctcttgagattagcatttctcgcatgcttacttaccagctggtttgggtgaaaaattcgggcaaaatagtttttgggtacctgaaatttcagaaatttgaagctggcatatggaatcctcaccgtatcgctctatgcagtattcgtattttggttttctctgcaagtctgcaggtgtcatcgcagcctccaccacggctcatctccgagcacttgccggccggtgatccgccgtcgccgcttagccggagcagaaagaggaggagcttctccgaggaagaggacgagctcctcctcaagctgcacgctttgctcggcaaccgttggtccctcatcgctgggaggctaccggggaggacagacaaagaggtcatgaaccactggaactccaagctgatggatagtactatagagcatccaccctcgctacatgatgatgaacaccgtcgacggcgtcgccgtctgcgaagcgaagctcacgacgaacgtggtgcaaagcatccgggccacaattcatcttcttcctccaaggacgtcaatggcgatgaatgtacagtcgccgacgacgcaagtagctgtaaccaccaagatgataaccgggctgttgcagaattgaacctagagcttaccctctctacgccttgcatctacttgttacttggacaggatcgtgaggatggatcgaagagcaaccagggtttaatttga

SEQ ID NO: 12359 - DNA, 1644 bp, Oryza sativa
  Clone ID: TFbOSC400850j.C1.o64.fg
atgcccaacacgctctacgttgagggatacgcccttgacaggttcgctgaaggatcctgggctctccaaccagttcaccagaacaaggtaggtttggtgttggattctggaatcgaggaggagcttcgactccgtcacttgcaggttgcggatgccgcgagggcttctcttgggctccctgtagtcgagtacattgtgactgatactcctttggagatcaagacatggtttgatccaaaatgtgggaagtctacagggagtgttgggaactctgattctctcctgagggcagttgaggccctggtgaaccgctctgatgtgaatgctgtggcggttgttgcgcgctttccagatgatgatccagaagattcagattgttatcgggaaggaaagggagttgatctgttggcaggagttgaagcgattatcagtcatctaattgtgaagaaattcaaaatcccagctgcccatgctcctgcagttttacccccagttctcagtctgtcagtgtccccaagatctgctgctgaagagattggacatacctttctaccttgtgtgcttgccgggttaagcaatgcccctcaatatgtgatgaggaggaatggaaacatggataatggttgcatagtggctagtgatgttgatagtgtgattcttccaaaagatgcttgcggaggagatggtactattgcctttgctagaactgctacaaagaacaagcccttaatcattacggttcaagaaaatgaaacagttcttgatgatacccctgacaagttcaatatagaggcgctaaatgtccagaactattgggaagccattggagtaatcgcagctcacaaggcagcaaatgctcgggcatatgcatctactgtgctagttcagttagcacctgacttgctgttaatttactgtagtttcctgtcgggtgcgcctcttgagattagcatttctcgcatgcttacttaccagctggtttgggtgaaaaattcgggcaaaatagtttttgggtacctgaaatttcagaaatttgaagctggcatatggaatcctcaccgtatcgctctatgcagtattcgtattttggttttctctgcaagtctgcaggtgtcatcgcagcctccaccacggctcatctccgagcacttgccggccggtgatccgccgtcgccgcttagccggagcagaaagaggaggagcttctccgaggaagaggacgagctcctcctcaagctgcacgctttgctcggcaaccgttggtccctcatcgctgggaggctaccggggaggacagacaaagaggtcatgaaccactggaactccaagctgatggatagtactatagagcatccaccctcgctacatgatgatgaacaccgtcgacggcgtcgccgtctgcgaagcgaagctcacgacgaacgtggtgcaaagcatccgggccacaattcatcttcttcctccaaggacgtcaatggcgatgaatgtacagtcgccgacgacgcaagtagctgtaaccaccaagatgataaccgggctgttgcagaattgaacctagagcttaccctctctacgccttgcatctacttgttacttggacaggatcgtgaggatggatcgaagagcaaccagggtttaatttga

SEQ ID NO: 12360 - DNA, 1158 bp, Oryza sativa
  Clone ID: TFbOSC25059j.C1.o1.fg
atggccgggggaggcggtagcctggcggtgggcggcggattgaacgggtggcgaggcgtcagcggcagcgtcggagctgcggggctagaggagggtagtgggccggcttggtggcgggggcatctaaccgccaacggctcgaggatgaagaagggggggggttctcgccggcacgctattccaactggcgaggcggttggaggaggtggtgccgtggtggggattgatggggaggccgccgtgctgcgtgaaggcggaggtgaagaaggggccgtggacgccggaggaggacctatgctcgtcgcctacgtccaggagcacggcccgggcaactggcgcgccgtgcccaccaacaccgggctgatgcggtgcagcaagagctgccggctccggtggaccaactacctccggccggggatcaagcgggggaacttcaccgaccaggaggagaagctcatcgtccacctccaggccctcctcggcaacaggtgggcggcgatcgcgtcctacttgccggagaggacggacaacgacatcaagaactactggaacacgcacctcaagaagaagctcaagaagatgagcgccaccggcggcggcggcgactacggcgagggaggtggcgccggcgaggtgaagaccagggcggctgcgccgaaggggcagtgggagcggcgcctgcagacggacatccacaccgcgcgccaggcgctccgcgacgcgctctcgctggacccctcgccgccggccaagccgctggactcgtcgtcgggcgccacggcgccgccgtcgtcgcaggcggcgacgtcgtacgcatccagcgccgagaacatcgcgcggctcctggagggctggatgcgccccggcggcggcggcggcaagacgacgacgacgccgtcctccgggtcgaggtcgtcggcggcgtcggtgctgtacggggaggccagccacagcggcggcgccacggcgccgacgcccgacggctcgacggtcaccagcaagacgaaggacgaggagaccgccggcgcgccgtcgtcgtcgccgccgccggcgttctccatgctggagagctggctgctcgacgacggcatgggccacggcgaggtggggctcatggacgtggtggtgccattgggggacccgagtgagttcttttag

SEQ ID NO: 12361 - DNA, 603 bp, Oryza sativa
  Clone ID: TFbOSC401857j.C1.o12.fg
atggcggcggacggcggcgacggcagcggcggcggcaggaagacgccgtggacgcaggaggaggacgaggcgctgcgtcgcgcggtgcgcgagcaccggcggcagaactgggcggagatcgcgctggcgctgccccggcgcgggcccaagtcgtgccggctgcggtggtgccagcacctgtcgccggagctggacagccgggtcttcaccgccgaggaggacgcgatcatcctcgcgcagcagcgcgtgcacggcaacaagtgggccaccatcgcgcgctgcctccccggccgctacgacaacgccgtcaagaaccggtggaactcggcgctccgcaagctgctgcaagtgcaacacgccagcggcgccggctccccgccggccgctgccgccgccgccgccggagacgaccgggacgatgccccagtctgcctccagctgttccccgcgagggccgggggcgtgaaggaggctggcttattcgccggtgagaaggatgtggaggaggaggacgtggcgaccagcctgacgctggggttgccggtgctgtgcgaggcggagctggagctcaggctggggcctgcgtggccggccaccgcgtga

SEQ ID NO: 12362 - DNA, 714 bp, Oryza sativa
  Clone ID: TFbOSC900016j.C1.o36.fg
atggtgacagtgagagaggagatgcgcaagggaccatggacagagcaggaggacctgcaactggtatgcactgtccgcctgttcggtgaccgccgttgggatttcgttgccaaagtatcagggctcaataggacaggcaagagctgccgcctccgttgggtgaactacctccaccctggcctcaagcatgggcgcatgtcaccaaaagaggaacatcttattattgagctccatgctcgttggggtaacaggtggtctaggatagcacggaggctgccagggcgcacagacaatgagatcaagaactactggaggacacacatgaggaagaaagcccaggagagaaggggtgacatgtcaccctcgtcctcctcgtcgtcactggtataccaatcctgcctcctagatactgtgccaatcatcagtatggatggaggagacattcatgatgatcgcagctgcatggcaagagtcctcaaaagcactcagagtgtcatggatggatataccatggatcagatatggaaagaaattgaggcgccaggggcaccttccttgctgggtatagatgaagggaaagacaaagcatgcagcaatctcccatgtccacttctgacatctaccatgtcagactacagctgccctgaggtattctggaagattgacaatgaagaaacaaggatgttggctacacaatctggttatggaaaatga

SEQ ID NO: 12363 - DNA, 1185 bp, Oryza sativa
  Clone ID: TFbOSC21498j.C1.o1.fg
atgcacgagagcgacagcgatcctgattctgacaggacacactggtatatgagcaatagcgatgacgagtcatttgttgataaagataaagattgcagaaggagcaccgtagccctgctgttgaagaaaggtccatggacatcttgggaggactccatcttagagaagtacatcaagaagcatggtgaaaggaactggaagcttgtgcagaagaacactggcctcttgaggtgtggcaagagttgccgtcttcggtggatgaaccatctgaggcctaacctaaagaagggggctttcagcaaggaagaagagaataaaattattaatcttcatcgcaaaatggggaataagtggtctcggatggctgctgatttgccagggcgtactgataatgaaataaagaactactggaacactcgaataaagaaatgcaagaacaatcgttcgcctttgtatcctgctaatgtatgcaacgatgctttgaatgaagatcaacatgagtctgctgaccccaacgttagggagaagctgaccaataatcatctagaagatactactagtatgtattctgcaccccagttttcagatgcttccatcagtaatatacttgataggagacttgcatcaaaagattatgactccatagaagatcaaagaaaccaaatagaagttgtagcaaaatatgagattccacttcctgtgttgaaaacaacgaacaatgacatatttccatcagcctctatctttgccaaccatggtatttcaaatggcaatctctctgctttgtccacaactgatgctttgcagatggagctccctttaatccaatttgatccaaacaaccagttcgtttactcaagggcttatgcgatgcacctaacaaactttgctttattaaatgatcaatcagaagaattactaaatgatactgatgtattgaactatgtggtgatgaaagaagagctttctggagggagtttgagtcctactattaatatgccatgtgaagcacataactccatggctgcctctaatgagctggtagtgccacaatatgaaggagatgctccacctcttcaagatgatttcacatcatatttctatttgaatgatactaatctatccatattcgaagacacaaatgaattgtttttggaaaacaagttggatactaaaggtaactga

SEQ ID NO: 12364 - DNA, 3270 bp, Oryza sativa
  Clone ID: TFbOSC900288j.C1.o6.fg
atggatagggcgtcgaatttcatacctggtccttatcaagaactcgtggatgccaaaccaattagatcgttagctcctatgttccctgcacccttgggaatcaatgtcaaccagtcaagcaccccgcctttggtatgtgtcactccggttggccaatttcctgtcggttttggttctggaatccttcctacctttggttcaactactgccttcactaccacagcaaatggggtttcttatacaagctacaccaataatggagctattgatgccactcctatctcggcatataagaccagaccaggcattgtatcacttgatggcgatgaaccttactcaggttcagcatctggacggaagtccaagagatcatctggttcagctgctgatggttcaaatggagttaagttcaagcgccctaagccagtttacaagaattttgttgctggcaaggagcttgcctttttaccaccttcatccagtgatcccagggaggttgtggaagcagtccacatgacctttgaagcacttaggcgtagacatctgcaactggatgaaatacaagagactagcaaacgggctgacctgaaggctggcgccatcatgatggcaagcaatatcagggctaatgtgggaaaaagggtaggacttgttcctggagttgaaataggggatattttctatttccggatggagctatgtatcatcgggttgcatgctcctagtatgggtggcattgattatatgagtgctaaatttggaagcgatgaggattctgtggcaatatgtattgttgcagcaggtggctatgagaatgtggatgatgacacagatacactggtgtacagtggttcaggtggcaatagtaggaacagtgaggagaggcatgatcaaaagcttgagagaggtaaccttgctctggagaggagcctgcataggaagaacgagatcagggttgtgcggggcttcagggatccattttgcctgactggaaaaatctacatatatgatggcctctataagattcaggagtcctggaaggagagaacaaagtctggtatcaattgcttcaagtacaaactgctgcgtgagcctggacagcctgatggagctgcattgtggaagatgactcaaggatggatagacaatccagcaagcagaggcagggttatattacctgatctatcatctgcggctgaagctctcccagtttgccttgtcaatgaggtagaccatgagaaaggacctgggcatttcacctatgccagtcaagtcaaatacttgaggcccctcagttctatgaaacccttacagggttgcggatgccagagtgtttgcctgcctggtgatcccaactgtgcttgtggacaacataacggaggtgacttaccttacagctcatcaggacttttggcgtgccgcaagccaataatttatgaatgcggtgatgcttgccattgtactacgaattgccggaacagagtgacccaaaaaggggtcagatttcactttgaggtcttccggactgcaaatcgaggctggggtcttcgctgctgggatcccattcgtgctggtgcatttatctgtgagtatactggtgaggtcattgatgagctcaaagttaatctggatgacagtgaagatgattacatttttcagactgtatgtcctggtgagaagacattaaaattcaactttggtcctgaattgattggtgaggagagtacatatgtatcagctgatgaatttgagccactgcccatcaagattagtgcaaaaaagatgggaaatgtctcacgtttcatgaaccatagttgttccccgaatgttttctggcagccagttcagcatgaccatggagatgacagccacccacatatcatgttctttgcactgaagcacattcctcccatgacagaactgacttttgactatggtgttgctggatctgagtcttcagaacttcctgcctgtacccccagattcgagctctggtattattccctgagaatgacgatgggtttcaacatgaactgtgaagagacagtcacttttctttcaaaatgcacatgtaggtcactaatgatgcacgagagcgacagcgatcctgattctgacaggacacactggtatatgagcaatagcgatgacgagtcatttgttgataaagataaagattgcagaaggagcaccgtagccctgctgttgaagaaaggtccatggacatcttgggaggactccatcttagagaagtacatcaagaagcatggtgaaaggaactggaagcttgtgcagaagaacactggcctcttgaggtgtggcaagagttgccgtcttcggtggatgaaccatctgaggcctaacctaaagaagggggctttcagcaaggaagaagagaataaaattattaatcttcatcgcaaaatggggaataagtggtctcggatggctgctgatttgccagggcgtactgataatgaaataaagaactactggaacactcgaataaagaaatgcaagaacaatcgttcgcctttgtatcctgctaatgtatgcaacgatgctttgaatgaagatcaacatgagtctgctgaccccaacgttagggagaagctgaccaataatcatctagaagatactactagtatgtattctgcaccccagttttcagatgcttccatcagtaatatacttgataggagacttgcatcaaaagattatgactccatagaagatcaaagaaaccaaatagaagttgtagcaaaatatgagattccacttcctgtgttgaaaacaacgaacaatgacatatttccatcagcctctatctttgccaaccatggtatttcaaatggcaatctctctgctttgtccacaactgatgctttgcagatggagctccctttaatccaatttgatccaaacaaccagttcgtttactcaagggcttatgcgatgcacctaacaaactttgctttattaaatgatcaatcagaagaattactaaatgatactgatgtattgaactatgtggtgatgaaagaagagctttctggagggagtttgagtcctactattaatatgccatgtgaagcacataactccatggctgcctctaatgagctggtagtgccacaatatgaaggagatgctccacctcttcaagatgatttcacatcatatttctatttgaatgatactaatctatccatattcgaagacacaaatgaattgtttttggaaaacaagttggatactaaaggtaactga

SEQ ID NO: 12365 - DNA, 990 bp, Oryza sativa
  Clone ID: TFbOSC900032j.C1.o1.fg
atggacatggcgcacgagagggacgcgagcagcgaggaggaggtgatgggcggcgacctgcgtcgcgggccgtggacggtggaggaggacctcctgctcgtcaactacatcgccgcgcacggcgagggccgctggaactcgctcgcccgatcagcagggctgaaacgcacaggcaagagctgccggctccggtggctgaactacctccgccccgacctccggcgaggcaacatcacgccgcaggagcagctgctcatcctggagctgcactcgcggtggggaaaccgctggtccaagatcgcgcagcacctcccgggacgcaccgacaacgagatcaagaactactggcgcacgcgggtgcagaagcacgccaagcagctcaagtgcgacgtcaacagccagcagttcaaggacgtcatgcgctacctctggatgccccgcctcgtcgagcgcatccaggccgccgccgccgggcagcagcagcagcaggaaggcggcaccgacacgccgcccctgtcgtggcagcacggcggctccgacgggctctacgagtcgccggagctcccggcgcccgatgccagctgctggccagccgagtactgcgcggcggccggcggcgcgcagtcgggcggcacgcctgcaccggagctgtcgagcaccacggccgggtcgtcgtcgctgtccacggactccggcgccggggcgcagcccagctggcccacgcaggccgacggcgccgagtggttcaccaccgcctgcgacgcctccagcgccaccggcggcgtggccatgcgcgacacggagctggagctggcccagccgccgtgccagggcgggcagacgtggacgacgtccgagtcgtcgctgcctggcctcaccttccccgacctcgccgtcgcggacttcgagatcggcggcttcgacgtcgatagcttctggacgagcatggaggacgaccagctgtggtgccccacccaggccgccgtgtga

SEQ ID NO: 12366 - DNA, 1080 bp, Oryza sativa
  Clone ID: TFbOSC400549j.C1.o10.fg
atggggcatcactcttgctgcaaccagcagaaggtgaagaggggcctctggtctcctgaggaagatgagaagctcatcagatacatcaccacccatggctatggctgctggagcgaggtcccggagaaagccggtttgcagcgatgtgggaagagctgccggctccggtggatcaactacctgagaccggacatccggcgagggcggttcacggcggaggaggagaagctcatcatcagcctgcacgccattgttggcaacaggtgggcccacattgccagccacctgcctggccggaccgacaacgagatcaagaactactggaattcatggatcaagaagaagattcgcaagccggcggcggccgccgccgcggcgaccacgacgagcccgaacaacccgccgccgtgcagcacggcgacgtcggaccaccaccacctgccgccgccggcgttcggcggcgctgatcaccacctgcagctcgacgccatcatcaaccagaacctgatatcatccctgccgccgaagctcgccaccggcgacgactcgccgccggcggtgcccgggctgccgcaccactgcccgctcttcatgttcgacaccaccaccaccggcgccggcggcgccatcagcccgccgccgccgtcatcactgatcccaacccacctccaccaccaccaccacccgttcatcgccagcttcacggcggcgatggccgccgacacgccgagctacctgcccccgctggtcgacggcatggcagccatgggagcggccatggattgcagcttagaagatggccaaacagccgccgccatggccgccaccaatggctactaccagcatcatcagaagcatcagcagctggagattgagctggaggaggaggagcagaggcagctagggcatcatcatcatcagcatcaccatgagcatgagcatgaaaatcatcagtgggatgaagaagaagcacagcatctgctgatgtgggatcaagaagtactaacatcatccaacttggaggccatgcaaagtggtgctcattccctcctttttatgggaccaaatgaccatgattaa

SEQ ID NO: 12367 - DNA, 1029 bp, Oryza sativa
  Clone ID: TFbOSC401661j.C1.o13.fg
atggcgaagcgggcgggcggcgcgaggaagaagctgaggagagggctgtggtcgccggaggaggacgagaagctgatgaaccacattgccaagtatggccatggctgctggagctccgtccccaagcttgcaggccttgagagatgtgggaagagctgcaggctgaggtggataaactacctcaggccagacctcaagaggggagcattctcacaggaagaagaagacctcatcatccatctccattccatgctaggaaacaagtggtctcagattgcggctcagctgccgggtcggacggacaacgaggtcaagaacttctggaactcttacatcaagaagaagcttcgccagcgcggcatcgatccggccacccacaagccgctcgccgaggtcgtcgccgccgccgcctgcgcccgcacgccggcggtgttcagcgacgccgagctcatcctgtcctccatcggcgcccagccgccgccggagagctatgatggcagccggtacagcacggagtgcggcgccgcgagtgtcggcggcgacgggtcgctgtcgtcgctgtccgggtacagccaagcgacagcggagttcgcggtggacggcgccagcgcgagcgcgctgctgcactgcggcggcggcggccccacctcctccggtggtggcgccccgccggcgcccacggcggcggttatcccgtcggtgtcgagctccagcacgctgaactcgatggttggcctaagccccgccgccaccaccaccaccaccaccaccgacgagcagtacggcaacaccaaccacctcccatggctggagctgggcccaagcaccaccaccccctcctcctccgccgccgccgccacgttcgaccactacggcgccgcgctggacgagctcaagtggtccgattacgtgttcgacggctacaaccaccagctacctccgtacaaccatggcggcatctatggcggcggcgacagcaaggacacggcggtgcacttcgacgcccacgccctcggcaactggtgctag

SEQ ID NO: 12368 - DNA, 1077 bp, Oryza sativa
  Clone ID: TFbOSC401363j.C1.o3.fg
atgcagcgagagtgcatcgtgtcgggaccgatcgacgggtcgatctctgcgacgggcgacggcgcgcgtcgaggcgttggcggcatgcgcggtcatcgctcacgcgtccgcggggatggtggcctgcggatgcacaggagcggcagcgatcctgattctgacaaggcgcactggtatatgagcaatagcgatgacgagtcatttgttgataaagataaagattgcagaaggggcaccgtagccccgctgctgaagaaaggcccatggacatcatgggagaactccatcttagagaagtacattaagaagcatggtgaaaggaattggaagcttgtgcagaagaacactggcctcttgagtttttgcatcacaaggcgtactgataatgaaataaagaactactggaacactcgaataaagaaatgcaagaacaatcgttggcttttatatcctgctaatgtatgcaacgatgctttgaatgaagatcaatatgggtctgttgaccccagtgttagggagaagctaaccaataatcaactagaagatactactagtatgtattctgcaccccagttttcatatgcttccatcagtaatatacttgataggagacttgcatcaaaagattatgactccatagaagatcaaagaaaccgaatagaagttgcagcagaatatgagatttcacttcctgtgttgaaaacaaccaacaatgacatatttccatcagcctctatctttgccaaccatggcatttcaaatggcaatctctctgctttgtccacaactgatgctttgcagatggagctccctttaatccaatttgatccaaacaaccagttcatttactcaagggattatgcgacgcacctaacaaacttagctttattaaatgatcaagcagaagaattactaaatcatattgatgtattgaactatgtggtgatgaaaaaagagctttctggagggagtttgagtcccactattaatatgccatgtaaagcaacggcatattcttcagaactccctttatgcaagggatatcgggaacaagatcttgatttttacacacaatag

SEQ ID NO: 12369 - DNA, 972 bp, Oryza sativa
  Clone ID: TFbOSC401373j.C1.o1.fg
atgtcttataacctaaaacagaggatgcacaggagcggcagcgatcctgattctgacaaggcgcactggtatatgagcaatagcgatgacgagtcatttgttgataaagataaagattgcagaaggggcaccgtagccccgctgctgaagaaaggcccatggacatcatgggagaactccatcttagagaagtacattaagaagcatggtgaaaggaattggaagcttgtgcagaagaacactggcctcttgagtttttgcatcacaaggcgtactgataatgaaataaagaactactggaacactcgaataaagaaatgcaagaacaatcgttggcttttatatcctgctaatgtatgcaacgatgctttgaatgaagatcaatatgggtctgttgaccccagtgttagggagaagctaaccaataatcaactagaagatactactagtatgtattctgcaccccagttttcatatgcttccatcagtaatatacttgataggagacttgcatcaaaagattatgactccatagaagatcaaagaaaccgaatagaagttgcagcagaatatgagatttcacttcctgtgttgaaaacaaccaacaatgacatatttccatcagcctctatctttgccaaccatggcatttcaaatggcaatctctctgctttgtccacaactgatgctttgcagatggagctccctttaatccaatttgatccaaacaaccagttcatttactcaagggattatgcgacgcacctaacaaacttagctttattaaatgatcaagcagaagaattactaaatcatattgatgtattgaactatgtggtgatgaaaaaagagctttctggagggagtttgagtcccactattaatatgccatgtaaagcaacggcatattcttcagaactccctttatgcaagggatatcgggaacaagatcttgatttttacacacaatag

SEQ ID NO: 12370 - DNA, 306 bp, Oryza sativa
  Clone ID: TFbOSC101345j.C1.o9.np
aattgaagttctagactcagtgaggagttgaggtccagacggtcaaggataccgggtgacgaagttggatacgagatggcatacggtggatggataccgtgtgggtgaaatctttgcaacgggcttcacgagcatgcagcggctcggcttggtgatgcaagcagggcgtcggctggcctgggcatgtggcaaggcaagccgagtctgactcggtgaattttctgtggccggctgtggctgcaggtttcggagagtttgtgagaattacaattttttaagcaacttttgtacaaaaatttttttaca

SEQ ID NO: 12371 - DNA, 1077 bp, Oryza sativa
  Clone ID: TFbOSC400850j.C1.o69.fg
atgtcgcagaggagagttgcagggcccatgggagtgatgagcaagcagcagcaggaggccatggcagaggagatgatggagctgaggcgaggaccatggaccctcgaggaagacaacctcctcatgaactacattgcctgccatggcgaaggccgctggaatctcctcgcccgctgctccgggttgaagaggacgggcaagagctgcaggctaagatggctcaactacctcaagcctgacataaagcgcgggaatctgacgccggaggagcagctgctcattcttgagctccattccaggtggggaaacaggtggtcgaggatagcgcagcatctgccggggaggacggacaacgagatcaagaactactggaggacgagggtgcagaagcaggccaggcagctcaaggtcgacgccaacagcaccgtcttccgcgacgccgtccgctgctattggatgcctcgcctcctcgagaagatggccggagcagccaccgaccccactccgccgccgccaccgccactccaccaccacgccgccatggccaccgcctcctcctcgccgttcgacttcgacacccacctgcagcaagcagaagcagcaacggcgtgcgtcgtcccgaacaacgtgtaccaccaccacatcgacccgagcccgagcacgtcgacgtcggccggctcgacggcggccgcggcggcgttccagccgctgccctgcttctccgagctgagatgggaccagcagatgcagtcctccggcgagctcgacgacggcgccgccggcgtgttcgtcgactcggcgtcggcgctgggaagcctcagcctcgacgggctggaccttggtccggccgagtactactccgactcgacgctcctcgactacctcaactccagctgcaccggcagcgccatgatgacgatgatgaccgcctccggcaacgccggcagctacaactactgcggcggcgccatggacggcggcgacacgtggaggtccgacgagctaatggatgagttgttccatcatatcgatcaagatagaagtactagtgatcgatcaagcaaaaatcaaaagtag

SEQ ID NO: 12372 - DNA, 903 bp, Oryza sativa
  Clone ID: TFbOSC900070j.C1.o1.fg
atggcagcatcgcagaggagcaggagcacggcggcgcagctcgacgtcgacgaccaggcggcggccgatcagctgatgacgatgatgcggcggccagcggcggtactacaggatgaggccgccgccgaggaggaggcctccgcggcggcagcggacctgcagctggagctccggcgagggccgtggaccgtcgacgaggacctcaccctcgtcaactacatcgccgaccacggcgagggacgctggaactccctcgcccgcgccgccgggttgaagaggacggggaagagctgcaggctgcggtggctgaactacctccggcccgacgtgaagcgcggcaacttcaccgccgacgagcagctgctcatcctcgacctccactcccgatggggcaaccggtggtcaaagatagcgcagcatttgccagggaggaccgacaacgagatcaagaactactggaggacccgagtgcaaaagcatgccaagcagctgaactgcgatgccaacagtgctaggttcaaggatgctatgagatatctatggatgcctcgcctcgccgatgcaagccagctcggtgatcaccatgggtataatagtaccactgccatgggcgatgctcatgggatgccagtgatgacatcgtcgtcgtcggactcgttcgcgacatcagagtcatacgatgggggcctttatgcaaatgtgcaggacaatgagatggtgaatggtggggactactggatgcagggagcaaataaagggttttgtagtaattatgagtcagagcaacttcatcctcatgagcatagccagtttcaggatccagatcttgttggttgggttcagggcttttctgagggcatttccgagaatttttggagcttggaggacatttggaagatgtag

SEQ ID NO: 12373 - DNA, 489 bp, Oryza sativa
  Clone ID: TFbOSC401693j.C1.o25.gm
atggatcaggaggtgatcatggcgacgccaccgctgacgccgccgcctcgcgcgaggtcgtgccgcgacaggtggcgccaccacctcgcccgcgacgtctaccaccgccccttcaccgcccgcgaagacgatgagctcctacgcctccactaccgcctcggcgaccgctggaaggagatcggccgcgccgtctacggccggacctcgcgcgtcatgaagcaccgctggagggagctccggcgcggcggcttccccgctgctgccaccaggaaggagcaggcgcctgccatggacgcggacgacatggtggaaagcgaaatggaggagtcagatcagtcgctgccgccgctcaccaagaaggcggagctccaattggtctaccgctccttcattggcgagatcagcctcaacctgcgactggggaagtttgacatcacagccaaacctttggcttatcccacgccctaccgctttgatggagctgtttga

SEQ ID NO: 12374 - DNA, 858 bp, Oryza sativa
  Clone ID: TFbOSC102044j.C1.o20.fg
atggggatggaggcggagtgcgataggataaaggggccatggagccctgaggaggacgaggcgctgcggcggctggtggagcggcacggggcgaggaactggacggcgatcgggagggggatcccggggaggtggagcgccgcccgttcacggcggaggaggacgccgcgatactccgggcgcacgcccgcctcggcaaccgctggggccgccatcgcgcgcctcctccccggccgcaccgacaacgccgtcaagaaccactggaactcctccctcaagcgcaagctcgccaccgccacggacggcggcgagatcgaccggccgtgtaagcgcgtgagccccgggccggggagcccgacgggatcggagcgcagcgagctcagccacggcggctgcggaagcggaagcggcggcgggcaggtgttccgccccgtgccgcgccccggcggcttcgacgccatcagcgcggcggacgtcgtgcggccgccgcggcggcgggacgacaacgacgacgacggcgacgacgacccgctcacctcgctgtccctctccctctccctcccggggttccaccacgacagcgcgcggagccacttccaggagctcccctccccctcccgctccccttcgccgccgccgtcgccgccggcagcatctccatccgcatacccgttcaacgccgatctcgtctccgcgatgcaggagatgatccgcacggaagtccgcaactacatggccggcgtcgggctccgcgccggctgcggcccgggcgccgtggccgagtccttcatgccgcagctcgtcgacggcgtcatgcgcgccgccgccgagagggtcggcgtcgtgacccgccaataa

SEQ ID NO: 12375 - DNA, 771 bp, Oryza sativa
  Clone ID: TFbOSC20253j.C1.o1.fg
atggagaacaaagatacaacagaaaaggccagattactcagtggtgctctgagcaaagaaggctcgtctggtacttcaaatgaaggaaagaaaattcaagcaaacggcgtggatggttccaaagcaaaatccacctcttcaggtgagaaggtcacgcaaggcaatacactaagcaactatgagaagaaagaagagaaaccatggggaagggaagagatcgagttgcttaggaaagcaatacaaaagtatccaaagggaacctcccggaggtgggaggttgtctctgagtttattggaactggaagatctgttgaagaaattctgaaggctacaaagactgttcttttgcagaaaccggactctaccaaagcttttgactctttccttgagaaacgcaagccagcaccgtccattgcatcacctctttctgtaagaactgaaacagttggtttgcctactgagaaagcagctggaaatgcatcatccaaagcgcctgcacaacatgcaagcagtaaaacatccgacgagaaagctgctgctcctgctcctgctcctgtatcaaatggaacaccttctggaacagcagatccagaggcttggtcagaggcgcaagtgctggctcttgtacaagctttgaaggcatttcctaaggatgcaagccaaagatgggagcgtgtggctgccgctgtcccaggtaaaaccatggtgcagtgcaagaaaaaggttgcagagatgcaaaagaatttccggagcaagaaaagcgctgagtag

SEQ ID NO: 12376 - DNA, 1350 bp, Oryza sativa
  Clone ID: TFbOSC900266j.C1.o3.fg
atgtccgcgtctgcatccgctgcctgtctccttcctccccgaggaggaagcctggcccgacccgacaccgcactccccccagccagccagccagccactgtcgcggtgaaacaaaatatcccccgcctcgcctcgcctcgcctcgcggtaacatccatcacactcctcccccgccgcggccgccgctgcgcggtagatctcctcctcctccacctccaccgtctcctgctcttcctctctctcttctcggaggaaacccccaatttattccttccccgcaaacccgcagccttcctaaaacgaattaaatctccctcccttatccgccgccgcaatccctccccacaaaatctcgctgcgccgcgcgctgttttagggtttgagctcatggcggtggaggaggcgagcagcagcagtggcggcggtcgtggtgggggtggcggtgggggtggggaggaggggttgtccggttgcggcggtgggtggacgcgcgagcaggagaaggcgttcgagaacgcgctggcgacggtgggggatgacgaggaggaaggggacgggttgtgggagaagctagcggaggccgtggaggggaagacggccgacgaggtgaggcggcactacgagctgctggtggaggacgtcgacggcatcgaggccgggcgggtgccgctcctggtgtacgccggcgacgggggcgtcgaggagggctctgcgggaggtgggaagaagggctctgcgggtggtgggggaggaggtggaggtggaggggggcatggggagaaggggtcggctaagtccgctgagcaggagcgccggaaggggatcgcctggacggaggacgagcacaggctgttccttcttggacttgagaagtacggcaaaggcgactggaggagtatctcaagaaactttgtgatctcaaggacacccacccaagtagctagtcatgcacagaagtattttattcgcctgaactcaatgaacagagagaggcggcgatcaagtatacatgacataaccagcgtgaacaatggagatacatctgctgctcaggggccaatcacaggtcagccaaatggcccatcagcaaatcctggaaaatcctctaagcagtctccacagccagcaaatgcgcctccaggtgtcgatgcttatggtacgacaattggacagccagttggtggtcctcttgtgtccgcagttggcactcctgttacacttcctgttcctgctgcacctcatatagcctatggcatgcatgcccctgtccctggagctgtagtccctggtgccccagtaaacatgcctccaatgccctaccccatgccgccaccaacatctcatggatga

SEQ ID NO: 12377 - DNA, 1152 bp, Oryza sativa
  Clone ID: TFbOSC403211j.C1.o2.fg
atgacgcgtgacggcgcgctgccggcgagcggcggcggcggggcggcggaggggccgaggcggtgctcgcagtgcgggcaccacgggcacaacgcgcggacgtgcacggcgaggggccccgtgaagctgttcggcgtgcggatcggcgacaagccgccgaccgcggccgcgggcggaggaggagggatgaggaagagcgccagtatggggagcctcgcgcagctggcggaggggggcggcggcggcggcgggagggaggaggggtacggctccgatgggaacgacgacaaacggcggaagcgaggtgaggcatggtcagaagaggagcacaaaaagtttctacttgggcttagtaagttaggaaaaggtgattggcgcggcatatcacgcaattatgttggttcaaggacgcctactcaagttgctagccatgctcaaaagtacttcattcgccaaacaaatgtgcacaggagaaaaagaagatcaagccttttcgatatggttatagatgattctgatgaccaaccactgtcccgtacatcttcacaagaagtagaagtagaagagaatctagaagatggacatcctgttactgcaccagtgatcccacctgctcctgtgcctatgctatcatcctctttggttccgccaccagtaccagcaatggcaccagttgctccaggtcctgtgttaacatctgcttcggccacactaccagtgtcagcagtggcaccccaaaccgatgaaaaggaacaagttgcctcaggttcaaatacaacagagacaggggctgcaattccagaagtcatgcccccatatggttatccaatgatgcttcctccatactacccaccggcatttgttccaatgccctactatggttatgtgcctgttttctatgcaccaccaggagcagtgcaagcacaacatgaggttgtcaagcctgtggccgtgcactcaaaacctccagtgcacatcgatgaactctacagcatgtccgaactcagcctgaagggcgaggctggtgtgaaaaacggcactcctaattctctgttgcctccaagaccaattggtagaccagacaggcaatctgcttttcatggaaaaggaccttctgatggctcttcaaatggactgattcctgcaaagtga

SEQ ID NO: 12378 - DNA, 1290 bp, Oryza sativa
  Clone ID: TFbOSC401545j.C1.o8.np
cattcgcaaatacagtaagagtttggttttgttcgtacatacatgcacgtatatacaagttcacaagaacagcagtcaaatgtggaccatgcgcaatggacgatgggttccaacttccaaatcttagtcgggccgttgcttcaccatgtgggctaaagatgccacgcgaccaaagcccaccaccacaagtggaccaaaagcccacataaactaatctcagtcatgtgtatgatggcaactgctgcccagtgccctcaccttcatgcccatagaaatgaattccatgtcagctccttttctgcttgtcccaaagggaggattcatgacaacagtgtcaacaagaaggcctacttcaacaggcagcaaaatggccatcaggagctccatcttgttgatcatccattcaacaatgtcactgacggccatgaatactattctccatctgctggtggatcttttcttccctttgcaacctactatgatcttggccatgagtactaccctcaaggaggagaaaaggatgctgtcgtcgtcgatcgggcttcgccgactattcgtaaagcttcgcctcacctgcctctcttcacacctaaatctgaggtttcggcttcgggtaagtctctgaagaaggctaatgttgtcaaaggccagtggacattggaagaagacaggaagcttgtgaaattagtcgaacagtttggactaaggaagtggtctcacattgctcaaattcttcctggaagagttggcaaacagtgcagagaaagatggcacaaccatttgaggcctaacatcaagaaagatacatggagtgaagaggaagacatagttctaatccaaacacacaaagaagtgggcaacaaatgggcagagatagctaagcacctgcctggtagaacagaaaactccatcaagaatcactggaatgcaacaaagagaaggcaattcgcacggaggaggagccgcgctagctccaagaaccccaaatctggaacccttctgcaaaactacatcaagagccttggaattggtccaatcaagtcaagtgttcgtcaagctccaccagaatctactgcagtgtcatcgtcttcaccagcatccacacaaaagttagcagaggtgaatggtaagatcaggccagattccaacccatccaaccaaatggtcacccagggaatactcaccatggatgagaacagctacatccagaccaactcttgtgaagaactcctggtctctacctatgatgatttatgccttgatatgtgtgatcatttgttcgaaacgaag

SEQ ID NO: 12379 - DNA, 966 bp, Oryza sativa
  Clone ID: TFbOSC19368j.C1.o1.fg
atggggaggccgccgtgctgcgacaaggtcggggtgaagaaggggccatggacgccggaggaggacctgatgctggtctcctacatccaggagcacggcgccggcaactggcgcgccgtgccgacgaacaccgggctgatgcgttgcagcaagagctgccggctccggtggacgaactacctcaggccggggatcaagcgggggaacttcaccgagcaggaggagaagctcatcgtccacctccaggctctcctcggcaaccggtgggcagcgatagcgtcgtacttgccggagaggacggacaacgacatcaagaactactggaacacgcacctcaagaagaagctcaagaagatgcaggccgccgaaggtggggaagacagcggcgccgcctcggagggtggcggcggccgcggcgacggcgacggcggcgggaaaagcgtgaaggccgccgcacctaaggggcagtgggagcggcggctgcagacggacatccacacggcgcggcaggcgctgcgcgacgcgctctcgctcgaccaccccgacccgtcgccggcgacggcggcggcggcggcgacgccagcggggtcgtcggcggcgtacgcgtcgagcgcggacaacatcgcgcggctgctgcagggctggatgcgcccgggcggcggcggcggcggcaacggcaagggccccgaggcgtcggggtcgacctccacgacggcgacgacgcagcagcagccgcagtgctccggcgagggcgcggcatccgcgtccgcgtcggcgagccagagcggcgccgccgccgcggcgactgcccagacgccggagtgctcgacggagacgagcaagatggccaccggcggcggcgccggcggccccgcgccggcgttctcgatgctggagagctggctgctcgacgacggcggcatggggctcatggacgtggtgccattgggggaccccagtttttag

SEQ ID NO: 12380 - DNA, 966 bp, Oryza sativa
  Clone ID: TFbOSC900251j.C1.o1.fg
atggggaggccgccgtgctgcgacaaggtcggggtgaagaaggggccatggacgccggaggaggacctgatgctggtctcctacatccaggagcacggcgccggcaactggcgcgccgtgccgacgaacaccgggctgatgcgttgcagcaagagctgccggctccggtggacgaactacctcaggccggggatcaagcgggggaacttcaccgagcaggaggagaagctcatcgtccacctccaggctctcctcggcaaccggtgggcagcgatagcgtcgtacttgccggagaggacggacaacgacatcaagaactactggaacacgcacctcaagaagaagctcaagaagatgcaggccgccggaggtggggaagacagcggcgccgcctcggagggtggcggcggccgcggcgacggcgacggcggcgggaaaagcgtgaaggccgccgcacctaaggggcagtgggagcggcggctgcagacggacatccacacggcgcggcaggcgctgcgcgacgcgctctcgctcgaccaccccgacccgtcgccggcgacggcggcggcggcggcgacgccagcggggtcgtcggcggcgtacgcgtcgagcgcggacaacatcgcgcggctgctgcagggctggatgcgcccgggcggcggcggcggcggcaacggcaagggccccgaggcgtcggggtcgacctccacgacggcgacgacgcagcagcagccgcagtgctccggcgagggcgcggcatccgcgtccgcgtcggcgagccagagcggcgccgccgccgcggcgactgcccagacgccggagtgctcgacggagacgagcaagatggccaccggcggcggcgccggcggccccgcgccggcgttctcgatgctggagagctggctgctcgacgacggcggcatggggctcatggacgtggtgccattgggggaccccagtttttag

SEQ ID NO: 12381 - DNA, 783 bp, Oryza sativa
  Clone ID: TFbOSC900240j.C1.o12.fg
atggggaggtcgccgtgctgcgagaaggcgcacacgaacaagggggcgtggacgaaggaggaggaccagcggctcatcgcgtacatcagggcgcatggcgaaggctgctggcgctcgctgcccaaggcggcgggcctccttcgctgcggcaagagctgccgcctccggtggatgaactacctccgccccgacctcaagcgcggcaacttcaccgacgacgaggacgagctcatcatccgcctccacagcctcctcggcaacaagtggtctctgatcgccgggcagctgccggggaggacggacaacgagatcaagaactactggaacacgcacatcaagcgcaagctcctcgcccgcggcatcgacccgcagacgcaccgcccgctgctcagcggcggtgacggcatcgcggcgagcaacaaggcggcaccaccgccgccgcatcccatatccgtcccggcgaaggcggcggccgcggcgatcttcgccgtggcgaagccgccgccgccgccgcgcccggtcgactcctcggacgacggctgccgcagcagcagcggcacaacgagcacgggggagccgcggtgccccgacctcaacctcgagctctcggtcgggccgacgccgagctcgccgccggcggagacgcccaccagcgcgcggccggtctgcctctgctaccacctcggcttccgcggcggggaggcgtgcagctgtcaggctgacagcaagggcccacacgagtttagatatttcaggccgttggaacaaggccagtacatatga

SEQ ID NO: 12382 - DNA, 237 bp, Oryza sativa
  Clone ID: TFbOSC401122j.C1.o79.fg
atggatagcagcagtggtagccagggaaagaattccaaaaccagtgatggttgtgaaacaaaagaagttaataacactgcacagaattttgttcatttcacggaagaagaggaagatctcgttttcagaatgcacaggcttgttgggaacaggtgggaacttatagctggaagaatccctggaagaacagcaaaagaggtagaaatgttctgggcagtaaagcaccagaatacataa

SEQ ID NO: 12383 - DNA, 933 bp, Oryza sativa
  Clone ID: TFbOSC900203j.C1.o13.gm
atggggaggagagcttgctgcgcaaaggaagggatgaagagaggggcatggacgagcaaggaggacgacgtgcttgcctcctacatcaagtcccatggcgaaggcaagtggcgcgaggtcccccaacgagctggtttgaggcggtgcggcaagagctgcaggctccggtggctcaactatctccggcctaacatcaagcgcggcaacatcgacgacgacgaggagctcatcgtcaggctccacaccctcctcggcaacaggctgccgggccgaacagacaatgaaatcaagaactactggaacagcacgctcagccgcaagatcggcaccgccgccaccgccgccgccggcagccgcggtggcagcacgccggacaccgccagagcgacggacgcggcgtcgtccagctccgtcgtgccgccgggccagcagcagcagccagcctcccgcgccgacaccgacacagcaacggcagcggcggcggcggcggcgacgacgaccaccgtgtgggcgcccaaggccgtgcggtgcacgcgcgggttcttcttccacgaccgtgaaacggcgccgctcgccgcggcggcgccggcgccggcaggggaattaggagacggcgatgacgtcgactgcgactactactgcagcggcagcagctcggcggcgacgacgacgtcgtcgagctcattaccggcggtcgtcgagccgtgcttctccgccggcgacgactggatggacgacgtgagagccttggcgtcgtttcttgacaccgacgacgcctggaacttgtcgcggggggtggccgccgccgccgtcgcgccgccggatccgcgcgtggggtggccgccgctggatctgccgcagccatcacgcgccacctcgtcgtcgacgccgctgtcgtgccccaccacattttcgtcgccactgtcgccgtag

SEQ ID NO: 12384 - DNA, 684 bp, Oryza sativa
  Clone ID: TFbOSC100886j.C1.o2.fg
atgccggaccagcgccgaggcactaccgcactgctgcccacggccaggcacggtccagccgcctctgaccggcaccacagcgcctccgctgctcgcagggacgccgccgctacccgcccggctacctccgttgccgccgccaacacgctagtctcctcctccctgatcgagatcgagtcgacacatacaccaccaaccaccggccggccgccgcgcaccggcgagcaggatggggaggccgccgtgctgcgacaaggttgggtgaagaaggggccatggacgccggaggaggacctgatgctggcctcctacatccaggagcacggctccggcaactggcgcgccgtgccgaccaacaccggggtgatgcgttgcagcaagagctgccggctccggtggacgaactacctccggccggggatcaagcgggggaacttcactgagcaggaggagaagctcatcgtccacctccaggctctcctcggcaaccggagggatcatatggaggtgatttcaccaatgaaagatggaacatttattgattgggatattgttgacaatatatggaatcatgctttcagcttttatcctgaggagcatcctatgttgatagttgaaccatctacaaacacagggcagcaaagagagaagtatctattgactttaaagatcatgaaggcataa

SEQ ID NO: 12385 - DNA, 1134 bp, Oryza sativa
  Clone ID: TFbOSC900148j.C1.o12.fg
atgggcagggcgccgtgctgcgacaaggcgacggtgaagaagggcccgtgggcgccggaggaggacgccgcgctcaaggcctacgtcgacgcccatggcaccggcggcaactggatcgccctcccccacaagatcgggctgaacaggtgcggcaagagctgccggctgcggtggctcaactacctccggccgaacatccggcacggcggcttcaccgaggacgaggaccgcctcatctgcagcctctacatcgccatcgggagcaggtgggcgaccatcgcggcgcagctgccggggaggacggacaacgacatcaagaactactggaacagcaagctcaagcgccgcctgctcggcggcggccgccggccgcggggcgcgccaccgcggctcgtgctcgccggcccgggccccgctgtaaccgccgccgccacgtcgcgcaacgccatggccgcgtcggcgatcgagcggatgcagctcagcgtgcggctgcgccgcctggaggccgcggcgccgccgccgccgcagcccttcaccttctacggcagcaacaacctcgccgcgccgccgtggcagcagcctatctccccggccgcgggcggcagctcggagatgccacggcggctgcatcaccaccacccctccggcgccgccgctacctcgagctactccggcctgatcagcagctggccgtcgtctcgctcccacatcatccacgacgcctggctcgacgcctcctccaccccgccgctgtcgacgacgagcatgggcgacgccgccacgacgacgacgacggccggcggggagagctcgagctcgacgccgacggtgagcacggccaccacgccgttcatcggcggcagcatcgacatggacgacgagatcgacatgctgctccagcagatcaggtgcttcgatgagaacggcgacgacggcgacgacgacgccgaccagcggctgatcgtcggcgacgaggccgcagccggagcagagaactacctcagggcattgatagacgaggcggcagcgaacggtggcgatgtcggcgttggctcctggagctcttgctctactccaggagtggactccgtgttccatgagtatgctcagctagactacggacagtataattaa

SEQ ID NO: 12386 - DNA, 7080 bp, Oryza sativa
  Clone ID: TFbOSC24631j.C1.o2.fg
atggggaggtccccatgctgcgagaaggcgcacacgaacaagggagcctggacgaaggaggaggaccagcggctcatcgcctacatcaaggccaacggcgagggatgctggaggtcgctccccaaggccgcagggttgctgcggtgcgggaaaagctgccggctgcgatggatcaactacctgagaccggacctcaagcgaggtaatttcaccgaggaggaggacgagttcatcatcaagctccatgagcttctaggcaacaagtggtcactgatcgccgggaggctgccggggaggacggacaacgagatcaagaactactggaacacgcacatcaagcgcaagctcctcgcccgcggcgtcgacccgcagacgcaccgcccgctcaatgccgccgccgaccaccaccagcagcagcagctccaggcgccacggcggttcgccgccgcgccagccggccaccaccaccaccaccctgaccatttcgccgtcctctccaactcgccggaggcctgcagccacagcagcgacgacgagcccagctccgccacgccgccgccgccgccgcgtcacctcggcatcgacctcaacctttccatcagcctagctccttaccagccgcaggatcagaccagcgagccgatgaagcaggaggaggacgacgaagcgtcagcgacggcgaacggcgccggcaatgcagcgatgacgacgacggcgacgacggcggcggtgtgcctgtgcttgaaccgcctcgggctccacggcggcgaggtggagatggatcggcaatggatgtacgctgaccggcggtccaaagagtttattgacggcgtgcactattttttgagagtggccgaagctaacaggcaaaggggttttatttgttgtccatgcaataagtgtaagaatcagaaggagtattctgcatccaggactattcatttccacttgtttgagtcggggttcatgccaagctataattgttggacatcccacggagagcaaggtgttgaaatggaagaagatgaagtggaagacgacaatattccggactttgctcagtatgttggatttgaaggaaatcaaacgggcgaggaggaaatagctgctgatggtaacgacgttgcggatgatcttggtcagatgttgcaggacgccagggaagactgcgaaagtgaaaaggaggcccataaattggacaagatgttggaggaccacagaaattcgttgtacccaggttgcgagcaggggcacaaaaagttggataccactctggagttgttgcaatggaaggcaaaaaatggggttagtgacaaggcatttggcgatttattgaaactcgtcaagaacattcttccggggggaaacaaattgcccgagacaacgtacgaggctaagaagatagtctgcccgttaggactggaagttcataagattcacgcatgtccgaacgattgtatcctatatcgcggtgaggagtatgagaacctagaagcatgccctgtttgcaaagcactacgatacaagattagacgggacgatccaggagaagttaacgggcagctaacaaagaagagaattcctgctaaggtgatgtggtatttccctataataccacggctaaggcgtttgttcaggaacaaggggaatgctagaatgttgcgatggcacgctgaagagcgtcaacaggacgggatgctgagacaccccgccgatggttcgcagtggcgaaacatcgacagaaaatttaaagaatttggaaaggacgcacgaaacatacggtttggccccaagcaacctggtaacgacatcgacgtgtacctaagaccactggtcgaagatcttaaacagttgtggaagaaggaaggtgtccccgtgtgggacgaggacaaacaggaggagtttaacctacgagcgctgctgttcgtaaccatcaacaattggcctgcacttagcaacctatccggacagtccaacaaggggtacaaggcttgcactcactgtatggatgaaacagaaagtacgtatcttaagcactgtaggaaggttgtatacatgggtcatcgtcgattccttgcagcaaaccacccggtacggaagaaaggcaagcacttcgaacataaggccgaccaccgtacgaagcctaaacatcgcagcgggaaaacagtgtttgctatggttaaagatcttaaagtagtgttcggaaaggggcctggaagccagcatatagagagcgaagatggtcacgcggcgatgtggaaaaagaactctatattttgggagttaccatattgggaattcttggacgtacgccatgcaatcgacgtgatgcacctcactaagaacctttgcgtaaaccttcttggcttcctaggtgtatacggaaagtcgaaagatacactggaagcacgtaatgatctgaagcatatggaacaacgcggcgaccttcacccggaaccaaaggagaaaggaagccattacttgagtccagccagctacactcttagcaaggcagagaaggaaagtatgtttgaatgcttggagagcataaaggtaccgtctggatactccacgaatatcaagcgaataataagcacgaaggagaagaagttcacaaacctaaagtctcatgactgtcacgtgttgatgacacaactgctaccagttgtaataaggggtatccttccagacaatgtccgggcaacaataacaaagctatgtgcattcatgaacgcaatttcgcagaaggtcatcgatccggatagattagaagcccttcagaatgaagtggtgcaatgtctcgtcagttttgagttgatatttccaccttcatttttcaatataatgacgcatctgctttgtcaccttgtgaaagagatccgtattctcgggcctatgtacctacacaacatgtttcctttcgagaggtacatgggcgttctgaagaagtatgttcgtaaccgtgctcgtccagaggcaagcatcgccaagggttatggaacagaggaggtcatcgaattttgcgtagaatttatcgaagaccttcgcccaatcggggtacctgaatcacgccatgaagggagactacggggaaagggaactctcggaaggaaagcaataatgacggtagacaacaatttattccgtaaagcccatttcactgttctgcaacactcttcattggtagctccttacatcgaggagcacttggctctagttcgcgccaggaacatcggtaagtccgatgcatggattacacggcatcacattgatactttccccgcgtggctacgacaacatctcatgggtaacgagtcgatcaaccaacaacttgccttcctggcgaggggaccgtctgggtctatcgcgacattccagggatatgagatcaatgggtacacattctacacgagagcccaagacatgaagagcacgaaccaaaacagcgctgttcgtgtcgatgccatgggacacgatggaacaactgccacgtattacggtgccatcgaggacatatgggaacttgactatggtcctctcaaggttcctctgttccggtgccaatgggttaggttgactggtggaggcgtaatgattgatgacagtgggatgacaactgttgaccttaacaaggttggatactcggacgaaccttttgtccttgccaatgatgtaacgcaagtctttttcgtgaaggacatgtctagcaaaggaaagaagggcagagggcctgatgagcctaagcgtcaagtggttctcccaggcaaaagaaaaatcgtcggagttgaggacaagactgacgaggattacgatcagttggatgggcaaccccctttcacggtgacgattgaccctagcatcctcctatcaaatgaagacaccccttactcacgcagcgatcacaaggagggaacaataatggctgaccgcgatgaggaacagatattgtacgatacaatcgcggagggaagcagccagtactggaatgaagaagaggggaacgaggatccaaaccagtacttgaacgaggaagggaacgtggagagggatgcggaggggaaccagcaggggcacgtggaaagggatgtggaggggaaccaggaggaggaggctagtggtagtcaaccctccgttggacagaagagggcacgcgggcaacgaggtgcagcgaagaagcttgagggtcggcacatcataacggaagtggaagaagatggacgtcctagtgccccggccgaagccgccaagaactatgtacgtcacagcggttgggttgtgcgggataacgtgcctgtcagtacggtgtactggcgaagaacaagggcacgcggagatcatgagagctttgtccaagattcggagaaagagatgctgtggaccacaatgctcgagacattcacccttcctgcgggtacagaggacaaagtgaaaaggtggactctgaagaaaatggcagaacagtttcagagcttcaagggagatctgtaccagaagtatatactgaaggggcagacaccgaactttgacacattcccaaagctaagggatcactgggacgagttcgttgcatataagacaggtgaacaagggaaggcgatgatggaaagaaacaaagaaaatgccgccaagaagaagtaccatcaccacttggggtcaggaggctatagcgtcgcgatgccgaagtgggagcagatggaggctagcttgattgagaggggtatcgaaccggcaacagccaattggccggaacgatcgaagttctggtactatgctcacggtggaacgctcaacccagctgatggctcactggtcttcggctatcagatacaagaggctgtgcgacgactaacagatgcagtggaagcctcctctcagggcacgttccgaccagacagagatagggacgagctgacactcgccctgcagactccagagcatccaggacgaactcgagggaaaggggtgattccttggaagattggtttcaaggaggacatccacacgtacaggagtcggatcaggagcaagagagataccgaggcgaagattgcagacctagagttccgggtatcgagctacgaactcaacatgcaagaggaggtggcaaggaaggttgatgaacgcatggccgcacatcggtcccatgatccccagccgaccattcctcctgcaatggtgagcccgtcaggaaaccgtagcagctgcgcctcaacggggcaggtaggatcacagagcatggacgccatgcaaacacaggacgaatcgacctgtcccgttgatgacatcactcagcggacaccatgtgagctgcatattcctttcaagaacttatcaataaaggtggcgtcgggcatggccatcccaacggacccttcaggtacttaccactgcaggccgattccagcaggatactccaaggtcgaagttgagttggtcgaaggcgcgtacgaggacctcgagctggattaccctggaggagacggtgagacgcatctacgagacacatgccatgccattattctatggcgcaggcggtacatcatcctccctgggcgacaagcggcgtctcgtgcaccatctcctccggctccgccatctcctcctcaggatcctgcaccgtctcctcctcatgctccgccagcaccgtctccacctcaggctccagcatcgactcctcaggatcctgcaccgactcctcctcgtgctcctacacctactcccccgcaagctcctgttccggcaccttcaaagtcaagggcccccccagctccaccgcttgcccacacaagggcaacaaagaaggcgaaagttgacgccgccaagaacaaggacccggggtacgattgcacgcaagaggagcttgacgcttacgttgcatcagaagtcaagagacaattcaagcctcgaagtccagaaaagaagattcctatagaccccagtgtcaggaacttcttcaggggtatgtctgcatctgtcaaggaggccatcaagctatcggactatgagcaaacgctgaagaaagcatcttctggaaagtccaaaccagtccctcagcttggagagcaaccaaaccaggagatcgagccgttggtgaccggtaaagaaatgacgatagaacaatttattactgacaccggtctaactacggatcaattgctaggagtcgcaccaatcgaaaaggcggaagtgaaatacatgtacgaactcggtaaaccgcttgtcaagcctgagctgctgcagtccctacccacacaaatgtacaagttccatcagctgtacatggagatgagcgccaccggtagagagatgatcggagcgaggatcagggacacggacttcttgcaaggagatgacattctctggatcaatttcaggggaatctacgaactataccagctggacgccctcgacgtctctattatgagttgctggattttaatggagattcaaagggcccgacggcggagggttttcgatactggattcatcgaccctcggaaagtaaacgtcgcaatgctcgaccaatatccacaagaaacagaggacaatctcgtccatctcctgaaggcgcagcattacaagacgttcatactgttgccatacaacacagaattccactgggtgcttttactcatcgacctggaggcctgcaccgtcaacgtatatgactcaatggataaaaaagagtctacgtttgacaaggttttcgaacttatagacagagcttggtatcggttccgtcatttggtccgcggcaaatggagagaaagacttaggcggaagttcaaatttccttgcgcaaagcaaaagcagggaactaacttgtgcggctattacgtgtgcgagtattgccactgccttgcagaccaaatcatcaccacaagagagctcgattttattcgcatgagggataacctgaccacacacaaggaatttatcgcggcggttcaagaacaactcatgggattcatcaacgaagaaatccttgatcccaagggtgaattctactacgacggaaacacaattcaccggtccttagcttctgagctagcagcgagtactactacgtcgaaatcgtag

SEQ ID NO: 12387 - DNA, 786 bp, Oryza sativa
  Clone ID: TFbOSC26269j.C1.o1.fg
atggggaggtccccatgctgcgagaaggcgcacacgaacaagggagcctggacgaaggaggaggaccagcggctcatcgcctacatcaaggccaacggcgagggatgctggaggtcgctccccaaggccgcagggttgctgcggtgcgggaaaagctgccggctgcgatggatcaactacctgagaccggacctcaagcgaggtaatttcaccgaggaggaggacgagttcatcatcaagctccatgagcttctaggcaacaagtggtcactgatcgccgggaggctgccggggaggacggacaacgagatcaagaactactggaacacgcacatcaagcgcaagctcctcgcccgcggcgtcgacccgcagacgcaccgcccgctcaatgccgccgccgaccaccaccagcagcagcagctccaggcgccacggcggttcgccgccgcgccagccggccaccaccaccaccaccctgaccatttcgccgtcctctccaactcgccggaggcctgcagccacagcagcgacgacgagcccagctccgccacgccgccgccgccgccgcgtcacctcggcatcgacctcaacctttccatcagcctagctccttaccagccgcaggatcagaccagcgagccgatgaagcaggaggaggacgacgaagcgtcagcgacggcgaacggcgccggcaatgcagcgatgacgacgacggcgacgacggcggcggtgtgcctgtgcttgaaccgcctcgggctccacggcggcgagcctcggccagagtga

SEQ ID NO: 12388 - DNA, 7221 bp, Oryza sativa
  Clone ID: TFbOSC900391j.C1.o27.fg
atggggaggtccccatgctgcgagaaggcgcacacgaacaagggagcctggacgaaggaggaggaccagcggctcatcgcctacatcaaggccaacggcgagggatgctggaggtcgctccccaaggccgcagggttgctgcggtgcgggaaaagctgccggctgcgatggatcaactacctgagaccggacctcaagcgaggtaatttcaccgaggaggaggacgagttcatcatcaagctccatgagcttctaggcaacaagtggtcactgatcgccgggaggctgccggggaggacggacaacgagatcaagaactactggaacacgcacatcaagcgcaagctcctcgcccgcggcgtcgacccgcagacgcaccgcccgctcaatgccgccgccgaccaccaccagcagcagcagctccaggcgccacggcggttcgccgccgcgccagccggccaccaccaccaccaccctgaccatttcgccgtcctctccaactcgccggaggcctgcagccacagcagcgacgacgagcccagctccgccacgccgccgccgccgccgcgtcacctcggcatcgacctcaacctttccatcagcctagctccttaccagccgcaggatcagaccagcgagccgatgaagcaggaggaggacgacgaagcgtcagcgacggcgaacggcgccggcaatgcagcgatgacgacgacggcgacgacggcggcggtgtgcctgtgcttgaaccgcctcgggctccacggcggcgaggtggagatggatcggcaatggatgtacgctgaccggcggtccaaagagtttattgacggcgtgcactattttttgagagtggccgaagctaacaggcaaaggggttttatttgttgtccatgcaataagtgtaagaatcagaaggagtattctgcatccaggactattcatttccacttgtttgagtcggggttcatgccaagctataattgttggacatcccacggagagcaaggtgttgaaatggaagaagatgaagtggaagacgacaatattccggactttgctcagtatgttggatttgaaggaaatcaaacgggcgaggaggaaatagctgctgatggtaacgacgttgcggatgatcttggtcagatgttgcaggacgccagggaagactgcgaaagtgaaaaggaggcccataaattggacaagatgttggaggaccacagaaattcgttgtacccaggttgcgagcaggggcacaaaaagttggataccactctggagttgttgcaatggaaggcaaaaaatggggttagtgacaaggcatttggcgatttattgaaactcgtcaagaacattcttccggggggaaacaaattgcccgagacaacgtacgaggctaagaagatagtctgcccgttaggactggaagttcataagattcacgcatgtccgaacgattgtatcctatatcgcggtgaggagtatgagaacctagaagcatgccctgtttgcaaagcactacgatacaagattagacgggacgatccaggagaagttaacgggcagctaacaaagaagagaattcctgctaaggtgatgtggtatttccctataataccacggctaaggcgtttgttcaggaacaaggggaatgctagaatgttgcgatggcacgctgaagagcgtcaacaggacgggatgctgagacaccccgccgatggttcgcagtggcgaaacatcgacagaaaatttaaagaatttggaaaggacgcacgaaacatacggtttggtttgagtacggatggcatgaatccttttggagagatgagcagtggccatagcacttggcccgttacgatgtgtatctacaacctccccccctggctatgcatgaagaggaagtatataatgatgccgattattattcaaggccccaagcaacctggtaacgacatcgacgtgtacctaagaccactggtcgaagatcttaaacagttgtggaagaaggaaggtgtccccgtgtgggacgaggacaaacaggaggagtttaacctacgagcgctgctgttcgtaaccatcaacaattggcctgcacttagcaacctatccggacagtccaacaaggggtacaaggcttgcactcactgtatggatgaaacagaaagtacgtatcttaagcactgtaggaaggttgtatacatgggtcatcgtcgattccttgcagcaaaccacccggtacggaagaaaggcaagcacttcgaacataaggccgaccaccgtacgaagcctaaacatcgcagcgggaaaacagtgtttgctatggttaaagatcttaaagtagtgttcggaaaggggcctggaagccagcatatagagagcgaagatggtcacgcggcgatgtggaaaaagaactctatattttgggagttaccatattgggaattcttggacgtacgccatgcaatcgacgtgatgcacctcactaagaacctttgcgtaaaccttcttggcttcctaggtgtatacggaaagtcgaaagatacactggaagcacgtaatgatctgaagcatatggaacaacgcggcgaccttcacccggaaccaaaggagaaaggaagccattacttgagtccagccagctacactcttagcaaggcagagaaggaaagtatgtttgaatgcttggagagcataaaggtaccgtctggatactccacgaatatcaagcgaataataagcacgaaggagaagaagttcacaaacctaaagtctcatgactgtcacgtgttgatgacacaactgctaccagttgtaataaggggtatccttccagacaatgtccgggcaacaataacaaagctatgtgcattcatgaacgcaatttcgcagaaggtcatcgatccggatagattagaagcccttcagaatgaagtggtgcaatgtctcgtcagttttgagttgatatttccaccttcatttttcaatataatgacgcatctgctttgtcaccttgtgaaagagatccgtattctcgggcctatgtacctacacaacatgtttcctttcgagaggtacatgggcgttctgaagaagtatgttcgtaaccgtgctcgtccagaggcaagcatcgccaagggttatggaacagaggaggtcatcgaattttgcgtagaatttatcgaagaccttcgcccaatcggggtacctgaatcacgccatgaagggagactacggggaaagggaactctcggaaggaaagcaataatgacggtagacaacaatttattccgtaaagcccatttcactgttctgcaacactcttcattggtagctccttacatcgaggagcacttggctctagttcgcgccaggaacatcggtaagtccgatgcatggattacacggcatcacattgatactttccccgcgtggctacgacaacatctcatgggtaacgagtcgatcaaccaacaacttgccttcctggcgaggggaccgtctgggtctatcgcgacattccagggatatgagatcaatgggtacacattctacacgagagcccaagacatgaagagcacgaaccaaaacagcgctgttcgtgtcgatgccatgggacacgatggaacaactgccacgtattacggtgccatcgaggacatatgggaacttgactatggtcctctcaaggttcctctgttccggtgccaatgggttaggttgactggtggaggcgtaatgattgatgacagtgggatgacaactgttgaccttaacaaggttggatactcggacgaaccttttgtccttgccaatgatgtaacgcaagtctttttcgtgaaggacatgtctagcaaaggaaagaagggcagagggcctgatgagcctaagcgtcaagtggttctcccaggcaaaagaaaaatcgtcggagttgaggacaagactgacgaggattacgatcagttggatgggcaaccccctttcacggtgacgattgaccctagcatcctcctatcaaatgaagacaccccttactcacgcagcgatcacaaggagggaacaataatggctgaccgcgatgaggaacagatattgtacgatacaatcgcggagggaagcagccagtactggaatgaagaagaggggaacgaggatccaaaccagtacttgaacgaggaagggaacgtggagagggatgcggaggggaaccagcaggggcacgtggaaagggatgtggaggggaaccaggaggaggaggctagtggtagtcaaccctccgttggacagaagagggcacgcgggcaacgaggtgcagcgaagaagcttgagggtcggcacatcataacggaagtggaagaagatggacgtcctagtgccccggccgaagccgccaagaactatgtacgtcacagcggttgggttgtgcgggataacgtgcctgtcagtacggtgtactggcgaagaacaagggcacgcggagatcatgagagctttgtccaagattcggagaaagagatgctgtggaccacaatgctcgagacattcacccttcctgcgggtacagaggacaaagtgaaaaggtggactctgaagaaaatggcagaacagtttcagagcttcaagggagatctgtaccagaagtatatactgaaggggcagacaccgaactttgacacattcccaaagctaagggatcactgggacgagttcgttgcatataagacaggtgaacaagggaaggcgatgatggaaagaaacaaagaaaatgccgccaagaagaagtaccatcaccacttggggtcaggaggctatagcgtcgcgatgccgaagtgggagcagatggaggctagcttgattgagaggggtatcgaaccggcaacagccaattggccggaacgatcgaagttctggtactatgctcacggtggaacgctcaacccagctgatggctcactggtcttcggctatcagatacaagaggctgtgcgacgactaacagatgcagtggaagcctcctctcagggcacgttccgaccagacagagatagggacgagctgacactcgccctgcagactccagagcatccaggacgaactcgagggaaaggggtgattccttggaagattggtttcaaggaggacatccacacgtacaggagtcggatcaggagcaagagagataccgaggcgaagattgcagacctagagttccgggtatcgagctacgaactcaacatgcaagaggaggtggcaaggaaggttgatgaacgcatggccgcacatcggtcccatgatccccagccgaccattcctcctgcaatggtgagcccgtcaggaaaccgtagcagctgcgcctcaacggggcaggtaggatcacagagcatggacgccatgcaaacacaggacgaatcgacctgtcccgttgatgacatcactcagcggacaccatgtgagctgcatattcctttcaagaacttatcaataaaggtggcgtcgggcatggccatcccaacggacccttcaggtacttaccactgcaggccgattccagcaggatactccaaggtcgaagttgagttggtcgaaggcgcgtacgaggacctcgagctggattaccctggaggagacggtgagacgcatctacgagacacatgccatgccattattctatggcgcaggcggtacatcatcctccctgggcgacaagcggcgtctcgtgcaccatctcctccggctccgccatctcctcctcaggatcctgcaccgtctcctcctcatgctccgccagcaccgtctccacctcaggctccagcatcgactcctcaggatcctgcaccgactcctcctcgtgctcctacacctactcccccgcaagctcctgttccggcaccttcaaagtcaagggcccccccagctccaccgcttgcccacacaagggcaacaaagaaggcgaaagttgacgccgccaagaacaaggacccggggtacgattgcacgcaagaggagcttgacgcttacgttgcatcagaagtcaagagacaattcaagcctcgaagtccagaaaagaagattcctatagaccccagtgtcaggaacttcttcaggggtatgtctgcatctgtcaaggaggccatcaagctatcggactatgagcaaacgctgaagaaagcatcttctggaaagtccaaaccagtccctcagcttggagagcaaccaaaccaggagatcgagccgttggtgaccggtaaagaaatgacgatagaacaatttattactgacaccggtctaactacggatcaattgctaggagtcgcaccaatcgaaaaggcggaagtgaaatacatgtacgaactcggtaaaccgcttgtcaagcctgagctgctgcagtccctacccacacaaatgtacaagttccatcagctgtacatggagatgagcgccaccggtagagagatgatcggagcgaggatcagggacacggacttcttgcaaggagatgacattctctggatcaatttcaggggaatctacgaactataccagctggacgccctcgacgtctctattatgagttgctggattttaatggagattcaaagggcccgacggcggagggttttcgatactggattcatcgaccctcggaaagtaaacgtcgcaatgctcgaccaatatccacaagaaacagaggacaatctcgtccatctcctgaaggcgcagcattacaagacgttcatactgttgccatacaacacagaattccactgggtgcttttactcatcgacctggaggcctgcaccgtcaacgtatatgactcaatggataaaaaagagtctacgtttgacaaggttttcgaacttatagacagagcttggtatcggttccgtcatttggtccgcggcaaatggagagaaagacttaggcggaagttcaaatttccttgcgcaaagcaaaagcagggaactaacttgtgcggctattacgtgtgcgagtattgccactgccttgcagaccaaatcatcaccacaagagagctcgattttattcgcatgagggataacctgaccacacacaaggaatttatcgcggcggttcaagaacaactcatgggattcatcaacgaagaaatccttgatcccaagggtgaattctactacgacggaaacacaattcaccggtccttagcttctgagctagcagcgagtactactacgtcgaaatcgtag

SEQ ID NO: 12389 - DNA, 687 bp, Oryza sativa
  Clone ID: TFbOSC414037j.C1.o7.fg
atggccaccaggatgtgcggccgcgccggcgagccggcggtgcgcaagggcccgtggacgctggaggaggacctcatcctcgtcagctacatctcgcaaaacggcgaaggatcctgggacaacctcgcgcgctctgccgggctgaaccggaacgggaagagctgcaggctgcggtggctcaactacctgaggcccggtgtgcggcggggcagcatcacgccggaggaggacatggtcatccgggagctccactcccggtgggggaacaggtggtccaagatcgccaagcacctccccggccggaccgacaacgagatcaagaactactggaggaccaagatacacaggaagccgcgcggcaggagccagctgctgcaggagccgtgcgaggacgccatgggcatgggcatgtccaccaccaccagcgaggcggcgtcgacgtcggcgtcgagcggccagagccaggccagccccggcgtctgggatgagtacatgcaggcgagcagcttccctcacccggagcttgtctccttcgccgccgaccaccacctcgaaatggccggcgtgggcgaggtcgccgccgccgccgccgcgcagttcgtcccgactgagttcggtttcaatgacggcttctggaacttcgtggacaacttctgggagacgatgccggtttcagacgtggtgtga

SEQ ID NO: 12390 - DNA, 906 bp, Oryza sativa
  Clone ID: TFbOSC400231j.C1.o4.fg
atggcgaggaagtgctcctactgtggcaactacggccacaactcaagaacctgcagcagcagcgccagcgctggacacagggataccaccatgctctgcgacggcggcgacggaggtggcggcagtgggctgaggctgttcggagtgcaggtccatgtcgctgccggcggcggcggtggaggtggaggtggaggtttgccgatgaagaagagctacagcatggactgcctgcagctggcggcggcgggggcggctccgggctcgctcgtgtcgccgtcgtcgtcgtcctcgtcgtcgatgctcctgtcgatcgacgaggggggcttggagagggcgtccaatgggtacctgtctgatggcccccatggcagaattgtccaggagaggaagaaaggagttccgtggagcgaggaggagcaccggctgttcctcgtcgggctcgagaagctgggcaagggcgactggcgaggcatctcccggagctacgtcacgacgaggaccccgacccaggtcgccagccacgcccagaagttcttcctcaggcagagcagcatcggcaagaagaagcgccgctccagcctcttcgacatggtgccgatttgcgagaacggtgcgcgcgtctcggagcagctgagcggcgaaggcgcggcggcggcggcggcggcgtcgacctcactgtcgctgatgaacacgcacgagacctcctcggacagagtggcggcaattgatctgaattccaccgaggaagatgacacggtgggcgcgtcagggaggccgtttttcccggtggttctgatggagcagcagcagcaggcttcccatggacatggtcaccaccaccactgcacgccgctcgacctggagctcggcatgtccgtctcgtcgacgccgtccatcggcacatga

SEQ ID NO: 12391 - DNA, 5001 bp, Oryza sativa
  Clone ID: TFbOSC900286j.C1.o9.fg
atgtcgtcgtctgctgcccgcccctatcagggcgcctctgcctccgcccacgccgccgcagacgcctcgccgacgtggggggctctcggcgccgccgcctgcacctctgactgcctgcctgactcgacgcctcgcatctcctccgccgcctgttcgacgggtggcggtgaagggaaggcttggacgagtacgtctctgagcgacctgcgacgaccgacgagcgccgccgccgccgccaccgactctgccggggacggtagccccgggataggaggagggaggaggcgctgccgagttggcttcttcgccgcgcacggctattaccgacagggcggcggctcctacgaccgctcctaccccgatgaatcgctcggctacacgccgtcgcgctcagaccggtactggctggacgacgacggtggcggcggcggctataagggtttcagccggtacggtggtggtggtggtggtggcagccggagggacggccgtgacatgcggggttcctaccggaggtcgccctttaggggatacgggagcgacttctccagaaaccaccaagaacacccgcctccgccactgaggaggtcgcccctgagatcagttgctgtaccgatgtcttatgaccctcctggtgatagggctgataggggggatagagaccatcatcaccgtgtgactccttggcggccgctgcgccggagggagagcagatctgatgctgcagacgctgctggggctggacctgtgcctgttggacaggccgctgcagcagcggcctcagagaaggacgtttcagctcggtcctcagccgtcgcggctcctcaggtctctgaggaggaggcaccaaggaagaagcctcggcttggatgggggcaaggtttggccaagtatgagaagcagaaggtgcaaggacctgcagagtctgctgaagctgttgccgaaggcagcccaactgccaccgaacaaaagggaatcacccatacaccagcacctgcgccttgtgtgtccccagtggcggcaccatcacccacgccttgtgcgtccccagtggcggcaccatcacccgcgccttgtgtgtccccagtggcggcaccatcacctgcaccgccatgtaaatcaccagtccctgaagataaatcctgtgaactgacagcaaatacagtcactgaatccaataaaaatatcccaggacctgacgttcaggcttgcaataacgaagtccccactaagttagatcagcttgagggtgatcccattgattcgcttgcaaaggtcctttctgaactggtgcaacatgaagattcctgttctggggattcgaaaagactgtccaatgtcagtaagttattgttactgaaggaaagcattagcaaagagctcgaaaagacagaacttgagattgactccttggaaggtgaacttaaatctgttaatgtggaagccagaaatagaacactcaaagatccacctacagctgtaacttatgcacaaaatccttcaccttcacctgtgaaagaacaaggagagctgaccccttctcccaagatttctatggagcaggatgctgatgtaaaaggctcagagctcatggaaatagagacagctcaagctcataatgcaaaagcagtttcttcagaagagagtgttgcttgtcctggagttgctctgggtcaggtccctgccgctgctgatgttatcccatctgatccatgtgggaaaactggttctggaattgatgtcgatattgagcagcgcgaagagaatccatgccaagaaacttttaatgccatgaaagcagatggaagcagtgacttggccacaaggccttgctcttatcgtgaagttaaatataacttaatggatcaaattattgctgcgaacaggagtgaagccaaaaaaaattctcaattactatttaagcctgtgccagctgatcggtccaatcttgatttattggcatcaagctatctttctagccaaatgaagaatgatgtaattatcaagaagaagcatgccatacttaaaaatcgacaaagattcaaagagcagattcttaccttcaagttcagggtgctgcgtcacctctggaaggaggatgtgcgacttctttctgtaagaaagcagcgctctaagtctcataagcgcacagaccagagcaaccgatcatcacagagcggatctcagaggcaacggtcctctaatcgctccagattggctgtaccagctggtaatttaagcacatttcctatcacagaaatgtcaggtgtagcaaggaagctgttttcagaatttcagctcaagcgttgcagaaattacttgaaaatgcctgcactgattgttgacgaaaaagagaaggcaggtgctaagtttgtgagcaagaacggtttagttgaggatcctgtttcagttgagaaggagcgagctttgataaatccatggattcaggaggaaaaggaaatttttatggagaaacttgcaacatttggtaaggatttctccaaaatatccagtttccttcagcacaagacaactgctgattgtattgagttctactacaagcaccataaatctgatagtttccgagaagttaagaaacttcttgatcttcggcagcaacagcaacctgccaacaattacctaggagcagtatctggaaagaaatggaatcctgaggcaaatgcggcatcacttgatatgcttggggtggccacagaggtggcagcccaaggccttgaatatgtgaatgaagtgaagaaaaattctgcgaaatctatcctgaggactgtttgtggtgttgataattctaccaaaggatccgagaaggattgtgttggggatgtttctttgcacgagagagaatctgtagctgctgatgtcttggcaggcatatgtggaactctctccccagaaggcatgggctcatgcattaccagttctgctgatcctggccagaagatagggatcatctcaagaatggagcatcttttaactcctgaagcagataaaaactttgatgatgacggcactctctcagatcaggagtgtgaagttgacatagttgattggaatgatgatgagaagtcaagttttattgaggctatgaatagatatgggaaggatttcgctcgaatttcgtcatacgtgaagagcaagtcatttgaacaatgcaaggtttttttcagcaaggctcggaaatcacttggtttggatctgatccatcaaggtgctgctgatgctggtttccctacaggtgatgccaatggaggaaggagtggtacagatggagcctgtattgctgagatggattcagctatctgtagtgcacagtcatgtcctaaagtggagatagatgcatgtcctgtttctgatggagaaattcaaggacataatcctctttctgatattgcctctaggcagccagaagctgacaaatcaaacatgcctgatgttgtggacataaatgtcgaggaaggtgaaagcaaagcagaaaaagactgcagcattcttgttgatcataaacagttacgtgaagacattaatcaaacatcatgtgctcgtatcgacatcaactgtcctgagagcacagataagctgcaagacatagaggatgtaacaccagtgaacatgcatggagatgatctcatggccacttcagttgaacaggttgcggcagcgcatgtggaaagtagatccagtttacattctgaagggattggcattgatgtttccaggatcgaaggatgttcacatgagagtacaattggtaaaggtggaaaatcaacaccgtctgtttgcttgcctgcagaaaatggggttagtaaggaaaatatcatccacttctcgaacatggatggtgcttcctccattagtcctgcatttacttcaaattatcagcaaagtaagctggcagatccaatccaatcaaaaccgaagccccttaccccaaaggatttaatgcctgtccaatttagttcgtcgctgcctgatcctacctcaatctgttttgagggtatagctgccataactacacccaattttgaggatcatggcaacagagccagcattgcttcaggggcaaaagatgtgaacatgttcccaacatttaaagaccagtccagtaatcgtcatgatgcactgttttctaatgtcgatgggtacatgcaacagagacgaaataatcactttggaactgaagtatgtggcttatctgaaagcacaggcatttcccagtcggaccagttcacagtatcgaaattccagaatggcaggcccagcagcttgggcctttcgaatggaaatcttggggttctatcgactgggagaagagaggaagcacgtgaaggcttgtttaggccttgttctgtcaagacaagtgctgggaatgaggagcagcaaaagcggcctggtgatgtcaagttgtttgggcaaattcttagccatcaatcatccttgcaaagctctggttcatcagttcatggaagcaaaagcaagcccccctcaccaaaggttgataagccagcttcttctaggttgttgagtaatccaagggaacgcctggtttattcttccaggcctccaatcattgctaacttggggctagaggagagagcgatgaggagttttgaccatatggatgggcgaacaatacagcctgagcctatggttatggtggcaaagtgtcagagaccgtcagctggtgtaccagtttactcaaccaaaaatggcgcgctcagcgtgtttgcggaatttcagcaaccttcaatgccgccacatacatcagatcacaaactactagaaaactttgccgatcttcataagaggaatggaatcgaactcctttcggggttccagcagcctgggaggcttgggggtgctggggtcctggttagcggtgtatctgaccctgtggctgctctcaaggcacagtacggctctggttcgaagatgttgagcagcagcaacgacgtggatacatggaaagacataggaagcaggtag

SEQ ID NO: 12392 - DNA, 1074 bp, Oryza sativa
  Clone ID: TFbOSC421430j.C1.o7.fg
atggggcgttcaccatgctgtgagaagattggcctgaagaaaggtccatggacaccagaggaagaccagaagctgcttgcatacattgaggagcatggacatggcagctggcgagcattgccttcaaaagccggtttgcagaggtgcggcaagagttgcaggttgcgatggacaaactacctgagaccagacatcaagagaggaaaattcagcttacaagaagagcagaccatcatccaacttcatgctcttcttggaaacaggtggtctgccattgcaacacatctaccaaagcgcactgacaatgagatcaagaactattggaacacccacctgaaaaagaggttggccaagatgggaattgatcctgtcacccacaaagccatcaacggcactctgaacaacacggcgggagacaaatcagccaaagtcacagccagtctcagccacatggctcagtgggagagtgcccgcctcgaggccgaggcacggcttgctcgagaatccaagatgcgcatagcagcttctacaccaagcaaactccatgcacagtcaaccaacccacctgcttcaacaccttctccatgcttcgatgtgttgaatgcatggcagagtgcaaagatagacctggagtcacccacctccacactgacgttcgcagggagtaatgctagcatgctgccattctcaacaacaaccgccctagaattatccgaaagcaactccaatgtgtggcagcaaagaagcgatgaactggagggtgaagaaagtgagtggaagtttgtcagtaagcaacaactgcagggaatgcatggtaaagagacagaagaacacttcattggctgtgaggagtcatggttcccagggacagccaatatcggagcaggcttcacaggcatgctgcttgatggatccaatatgcatgatacatcagaatgctgggatgagtccagcaatggccaagatgagcaaagaagccaggtgtcagaagatgcagagaataagaactattggaatggcatcttcagtatggtgaattcagagcagccacccctgcagccacctttgctctag

SEQ ID NO: 12393 - DNA, 933 bp, Oryza sativa
  Clone ID: TFbOSC400431j.C1.o29.fg
atggccaggaaatgctccagctgcgggaacaatggccacaactccaggacttgcaccggccaaaggagcctgcaggagagtggcggcggttatggcggcggtggcgccggtggcgtgaggttgttcggggtgcagttgcacgtcggcggtgcgcctctgaagaagtgcttcagcatggagtgcctatcgtcgccgtcgccgtcgccgtcgccggcgtactacgccgcggtcgccgccgccgcctccaactcgtcgccgaccgtgtcgtcgtcgtcgtcgctggtgtcggtggaggaggccggcgagaagatggccaacgggtacctctccgatggcctcatggcgagagctcaggagaggaagaagggtgttccatggactgaagaggagcacaggaaattcctggtagggctcgagaagctcgggaaaggcgactggcgcggcatttcccggcacttcgtcacgacaagaacaccgacgcaggtggccagccatgcccagaagtatttcctcaggcagagcagcctcacgcagaagaagagaagatccagcctctttgacgtgattgaggatgcagaaaaggctccgagtgtgaatgaacgtctgaaactgagacacgagacagcctctgtgcctgctgaaatgggattccctgcactgtcactgggtatcagcagcatggcacagccagaagccatgctgctgcctcctccatccttaaccctgacgccaagctgttcatcaccagcagtgagcagcagcagcagcgaacaaccaagaacaatccatccttctctgatggtggcaaagcctcaggtgcaactgcaactccagccacctgatctggagctcaagatctcgactgtccgtcagaacgatcagcccagttcgtcgccgaggacgccttttttggggacaatcagggtcacttga

SEQ ID NO: 12394 - DNA, 1053 bp, Oryza sativa
  Clone ID: TFbOSC401426j.C1.o6.gm
atggggacggagacggacgtctgggacgatacccttgctctcgctgcaaccaaccacgatcccgaggaggagagacgtccatggctcgcggcggcggcggcggcggcggcggcgaagtgcaggtgctcccgccggcggcggctgcccgagcgggagtggacggcggaggaggacgagcggctgcggcggctcgccaaggagaacctcttccggcaatggtggaaggtcgccagggaaatgcctgggcgctccggtgactcgtgccgcgccaggtggcgccaccacctcgcccgcgacgtctaccaccgccccttcaccgcccgcgacgacgaggagctcgtgcgcctccaccgccacaccggcggcagctggaggaagatcagccgctcggtctacggccgcacctcggccatcatgagggaccgctggatccagctccgccgcagcggcttggtccccgacgccgccaagacggcggaaaacgccggttgcccgccgccggccgccgatgactcggagtacatggggagcgaggcagagttgaagtcgccgccgccgccgccgcagcagcagcaccctctcgccgacgttcttgcctcgagcttggattcttgcaccctagcatccgacgcgacggatccccgggacggcatcctcgcgctagatttcgcgttcatcggtgatgacctcctcctccatccccctcttgcggtggtcgagcagcggcggcgacgacgccctctccaagcggctgtggcggtgccctcccccaccgtgagcagcggcggtggaggtgccctcctgcggcttcccacgggcggatccggcggcgacgtcggcttcccgcgtcggtccagtcgaccaccggctccaccccgtcctcctctcctcattgaggcagcccccttccccggcagcggctacgacctcctcctagttgggcgcaggagtaggcggcggttggagcaggtgttgcggtggcggacacgacagcgacgagctggtggcggtggcgggcacgctagggctcctctctttgtgatgaatttttaa

SEQ ID NO: 12395 - DNA, 846 bp, Oryza sativa
  Clone ID: TFbOSC400282j.C1.o12.fg
atggaccactacgcgtcgagggggaactggttcatggcgcgcaagtggtcgccggaggagaacaagcagttcgagcgggcgctcgccgggctggacctgcggtgcccggactgggaccgggtggcgcgcgccatcccgggcaggtcggcgctcgaggtcatgaaccacttcagggacctcgagctcgacgtccagcagatcgagaatggcatggtgcccttcccggtctacggcgccgccgccgccggcggcgcgttcacactgcagtgggatggcgcccatggcgtcggggacttcaggaacgcgtaccggttcggcggcggcggcggcgggaagcggcacttcggccgtacgccggagcaggagaggaagaaaggcgtgccatggacggaggaggagcacaagttgttcctcttaggactgaagaaatatgggaaaggggattggaggaacatatcccgcaatttcgtgcagacgaggacgccgacgcaggttgccagccatgcgcagaagtatttcatcaggctcaactccggtggcaaggacaagaggagatccagcatccatgacattaccacggttaacctgacggatgaccggcctccctcgccatcacagtcctccttgatcagcaatcagtccaacacatcaactctgaccgcagcggttgcccccttctcatcgacggccgatgtcaagccacagaatgccgcgaatgcgtccttcaattcgccaagccggacacttgggatggcgggttacgggatgggattgcaagatcaaggattgcagtgtggtggtcctctacatgatcagttggccgcgagccgaagcatattgttttag

SEQ ID NO: 12396 - DNA, 837 bp, Oryza sativa
  Clone ID: TFbOSC411316j.C1.o6.fg
atgatgccagtatcatatactccctccgtttcacaatggttgcagcgatgcggcaagagctgcaggctgcggtggatcaactacctcaggccagacctgaagcgcgggagcttctcgcagcaggaggaggacctcatcgtcgcgctgcacgagatcctcgggaacaggtggtcgcagatcgcgtcgcacttgccggggaggacggacaacgagatcaagaacttctggaacagctgcctcaagaagaagctccggcaacgcggcctcgacccggccacgcacaagcccatcgccgccgccgccgcggcggcgacgtcctcggagtcggcggtcacccaggtggatgaggatcacaagccccacggcgccgccgccgccgccgccgccgccgacggcctcgccgcgaacgccaagcagtcggtgttcgacccgttcccggtgaccgacttcggcgccggcttcgacctcggcgcggcgaacatggcggcggcgctgtacggctcccaccccgacgacggcgccgggttcgtcgccgactacagcagcgtgctcgacgtgtcggagaacctgggctacggcgagagctccagcaacagcagcaactggacctgcgccgaggtgagcaatgtgctcgacagcgaggtgctcaactgggccgcctcggccggcgccgacgccgccgccaaggcagagcccttcgccgacatggagcagcagcacagtggctatggcggcgagtatcaggtggaagacgacgccacgctggagcacaagttctcgctaccatgccatgagcagagcttggctcaattcgacttcaacttggaatacttctga

SEQ ID NO: 12397 - DNA, 966 bp, Oryza sativa
  Clone ID: TFbOSC900018j.C1.o15.fg
atggggagagcgccgtgctgcgacaaggcgagcgtgaagaaggggccatggtcaccggaggaggacgcgaagctcaaatcctacatcgagcagaacggcaccggcggcaactggatcgccctgccccagaagatcggtttgaaaaggtgcggcaagagctgccgcctccggtggctgaactacctccggccgaacatcaagcacggcgggttctcggaggaggaagacaggatcatcctcagcctctacatcagcataggaagcaggtggtcgataatagcagcgcagctgccggggcggacggacaatgacatcaagaactattggaacacgaggctcaagaagaagctctttggcaagcagtcgcgcaaggatcagaggcagcagcagcacctggcgcgccaggcggcagcagctgccagcgacttgcagatcaaacaagaagcgagcaggggtgcaaacgaagccgatggcttggctgccggtgccaattacacttggcatcaccaccacgccatggccgtgcctgtgcacccgatgtcggcaccaatggtggtggaaggaggccgtgtgggagacgatgtcgatgagtcgatccggaagcttctgttcaagctcggagggaacccattcgcggcctcgccggcaccgccatgcatacctccaccaccaatgtacgaggaagccccaagcttcgtgccaccattggcgcacggcgtgccgctcaacgaaggcggcatgcagtgctccagcgtgctgccggcgctggagctggacgagaacttccacttcaaccatgtcaagctggacgggctcgagtgcctcttcgggatgggagatcaccaaaacatgagatggaatgaggtgagcccgttggtttgccctaataacgctgtggcgtccagctcccaagggatgcagcagtactgcctagttgaagaaccagctgacctcgggatgcagtag

SEQ ID NO: 12398 - DNA, 1308 bp, Oryza sativa
  Clone ID: TFbOSC400332j.C1.o18.gm
atggggcggccgccgtgttgcgagaaggagggggtgaagaaggggccatggacgccggaggaggacatggtgctggcgtcgtacgtgcaggagcacggcccgggcaactggcgcgccgtgccgcccaggacgggcctcctccgctgcagcaagagctgccgcctccgctggaccaactacctccgcccgggcatccgccgcggcggcttctcccaccacgaggagcgcctcatcctccacctccaggccctcctcggcaaccgctgggccgccatcgcctcctacctcccccaccgcaccgacaacgacgtcaagaacttctggaacacccacctcaagaagaagctcgccctcacctcctcctcctcctcgccgccgacgccgacgacgccgctcgtcgccagggggcagtgggagcgcaagctgcagaccgacatcgacctcgccaggcgcgccctccgcgacgccctctccgtcgacgacgccgcctccccggcgatgatcagcagcgggccgcccgcgccggcggcggcggcggcgtacgccctgagcgagcgcaacatctccgtgatgctgagcggctgggcggcgccgcctccggccaggaaaggattgtcagcctgcaacccggcggcggcgacgacgacgcccggtggcgccgccgcggagagcgcgtccacggccgggacgtcgttggagctcaccgccgactgctgctccggcggcggcgactccagcgcgtccaactgcctgccgtcgtccatgctcctcgcgtgcgacgacggcgacgcgacggcgacggcggccggggtggcgccgctgtcggcgatcgagtcgtggctgctgctcgacgacagcggagagccgcagctggcactggacgagcagctgctggacaagcaagttaaggagattgattgggccgacaccttccagccactggtgccaaaaccccacggcaccatatatgccaacatcgagcagggcttggccgcaacgcgcaggtacccatctattacacaagatcagaatagcacagaatcacgaatcgacaagattcttagaaagaaaaagaagaaaaaacacaaggctgtcggccgctgcgtcgacagccggcgcgccgcccgccgctgcgccgacagccggcgcgccgcccgccacgaggccccgcggtccgccgccgcgccgcagcgccgcccaccgccgcgaggccgccgcccgggcctttgcccgtcggcgtgccgccgcgaggccgccggccgccggccgcccgatgggatgatggagggggaaggagaggagttatag

SEQ ID NO: 12399 - DNA, 1200 bp, Oryza sativa
  Clone ID: TFbOSC402160j.C1.o5.gm
atggggcggccgccgtgttgcgagaaggagggggtgaagaaggggccatggacgccggaggaggacatggtgctggcgtcgtacgtgcaggagcacggcccgggcaactggcgcgccgtgccgcccaggacgggcctcctccgctgcagcaagagctgccgcctccgctggaccaactacctccgcccgggcatccgccgcggcggcttctcccaccacgaggagcgcctcatcctccacctccaggccctcctcggcaaccgctgggccgccatcgcctcctacctcccccaccgcaccgacaacgacgtcaagaacttctggaacacccacctcaagaagaagctcgccctcacctcctcctcctcctcgccgccgacgccgacgacgccgctcgtcgccagggggcagtgggagcgcaagctgcagaccgacatcgacctcgccaggcgcgccctccgcgacgccctctccgtcgacgacgccgcctccccggcgatgatcagcagcgggccgcccgcgccggcggcggcggcggcgtacgccctgagcgagcgcaacatctccgtgatgctgagcggctgggcggcgccgcctccggccaggaaaggattgtcagcctgcaacccggcggcggcgacgacgacgcccggtggcgccgccgcggagagcgcgtccacggccgggacgtcgttggagctcaccgccgactgctgctccggcggcggcgactccagcgcgtccaactgcctgccgtcgtccatgctcctcgcgtgcgacgacggcgacgcgacggcgacggcggccggggtggcgccgctgtcggcgatcgagtcgtggctgctgctcgacgacagcggagagccgcagctggcactggacgagcagctgctggacaagcaagttaaggagattgattgggccgacaccttccagccactggtgccaaaaccccacggcaccatatatgccaacatcgagcagggcttggccgcaacgcgcagccggcgcgccgcccgccgctgcgccgacagccggcgcgccgcccgccacgaggccccgcggtccgccgccgcgccgcagcgccgcccaccgccgcgaggccgccgcccgggcctttgcccgtcggcgtgccgccgcgaggccgccggccgccggccgcccgatgggatgatggagggggaaggagaggagttatag

SEQ ID NO: 12400 - DNA, 2907 bp, Oryza sativa
  Clone ID: TFbOSC26691j.C1.o3.fg
atggatttctactccgacgactccgacccggacatcgacgaggacctgcagagggacctggacgcgctgcgccaatcctgcatcctctccgggaacgaccccgacgcggcggtcgcgcaggtctccgcctgcctcgccgccccgccggcggcggcggcgggagcggaggtgaatggcttgtctgatgacgacgacgaggaggaggacgaggatttggccctcgtccgcagcatacgtgagaatctcctcctcaacaaggcctcgccgtcctcgcccctgccgcgcccgatctgcgcctggccgccctccgactcggaggacgacgaggacgacctcgagacgctccgcgcgatacagcgccggttctcgcactaccactccggtacctccagtgggtcagagatgaacacaaaaactgaggcatcaaaggaagggagtggcaatatttttggaaatgaacttgatgaagaatttgatgcggagaagcacaataaagaggcaactaccagaactgggtttcctaaagctgccttgttgttagtggatgctcttaagaagaacagagcatgccagaagttcattagaaggaagatgattaccattgaagcaaaaattgaagaaaataaggatctcagggatcgtgtaaaatgtcttttggattatcaattaagctgcagaaaagcatttggcaaaattttgtgccaaaaggaggatcctcgtgttagattgatctcctctcgaaagccatgtgcacaatcaacgaagaataaagataagaagacacctgcattatttcttggccctgcagataaccctcatgtttcaaagtacaaaatggtactgaagcaactccctatgtctcttcagaagcaaccgtggtcagatgttgagaaagagaaacttgctaaaggaataaagcagcaataccaagaggcattgattttgaactcgatcaataaaggaagttccaccggtgacttcagtgctgtagatatggcatatgcactgacgaatactgctggcaattttgaggttactcccgaaagtcttagatcggtcctgccattaataaactgggacaaaatagctgctatgtacctgcctggtcgatctggtgctgaatgtgaatcgaggtggctaaactttgatgatccattgattagtcataatgcctggactgctcgggaggaaaaaagacttatactaactgttcaacagcaaggaatgaataactggattaacattgcagttacattgggtactcacaggacacctttccagtgccttgttcgttatcagcgaagtcttaatcactgcatattgaataaggactgggctgaagaagaagatcttcaacttcaagctgctgtcaacacctttggaactaattggcaacttgtatcagctagtatggatggtcgcactggcaatcagtgctctaacaggtggagaaaaaccttaaaccctgaaaggtcaagagtggggagatggtctcttgatgaggataaacgcctcatggtagctgtgaagttgtttgggtctggcagctggaataagattgctcagttcattcctggtcgcacacagagtcagtgcaatgaaaggtggcgcaatgttcttgatcctgatatagatcttggggaatggcgacctgaagaagactccatactattggcatcagtcgatgagtttgggccttgctggtccaagattgctggggcgaagattcctcaccgtactgacaatatgtgcttgagaagatggagaaagttgtgtcaagataaattgccttcagttaaggcagctcaacaaataaagaaatccattcttcaatgcaactttgttgacagagaaacagagcgacctgccattggacccagtgacttaatgccacttgttcgctccaaagttgatggaagtgatgagaacactgtgagtgctaaagtcaggaagccccgaaaacgttctagaataccatgtgaggacaatgtactccctggtgacacatcaaattcttcaccttctatgaatctacctctttctgaatctattgatgctgaggctgctgtaaacacaaccacagcaaattcaaagaagaaaccatctagaagtagatcgaaaaagcaaactgatgaaaatcttgctgtctgtgatgtcaacaactcttctaattgttctagtggagccaggaagagaaagagatctattactgacaaaaatcaagttgtgcaaaagaaaatgaaggggtctatctctggtgataatgaggctgtcgtagagacagtgggcactatcagtgctgataatgaggtagccacgaaacggaagactggctctacatctgttggtgaagaaggcacaaccaagaagacaacgaggggctctctctctggtaaaggagaagtcaacaagagaatgaggggctctatctctggtgttcagaagggagcaaccaaacaaagaatgaggggttcagtctctactgataatcatggtgctgtaatgaaaagcaagagagcaccatcaaggaaatcagccgaagagaactcaaaagctgatagcatggctaatgcagcctttgggtcggaccttccaactgtggcttctgaagatagagatgctaataatggaaatgtgaaaaatgggagactcaagtcaatgccgagacccaagcagataaacatgactgagggatctgcagacaaattttccacatccacgcggcttgctgattgcatgtcattcggccgaatcaatggatccagcagggttgcaagacacttatgtgtgagtgtcaagccgttaagcaacatgatccaatcaaatggaccttctgatgtgtcagctaaggatcccacttctgctgaaacagatcccacttctgttgagaatagcaacaccgcttga

SEQ ID NO: 12401 - DNA, 2142 bp, Oryza sativa
  Clone ID: TFbOSC418457j.C1.o24.fg
aataaagataagaagacacctgcattatttcttggccctgcagataaccctcatgtttcaaagtacaaaatggtactgaagcaactccctatgtctcttcagaagcaaccgtggtcagatgttgagaaagagaaacttgctaaaggaataaagcagcaataccaagaggcattgattttgaactcgatcaataaaggaagttccaccggtgacttcagtgctgtagatatggcatatgcactgacgaatactgctggcaattttgaggttactcccgaaagtcttagatcggtcctgccattaataaactgggacaaaatagctgctatgtacctgcctggtcgatctggtgctgaatgtgaatcgaggtggctaaactttgatgatccattgattagtcataatgcctggactgctcgggaggaaaaaagacttatactaactgttcaacagcaaggaatgaataactggattaacattgcagttacattgggtactcacaggacacctttccagtgccttgttcgttatcagcgaagtcttaatcactgcatattgaataaggactgggctgaagaagaagatcttcaacttcaagctgctgtcaacacctttggaactaattggcaacttgtatcagctagtatggatggtcgcactggcaatcagtgctctaacaggtggagaaaaaccttaaaccctgaaaggtcaagagtggggagatggtctcttgatgaggataaacgcctcatggtagctgtgaagttgtttgggtctggcagctggaataagattgctcagttcattcctggtcgcacacagagtcagtgcaatgaaaggtggcgcaatgttcttgatcctgatatagatcttggggaatggcgacctgaagaagactccatactattggcatcagtcgatgagtttgggccttgctggtccaagattgctggggcgaagattcctcaccgtactgacaatatgtgcttgagaagatggagaaagttgtgtcaagataaattgccttcagttaaggcagctcaacaaataaagaaatccattcttcaatgcaactttgttgacagagaaacagagcgacctgccattggacccagtgacttaatgccacttgttcgctccaaagttgatggaagtgatgagaacactgtgagtgctaaagtcaggaagccccgaaaacgttctagaataccatgtgaggacaatgtactccctggtgacacatcaaattcttcaccttctatgaatctacctctttctgaatctattgatgctgaggctgctgtaaacacaaccacagcaaattcaaagaagaaaccatctagaagtagatcgaaaaagcaaactgatgaaaatcttgctgtctgtgatgtcaacaactcttctaattgttctagtggagccaggaagagaaagagatctattactgacaaaaatcaagttgtgcaaaagaaaatgaaggggtctatctctggtgataatgaggctgtcgtagagacagtgggcactatcagtgctgataatgaggtagccacgaaacggaagactggctctacatctgttggtgaagaaggcacaaccaagaagacaacgaggggctctctctctggtaaaggagaagtcaacaagagaatgaggggctctatctctggtgttcagaagggagcaaccaaacaaagaatgaggggttcagtctctactgataatcatggtgctgtaatgaaaagcaagagagcaccatcaaggaaatcagccgaagagaactcaaaagctgatagcatggctaatgcagcctttgggtcggaccttccaactgtggcttctgaagatagagatgctaataatggaaatgtgaaaaatgggagactcaagtcaatgccgagacccaagcagataaacatgactgagggatctgcagacaaattttccacatccacgcggcttgctgattgcatgtcattcggccgaatcaatggatccagcagggttgcaagacacttatgtgtgagtgtcaagccgttaagcaacatgatccaatcaaatggaccttctgatgtgtcagctaaggatcccacttctgctgaaacagatcccacttctgttgagaatagcaacaccgcttga

SEQ ID NO: 12402 - DNA, 324 bp, Oryza sativa
  Clone ID: TFbOSC401122j.C1.o84.fg
atggaaagtagcggtggaagccagctgggaaagaattccaaaacaagtgatggtcgtgaaacaaaagccacttcatccttgcttctcttaattacggctattcatttcgtagcattatgtccaaaaggggaaaatgaagatgccagaaaagaagttaatagcactgcgcaaaattttgttcatttcacagaagaagaggaagatattgttttcagaatgcacaggcttgtcgggaacaggtgggaacttatagctggaagaataccgggaaggacagcagaagaagtagagaagttctgggcaattaaacatcaagccacatga

SEQ ID NO: 12403 - DNA, 665 bp, Oryza sativa
  Clone ID: TFbOSC411863j.C1.o1.fg
atggggaggtcgccctgctgcgagaaggcgcacacgaacaagggcgcgtggaccaaggaggaggacacagcgccatcattcgcccacattcaacacagcacggcgagggctgctggaggtcgctcccccagggccgccgggttgctgcgttgcgggaagagctgccgcctccggtggatcaactacctccgccccgacctcaagcgcggcaacttcaccgacgaggaagacgagctcatcatcaagctccacgagctcctcggcaacaagtggtcgctgatcgccgggaggctgccggggaggacggacaacgagatcaagaactactggaacacccacatcaagcgcaagctcctcgcccgcggcctcgacccgctcacgcaccgcccgctcaatgccgccgccgccgtcgccggccaccaccacctcgccgccggcggctccagctgctcgcccgacgcaacaagcggccacagcagctgcagcgacggcgacgagtaccgcggcggcatcgacctcaacctgtccataagcccgccgtcgtcgtcgtcccagccgtcttccccgccgccgccgccgcacgaagcagaggcgagacgcgccggagcgacggcgagctacacctaccaccaccactactcggagacgagggagaagatatgcct

SEQ ID NO: 12404 - DNA, 1287 bp, Oryza sativa
  Clone ID: TFbOSC401892j.C1.o28.fg
atggggagacattcctgctgctacaagcagaagctgaggaaggggctctggtcacctgaggaggatgagaagctcatgaaccacataaccaagcatggccatggctgctggagcaccgttccaaaacttgcagggcttcagagatgtggcaaaagctgcaggctgagatggataaactacttgaggcctgacctaaagagaggtgcattctctcaggaggaagaggacctcatcgttgagctccatgctgttctgggaaacaggtggtctcaaattgcaacacggctgcctggaagaactgacaatgagatcaagaatctctggaattcatgcatcaagaagaagctgcggcagaaaggcattgacccaaacacccacaagccccttgccgaggttgatcgaagcaaagcaactcccaccatcagcaatgacaggacctctgaatccagcgatgttgacccatctagtggcgttgctcttcacaacttgagccatcttctgagcgagacggcgcaatcatcagagctgctgccagtgaaggtaactaaacctcgcacacaagctccgggcttggcacgtctgaaggtgccaccgaaggaactatttctagaccagcttacttctggccatgagaacctccctagctgccgttcatctggcccaattcccaatttcccgttccagcagctgttgtgctacaataatgattttaacagcatggacgttggaaacaggaattcactctggtataaccagaatgagtccagtagcagcacaatttccactgtgatgcccccagtttcaccatcaactctctcgacatcaacaggccttaatccatcaccagacaatgcaaactctcgaggcactggcatccacaattcccaattctattgggacaccaacaatcctagcagcagtagcagtacagggagtagtggtaacaacgggttgggattcgagctgcaaagcacaagctcccttttggagaccaacatattcccatggtcagatttagcaccagaaaaggatagccaagcacaactagaggaagaactcaagtggcctgacttgctccatggaacgttctcagagatgccagcgcccatgcagaaccttagccagtcactgtatgaagacgttgtcaaagcagagagccaattcaacatggaggggctctgtgcagcttggtctcaaaacctgctgccacagcaacatcttccagtagtatcagatatgtatgacaaggatttgcaaaggatgtccttgtcttttgagaatatctag

SEQ ID NO: 12405 - DNA, 2430 bp, Oryza sativa
  Clone ID: TFbOSC32697j.C1.o3.fg
atgccgcggaaggcctcgtcgacctcagattcgcgcctgaaatggcggaagtggaagcggaaccccaccgcgtccccgtcgccgtccaaccgctcgtcggccgccgccgccgcggcggaccactccgacgactccgactccgccgccgttaacgaggacgacgactccgcggtccccgaggacgccgacgacgaaaccctagccggggcggaggaccccgtgctcgacctccgcgaggcggaggtgctcccttcggcggagcccgtctcggcgttccccgtcgccacccgacgcgtcgtcaaccggccgcacccgtccgtcctcgccgtcatcgcggccgagcgatccgcgtgcgcgggtgagggttccgccgcggtggcggcggcgccggtgctggagaacatctcgtacgggcagcagcaggtgctctccggggtgctccctgaccacgcttcgctcgcgacggacactgacaagccgtctacctatgtgtgcacgccgccgaatcttatggaggggcatggcgtgaccaagcagttccagggtcgcctacatgtcgtgcccaagcactcaggtccgcctgctctttgcaaccaaaaacctgaatgtctgagctataatgcggcactaacttgtttgcgatttgtagattggttctccccagggatcgtgcacaggctggaaaggcaggtggtgccacagttcttttcagggaagtcgccgggcaacactccagagaagtacatgctattgaggaataaggttattgcaaaatatttagagaacccaagcaagaggcttgcttttgcagagtgccaggggcttgttgcgaacacagctgaattatatgatctcagtaggattgttaggttcttagacacttggggaatcatcaattaccttgcgtctgggtcggtgcaccggggtctaaggatggcaacctcccttctaagggaggagccaaccggggagttgcaactattgactgcgccactgaaatcaattgatggcctaattttgtttgatcgaccgaaatgtaacctccaagcagaggacatttcttcattggcatcaaattcggaggttgtggattttgatgctggacttgcagaattggatggaaagattagggagcgattgtcagagagttcttgcagttattgcttacagcctttgaccagcttgcactatcagtcactaaaggaggcagatatcgctctatgctctgattgcttccatgatgcgagatatattactgggcattcaagcttagattttcagaggattgatggggataacgatagatcagaaaatgatggggatagttggactgatcaagaaacgttattgctgttggagggcatagagaagtacaatgacaactggaataacattgcagagcatgttggaacaaagtcaaaagcacaatgtatttaccattttattcgtcttcctgttgaagatggtttgttagagaatattgaggtgccagatgcatctgtgccatttagagcagaaaccaatggatacccacatttagattgcaatggcagtacttcaggaaatctacctcaaaaaattccacctgataaccagcttccgttcattaattcttctaatccggtgatgtcactggttgggtttttggcttctgctatgggaccaagagttgcagcatcatgtgcaagtgctgctttatcagttttgacagtagatgatgattccagggtgaattcagaaggcatttgctctgattctaggggccaaggtccgcatccgaattttcgtgatcataatggtggtgtatcttcatccatctctccagaaaaggtgaagcatgctgccatgtgtggtttgtcggcagcagctacgaaggctaaactttttgcagatcaagaggaacgtgaaatccaaagactaactgctactgtaataaaccatcagttaaaaaggttggaactgaagctgaagcagtttgccgaagtcgagaccttgcttttgaaagaatgcgagcaagtggagagaataaggcagaggattgcatctgaccgtgtccgaatcgtgtccacccgcttggcctcgcctggaaatagcctacctgggggtagtactagcaccatgtcatccaatccaatgagtatgagccccagaccgatgggcgtgccaggctcgatgcctcaatccagtatgccagcaccatttgccaataacatgcaggggcatggtcacccccagatggcattcttacaacagcagcagcggcagcagatgctgtcatttggacctcgtctgccgctgtcggccatccaaacccagccatccccacagacgtcaaacatcatgttcaacccaggcatgcccaattctgtaacccctaatcatcatcaactgttgaggtcgtcttctggaaacaattcaagtgtaggatag

SEQ ID NO: 12406 - DNA, 1185 bp, Oryza sativa
  Clone ID: TFbOSC400903j.C1.o84.fg
atggagtggacggcggcggagatggacgaggcgaggtcgatcatcgctaggctgaccaacgcttacgactccggcaccctcgttgccggcgccggcaacggcgacacgaggcacgaccgcattgtgagggagctgcaggcgtggctcccatggaggaccatggatcagctaatcgggctgtacattgagctcatggcggaggagcccgcggcggcgcagccgcagtacttcgacgccggcgccgtcgtcgaccctacgttcgacttcttcaacgaccacaacaacttcctcggcatgccgccgccgccggttcaacaagctgatgaccataacatgaacaacgtcgtcgccgacgccggcatgaactactactatggcggcggcggcgccggcggtgccatggtgtttggtggtgcacccatgggggagacggtggagcaggcagctccgccggtgccggtggtgccggtggtgatgaaccgcgacgacgacgaggtgaacaaccagggcggcggccgtcaccgtgctgcaccaacaaatactactaggaggttttggaccactgaagagcacaggcagtttctgagggggctgcgtgtgtacggacgtggtgagtggaagagcatctccatgaacttcgtcagaagcaagacgccggtgcaggtgtccagccacgcccagaagtacttccgccgcgtggagagcgccgccgccgacaagcagcgctacagcatcaacgacgtcggcctcaacgacgacaccgccgccatggacggcaccaacagctacagcaacaataacttcggtggctggcagagtctcgccttcgccggcggccacctcgagcccgtcagcggcggcggcgccgccaggcaagtcatcgctccggcgagctcctccgccgctgccatgaacagcgccgctcagttctgggctcctatgctgttcaacccccagattcagcagcagttcatgcagatgcaggcgcagacgcagcaggcgtggaatgatcagcatatgatgatggctgctgctccaatggagggagcaactgatactaactttgagcctgcaggtgcagttaattattattattatcaacagcagcaggaggaggaggagggaggtgcttatggtgttcctgcggatcagtggatgatgaaccagaacaacaacatgtgctga

SEQ ID NO: 12407 - DNA, 1692 bp, Oryza sativa
  Clone ID: TFbOSC100909j.C1.o10.fg
atggcggcggcggcggctcgcgatgacgacctcggcaacgacgacctcgacgatgaccggtcaaatccacgccgccagtctggaggtcgcacggccggcccaatccggcaggggttgcatggtgacataggcctccaaatgacggcagccatggctggtgacgacgcaaatgacggcggccatggctggcggcggtggctgtcaacggcggcggtcgcggcggtgctcctcagcttaggggatggtggtgacgatgacaaggcaaccgaggggatacgggggagctcagcagggatgtatactgataaaagatcagtttcagaggacacacacctctatccatctactaaacctactataaagccagcccggccacaaccccagatgcacccgctcaccgctgctgccaaacacgccatcaccataccaccaccaccaccaccagccgcagcagctagctacacatcgtcgccgtcgtcaggcactagcgatccatcggttctagatctctcttctgctgagatagacgacgacggcgacggcgacgacgatcgagctgagcagcaagaaatcaagaattcgaaggagttagtgatggggagggcgccgtgctgcgacaaggcgagcgtgaagaaagggccgtggtcgccggaggaggacgccaagctcaaggcctacatcgaggagaacggcaccggcggcaactggatcgcgctgccgcagaagatcgggctgaagagatgtggcaagagttgcaggctcagatggctcaactacctgcggccaaacattaagcatggtgatttcacagaagaagaggagcacatcatttgtagcctctacattagcatcggtagcaggtggtcgatcatcgcggcgcagctgccggggagaacggacaacgacatcaagaactactggaacaccaagctgaagaagaagctcctcggcaagcgcgcgccgtcgcgccgcgcccgcgcaaaccaagaccactgcggtctagcaggcagcgccgccgccgccatgtgcggtggcgtcggcaccgcggcggcggcggcgccgccgcatcaagccctaagctcgtcggccctcgagcggatccagctccacatgcgcctccaaggcctctacaacagcgcgttcggctgcaccaccaccagcagcaacggcggcggcgtcggcgtcgcgccgccgcagtggccgaagctcgaggcgctgctgccgagcagaccgctcccggccgtgcagccgacggacgccgtcgtcgccaccgtgcaacacccccatcatttggtcgtcggcggccataccctcgccaccgccgccgccgccgccgccaccacgtcggaggcgttccaagccgccgagcacctcgaccctgcggcggcgaccggttcgaactacatgccgggagtcgccggtgtagagatgacctcgtcgtcgtcaatggcgggtggtggtgggttcgtcgccggctacggtctccacgacgagctatacgacttcctcttcaagtgcgagtcgatcggcggagcgcaaggcgggatcatcccttcgtcgttgccggagctgcagtgcccggacggcagcgccatcatcggcgccgacgagaagttctcgacgtggacgtcgtcgtcttgcgactacggttcgggcggcgccggcgattacgttctagggtatgatcaataa

SEQ ID NO: 12408 - DNA, 782 bp, Oryza sativa
  Clone ID: TFbOSC4185j.C1.o1.fg
gtacaccttggactgaagaagagcatagaatgtttctaatgggtctgcagaagcttggtaaaggagactggcgtgggatctctcgtaattttgttgtttccaggacaccaactcaggtggctagccatgctcaaaagtacttcattagacagacaaactcatcaagaaggaagaggaggtcaagcttgtttgacatggtcccagaaatgcccatggacgaatccccagtggtcgtagaacagcttatgctccatagtactcaagacgaagccacaagctcaaatcaattgccaatatcacatcttgtgaaacaaaaggaacctgagtttggtacacacctgtcggatttgcagctaaggaaccatgaggaatctgacttcacagaaccttcactagcatcactacacttggagatgaaccatgctgcacctttcaagactaaatttgttctgacaatgccaacattctacccggcattaatacctgttccactaactctttggcctccaaatgttgctaatgtgggtgaatcaggcacaaatcatgaaatcctaaagcccactccagtgaatggaaaggaggtgatcaataaggctgatgaggttgttggcatgtccaagcttaccataggtgacggcagctctaactccatagaaccctctgctctttcccttcagcttactggaccgacaaatacaagacaatcagcttttcatgtgaacccaccaatggctggacctgacctaaataagagaaacaacagcccaattcatgcagtttga

SEQ ID NO: 12409 - DNA, 795 bp, Oryza sativa
  Clone ID: TFbOSC400431j.C1.o25.fg
atggggaggacgccgtgctgcgacagggaggcggtgaagaggggcccgtggtcgccggaggaggacgacgcgctgcgcgactacatcaaccgccacggcaccgccggcaactggatctccctccccaacaaggccgggttgaggaggtgcggcaagagctgcaggctgcggtggctcaactacctccgccccgacatccgccatggcgccttcaccgacgaggaggacgccatcatcacctccctctactccaagctcggcagcaagtggtcgaccatcgcggcgcagctggagaggaggacggacaacgacgtcaagaaccactggaacaccaagctcaagcgccgcctcgccgccgccgccgcctgcacgcccttactgccgctcccggcgccgccgcccctcgccgccacgcacacgtcgccgtcgtcgtcgctgctgctcctcccgccgctcgccgtaccgaccgtcaagaccgaggcgtacacctgcgacgacttcctgcagcagctgctgccgaccgccaccgccgccacggcgctccgggatcccttcgccgacggcgccgccacggacggcggctcgacgtccgcctccgccgcgtcgtcggggtccaactggtcggcggacaccggcgtcgtcgtcgtcggtggcggcggcggcggcgggctgttcccggaattctgcatgagctccgacgacctcgccggcgccgccacggcggaggacgaccacttcatcggcggcggctactactaccctctcgatccgagcttgtcatcatcactagtgtag

SEQ ID NO: 12410 - DNA, 1287 bp, Oryza sativa
  Clone ID: TFbOSC400143j.C1.o23.fg
atggggaggtctccttgctgcgacgagaacggcctcaagaagggcccctggaccacggaggaagatgagaagctcatggagtacatccagaagaacggccatggcagctggagagcgctgcctaagcttgcagggctgaacaggtgtggcaagagctgcaggctaagatggacgaactacctgaggccagacatcaagagaggaaagttcacctctgccgagaaggataccatcctccagcttcacgccgttcttggcaacaagtggtcagccattgccaagcacctcccaggtaggactgacaacgagatcaagaactactggaacacacacctgaagaaggatctgatccagaagggcatcgacccgacgacgcaccggccgaggaccgacttcttcgccgcgctgccgcagctgatcgcgctcgccaacctccgccagctcgtgggccagctgccgtgggacgaccccgccgccgcggccgccgggctgcagcaagccgaggcggcccaggcagcgaagttcggacagtacctgcacctgcaggcgctgctccagcctccgccgccgtccgccgcgactagccccagatcaggctgcatcggcggcgccgccgccgccatgccgggcggcgacatggagcagatgggcgcgggactgcttagcccgccggcgatgtcgtccgcggccttgtcgccgatgtcgacgtcgtccttgtcgccgctgccttcgccgatgtcgtccacggccttgtccccgttgcctccttcgagcttctttggcaatggtggccaaggctcattcctcgctggacaattgcctaacatccaaatgcatggcagctcgttgttcgaccagtcggccgccatcatcaacgacgccaaccacaaccaagattacgctgcaagcactggcgagagggagatcatcaatggcgccacgaagacgacgacgacgacgctgctgccggaaggctctcttccgccgctcgccgactaccccaccatctccaacctcggtgatgtctacagcaccccaagctgcgatggcaacatcactgaattccctctcttgcctgacgccttattcgacgagttgatgagagactatatttccaattgctttctggaagattggaaaaatacagactctaagaatttagatgtatctgatatattacagattcaagttgcagttaagattttgccattagcttctctcagtggcattgggcctgaaccacacctgtcagtgagagagtcagcggctcagtgccaaaaggcataa

SEQ ID NO: 12411 - DNA, 777 bp, Oryza sativa
  Clone ID: TFbOSC407956j.C1.o2.fg
atggggagggcgccgtgctgcgagaagatggggctgaagagggggccgtggacggcggaggaggacaggatcctggtggcgcacatcgagcggcacgggcacagcaactggcgcgcgctgccgaggcaggccggccttctccgctgcggcaagagctgccgcctccggtggatcaactacctccgccccgacatcaagcgcggcaacttcacccgcgaggaggaggacgccatcatccacctccacgaccttctcggcaaccgatggtccgcgattgcagcgaggctgccggggaggacggacaacgagatcaagaatgtgtggcacactcacctcaagaagcggctggagccgaagccgtcgtccggccgggaagccgccgcgcccaagcgaaaggcgaccaagaaggctgcggcggtggcggtggcgatcgacgttccgaccaccgtgccggtgtcgccggagcagtcgctctcgaccacgacgacgtcggccgccaccaccgaggagtactcgtactcgatggcctcctccgcggatcacaacaccacggacagtttcacctcggaggaggagttccagatcgacgacagcttctggtcggagacgctggcaatgacggtggacagcaccgactccgggatggagatgagcggcggcgatcctctcggcgcgggcggtgcctcgccgtcgtcgagcaacgacgacgacatggacgacttctggctcaagctgttcatccaggccggtggcatgcagaatttgccccagatttaa

SEQ ID NO: 12412 - DNA, 2178 bp, Oryza sativa
  Clone ID: TFbOSC414758j.C1.o1.fg
gaagatgacatcattgttcagatggtaaacaaacttggaccaaagaaatggtcaaccattgctcaagctttgcctggacgtataggaaagcaatgtcgggaacggtggcacaaccatcttaaccctggcataaacaaggaggcatggacacaagaagaggaaattaccctcatacatgctcatcgaatgtatggaaataaatgggctgagctgacaaaatttttaccaggaaggacggacaatgcaattaaaaatcactggaacagttcagtaaagaagaaagtcgactcatacatgtcatcaggtttacttacccaagtctcgtgtctccctctaaatgaatactctgcacactgtaattcctcacctgcgttgacccaacaaaacagcgaagacagtggtagctatgctgttcgagaggttgaaaattcatcagtgtgtagtcaatcatcacttgccaaggtttcttgctcccaagtgcacaatgctaatgtggcattgggctgtgatttgcaagtaaatgcgaatgttgacaataatgaagcgcatgattctcaatcttctgtgggtcacgaagcatgctatacttctgtgggggctgttgcaactgctatacctgaggtgcactaccacgtttcttcctctaacttcgatccagatcaacacttgcaagaggagtttgctcaaggattgaatttgcatatgagtatggatgaagtgccaagtaattctagttttgcagacaacccaactatctgtagtatagaaaatcatgaaaggtcattggaaccatatgatgtagcaatggagatgcctctctctatgttaccaagtgattctggagctgagcaaaaactacattttatgtcggaggctgacttcaatagtcctaattgtctgaaatctgaactttggcaggatatttccttgcaaagccttctttctggacctgatgcagttgaaactgattctttttcaagatcaaatcatcaatcggatgtatattcctctcaagcagataatgaatttttagcaccaccctacctattacagacatcaaattcttccagtgtgatggaggctacttatggacagagtccacagatgtcagtaccaccatctcttatctgttcaaatgttatgactgatgtaccttctgataatagatcagaaccaaaagaaatgacagtttctcaggcagaaatggtcacacaatcttccagttcttcaggtgacgctgaaatgtctgctaaccctggtagtagtaatggcagtgatattccttcaatgatggaaaggatacctgaatgtgcggaccaacatgttactaatgcggaagaacctgaagccagtatagagaaagaaccatcggttacaccgagtgctacagcagatgaaaagcaggatgagggagccctattctatgaacctcctcgttttccaagcatggatgttccatttgtcagttgcgaccttgtaacttctggtgatctccaagagtatagtccccttggtattcggcagttaatgcggtcgaccatgaatgtctgcactccaatgagattgtggggctcccctacacatgatgaaagccctgacattttgctgaagagtgctgccaaaagcttcatatgcacaccatcaatactaaagaaacgtcacagagacctcgtgtctcctattccggataaaagaatcgagaagaaatctgggactgaaaaggattgtggggtatcagacacatcctccatcggcattcaaacatgttttattaatgccactaaagatgatgctgttataactaaatcagttttgcgtattgagcgatctgcttcttctaaacctctggaaaagaaacttgagttctctgatgagaacaaggaaaatttggacaacacaattgaacaggcaaaagatggacagagtgcaggaaattacaaacacattgacgagcaggcaaggggggaacggcgtactgcaacaaatataactactacttatgatgatctgccaggcaatttacaacctgcaggtattcttattgagcccaacggtgatgatcttgtttccccagattatgtctgtaaggagggagtgtctgctaaaaagcttgcggaacttattgtggagaaatcttcagcatgcataaatgtggattatgaatatgtgaacatgtaa

SEQ ID NO: 12413 - DNA, 840 bp, Oryza sativa
  Clone ID: TFbOSC400020j.C1.o1.fg
atggggaggcagccgtgctgcgacaaggttgggctgaagaagggtccatggacggcggaggaggaccagaagctcgtcagcttcctcctcggcaacggccaatgctgctggcgtgccgtccccaagctcgccgggttgctccggtgtgggaagagctgccggctccggtggacgaactacctccggccggacctgaagcgtggtctcctgtcggagacggaggagaagacggtgatcgacctgcacgagcagctcggcaacaggtggtccaagatcgcgtcgcacctgccgggcaggacggacaacgagatcaagaaccactggaacacgcacatcaagaagaagctccggaagatggggatcgaccccgtcacacacaagcccctctaccctgctccgccgctggccgacggcggctcgccggagcagaaggtgccggaggaggaggaggaggtggaggagaagtcgtctgctgccgtggaaagctcgacgagcacctgcgccggccacgacgtgttctgcaccgacgaggtgcccatgctgcacctggacgacatcgtcctcccgccgccgtgcgacgtcgtcggcgacaccgccggctcgccggcagagtcgtcgtccacgtcgacgtcgtcgagcggcggcggcggcatcgacgaggagtggctgctgccgatcatggagtggccggagtcgatgtacctgatggggctcgacgacgtcgacatggtcaccacggcggcgccggcgatggcgacgtcgtgggagttcgaggatccgttcaacgcgtaccagaggatcgcgttgtttgatcaccaccacgagctgacgtgggcttga

SEQ ID NO: 12414 - DNA, 1101 bp, Oryza sativa
  Clone ID: TFbOSC400426j.C1.o60.fg
atgacgaggcggtgctcgcactgcagcaacaacggccacaacgcgcggacctgccccgcccgcggcggcggtggaggcggaggcggggtgaggctgttcggcgtgcggctcacgtcgccgccggaggtggcgatgaagaagagcgcgagcatgagctgcatcgcgtcgtcgctcgggagtggcggtgggtcagggggttcgtcgccggcgggaacgggaaggggaggaggaggagggggagagggcgcggccgggtacgcgtccgacgaccccacgcacgcctcctgctcgacgaatggccgcggcgagcggaagaaaggtacaccttggactgaagaagagcatagaatgtttctaatgggtctgcagaagcttggtaaaggagactggcgtgggatctctcgtaattttgttgtttccaggacaccaactcaggtggctagccatgctcaaaagtacttcattagacagacaaactcatcaagaaggaagaggaggtcaagcttgtttgacatggtcccagaaatgcccatggacgaatccccagtggtcgtagaacagcttatgctccatagtactcaagacgaagccacaagctcaaatcaattgccaatatcacatcttgtgaaacagaaggaacctgagtttgctagacacctgtcggatttgcagctaaggaagcatgaggaatctgagttcacagaaccttcactagcagcactagacttggagatgaaccatgctgcacctttcaagactaaatttgttctgacaatgccaacattctacccggcattaatacctgttccactaactctttggcctccaaatgttgctaatgtgggtgaatcaggcacaaatcatgaaatcctaaagcccactccagtgaatggaaaggaggtgatcaataaggctgatgaggttgttggcatgtccaagcttaccataggtgacggcagctctaactccatagaaccctctgctctttcccttcagcttactggaccgacaaatacaagacaatcagcttttcatgtgaacccaccaatggctggacctgacctaaataagagaaacaacagcccaattcatgcagtttga

SEQ ID NO: 12415 - DNA, 1137 bp, Oryza sativa
  Clone ID: TFbOSC411834j.C1.o4.fg
atggatttcagctgcttcaatccccaaccagcaatctctcatggcattccatttgattcctttctgctgcaagatgagctccatcatcatgctgatcttgatcatccatttgaagctgaaggcatcactgttcatgggtctgaacttgaaggtggatctgtgcttccttttgcaactcttcatgatcttgatcatgagttcttcagaagaggaagtaggaaggatttcatcgacaatgcttcgtcgatctttctgttgaaccccaagactgaggtttctcatcttgtaagagatgttcaagttggagcatttggtgcgtatgagatgaatggcaggttgatttcaagaaacaaggcgtcaaggaaaggtatcaagaaggctgatgctgtcaaaggccactggacagtggaagaagacaggaagctggtgaaattagtggaacaatttggactgaagaagtggtctctgataggggggatgctgcctggaagagtaggaaagcaatgcagagaaagatggttcaaccatttgaggcctaacatcaagaaagatacttggagcgaggaggaagacatggttctgatacagatacacaaggaagttggcaacagatgggcagagatagcaaaatgcctacctggaagaactgaaaactccatcaaaaaccactggaatgcaacaaaaagacggcaatttgcgcgacggcgcaaccgttctacctccaaatcaggaagtacagttctgcaaaactacatcaaaagtcttgccatttctccacaagaatcacagatgaacaatgagaggtcagaatctaatccatctgacatgatgatcacccaagggacaccctgctgctttgatgggaacaattgcagccaaagtcacacttctgaagagaatatagttcctagctgtggtgattttgcagctgaaatgtggagtggtttgtttgacacaaaggaagatgaggaggatgaagcacaatacctgctctatgacatggacactcatgttgacatgaactgtattttcagcaatatggattatggtagtaacattgagcctggattagcatcagttgtgaaagcagaatgttcagcagaaagctgggctgtgaatttgaaggagacggattag

SEQ ID NO: 12416 - DNA, 921 bp, Oryza sativa
  Clone ID: TFbOSC400323j.C1.o24.fg
atgacctcccaggcggcgacgacgacgaccacggcggcggcggcggcggcgtggaccagggaggacgacaaggcgttcgagaacgcgctcgcggcgtgcgcggcgccgccgcccgcggacggaggcgcgcccgacgacgactggttcgccgcgctcgccgcgagcgtgcccggggcgaggtcggcggaggaggtgcggaggcactacgaggcgctggtggaggacgtcgcggccatcgacgcgggccgcgtcccgctcccgcgctacgccggggaggagtccgcggcgccgcccgacggagccggagccgccgccgccgcgtccaaggacggcggacaccggcgcgacgagcgcaagggcggcggcggcgggtacgacggcggcaagagctgctccaaggcggagcaggagaggcgcaagggcatcccatggacggaggaagagcacaggctgttcttgctggggctggacaagttcggcaagggggactggcggagcatctcgcgcaacttcgtcatctcgcggacgccaacgcaggtggcgagccacgcgcagaagtacttcatccgcctcaactccatgaaccgcgaccgccgccgctccagcatccacgacatcaccagcgtcaccgccggcgatcaggtcgccgcgcagcagggcgccccgatcaccggccaccaggccacgggcaaccccgcggcggcggcgctgggcccgccgggcatgaagcaccaccaccaccaccacccgggcggcgcgccgccgcccatgcccatgtacagcgccgcgcccatgggccaccccgtcgccggccacatggtgcccgccgccgtcggcacgccggtggtgttcccgccgggccacgcgccgtacgtcgtgcccgtcggctacccggcgccaccggccaagatgcaccaatga

SEQ ID NO: 12417 - DNA, 1197 bp, Oryza sativa
  Clone ID: TFbOSC102162j.C1.o14.fg
atggcgaagcagtcgtgctgccacaagaagaagctgaggagggggctgtggtcgccggaggaggacgagaagctcatgaatcacatcgccaagtatggccacggttgctggagctccgtccccaagcttgcaggactggagagatgcggcaagagctgcaggttgaggtggataaactacctgaggccagacctcaagaggggcaccttctcccaggaggaggaagacctcatcattcagctgcattccatgcttggcaacaagtacgtactgtatagtagtagcacacacatctgtcaatctctctcccgttctgtgccatctctgacaatggcggctgccactgccactgcactggccaggtggtcgcagatcgcggcgcagctgccggggcggaccgacaacgaggtcaagaacttctggaactcgtacatcaagaagaagctcagggaccgcggcatcgaccccgccacccacaagccgctcgctgccgactcctccgcgacgcccacgaacacgacggcggcggcggcgtcgaggtcgacggccacctgccgcgcggtgttcagcgacgccgagctgcagataccgacggcggcggccgtgcagcagcagcagcaggcgccgctcgtcggcgcaatgcagctggtcgacggcatcaagatgccgctcgacgactactggcctgcggcggcggcggcggcggcgccctcgtcgtcgacgacgacgttctcggcctaccaccacgcgctgagcatgcagcagcaggccgcggccggatgcggcgccgccgccgccttcgacatggacgcgctgtcgcactgcggcgtcgtcgtcgccccctcggcgtctagctccagcacgctcacctccatggccggcctcagccccgccgcggccgacgccgccgagcagagcgccaacgtcgccgccgccgccgccgccaccaccaccaacctgccgtggctggacctggggcacgccaaccccatcgcgacgatggaccactacgccggcgtgctggacgagctccggtggtccgactacttcgacggcgcataccaagcagcgacgacggccacccaaggcggcgcccttcaagggcagtgcctctacgacggcggcggcggcggcggcaaggacgtcgacgatgcagtccaattcgtggacgtccatagcctaagcaactggtgctaa

SEQ ID NO: 12418 - DNA, 912 bp, Oryza sativa
  Clone ID: TFbOSC423363j.C1.o16.fg
atgctgattcacggggagggctcgtcgtcgtcggcggcggcggcgggggggaagatcaaggggtcgtggagcccggaggaggacgagcagctgagaggggcggtggcgaggcacgggccgaggaactggacggcgatcagcgaggaggtgcccgggaggtcggggaagtcgtgccggctgcggtggtgcaaccagctcagccccggggtgcaccgccgccccttcacccccgacgaggacgcgctcatcgtcgccgcccacgccaagtacggcaacaagtgggccaccatcgcgcgcctcctcgacggccgcaccgacaactccgtcaagaaccactggaactcctcgctccgccgcaaccgcagggccgccgccgcggccgccgcggcggctgcatccgtgtcgtaccagtccatggatctcaccgaggaggccgacaacgacgacgagggcaccagcgacgactcggtggcgatccctgcgcagtcgtcgccggcggcggtcgtcgctggtgtccctgtgcttccgccgccgccgcccccggccaagaggctgtgcgtggcgccgcccaccggcgtggagcaccgggctccgccgcccgacccgcctacgtcgctgtcgctcagcccgccgggcgccgccgccgccgccatctcagcctccaccgtggtcggcgggtcgtcggcggcgcgcgcggaggaggaggccgtggcgagggagaaggcgaggatggagcaggacccgtggctgatggcgatgatgcggcagatgatcaccgaggaggtgcagcggcaggtgagcgtggtgtactcgctggtggcatcctccgcggcgatggcggcacagacgggcaacgccggcggcgtcggccggaaagggcccgacggccgcccatccaacggtcaggattga

SEQ ID NO: 12419 - DNA, 894 bp, Oryza sativa
  Clone ID: TFbOSC411283j.C1.o2.fg
atggggtgccggtcctgcgacaagccgaagatgaactacaggaaggggctgtggtctcctgaggaggaccagaggctgagggactacattgtcaagcatggccttggctgctggagtgctgtccctgcaaaggctggtttgcagagaaatggcaagagctgccggctgcgttggatcaactaccttcggccaggattgaagcgtggaatgttctctcaggaggaggaggacattgtcatcaatcttcaggccaagctgggcaacaagtggtcacagattgcgatgcatctgcctgggaggacggacaacgaggtgaagaactactggaattcctacctcaagaagagggtgatgcaggcacagggctccatccctaacaatctagcagcagcagcagctgaggtcacctccatgagcaccaccgagccaccatcattgcatcaccatcatcatcaccctcaccatcatcagatcaagaacagcagcggcagcacgaccacctcccatgaccaagacgccaacctgagcagcggcggcagccatggcggcatctctgctcctgcacctgtcgctgagccatttgatcagcagcccaagagcttcgtcttcaccggcgactggatgccgatgtctgcggcggcggcggggcaggagagctactccatctcggcgcagcactggccggcgtccacggcgagctccggcaacgtgacgccgtcgcacggcggcgcgttcggggaccagatgagcggcagctacggcgcattgcagcagcagcatcagagctcagctgctgctgctccaatggcaggaggcggcggctactttgacctgctaaacatgggagacatctatggcggatttgctgccactagtgacgatctgctcttctga

SEQ ID NO: 12420 - DNA, 831 bp, Oryza sativa
  Clone ID: TFbOSC400500j.C1.o30.fg
atggggagggcgccgtgctgcgagaaggaggggctgaggagaggggcgtggagccccgaggaggacgaccgcctcgtcgcctacatccgccgccacggccaccccaactggcgcgcgctccccaagcaagccgggcttctccgctgcgggaagagctgcaggctgcggtggatcaactacctccggccggacatcaagcgggggaacttcaccgccgacgaggaggacctcatcgtccgcctccacaactccctcggcaacaggtggtcagccatcgccgcccagatgccgggtcgcactgacaacgagatcaagaacgtgtggcacactcacctcaagaagaggctggacgacgaacggaagctcgccgccgccggcggtggcggtggccgccggccgcatacgcgcaagcagcccaaggcggcaaagagcgccgccgccgtcaagcgcgaggcgacgccgtccgtcagcgtcgacaccagtagcggcgtgacgtgctccacggtgaccgagtcgtcgccgtcgtcggccgacggcgaccaccggcggcagcagcagcaaacgcagcatgccgctgtcaaggaggagagcttcagctcgggcggcgagctgccggcggcggcggcggcgcccacggcagcggccgacatggacgagagcttctggtcgtcgacggaggtgaccgggatgatggccggcctcggcgacatggacgaggagctggccatcgccggcacgtcgtcggcggcggcggcgaggagcgacgacatggagttctggctcaagatgctcctcgagtccggcgacatgagggatttggccgtcttgtaa

SEQ ID NO: 12421 - DNA, 510 bp, Oryza sativa
  Clone ID: TFbOSC418633j.C1.o10.fg
atggacatggagctctcctcctcctcctcctctaccaccgtcgcttcctcacctgcgtcgtcgccgccgctcgggaggtgcgtcctccgcttcaggctcccgccggcgtggacgcccgaggaggacgccgtcctggagcgcctcgccatggagcacggctcccgccactggcgccgcgtggcggcgcaaatgccgcgccgccgctcgcccgcgcagtgccgcgacaggtggggggaccacctcgcccgcgacgtcttccaccgccccttcaccgccgccgacgacgccgagctcgcccgcctctgcctgcgcctcgacgacgacgctggcttcgccgccggccgccgatggaaggacgtcagcagggccgtctacggccgcagctcgtgcgccgtgaagcgacgctggagggagctgcgcaggagcgacgcgttcctcggcgcgctgtggcgtccgaggacgacgacgacggcgccgccagccaatgccgcgatcacgacgacgtgttga

SEQ ID NO: 12422 - DNA, 828 bp, Oryza sativa
  Clone ID: TFbOSC401948j.C1.o3.fg
atgaagcggaagcggccggcggcgctgcgcggcggggaggaggcggcggcggcggcgctgaagcgtgggccgtggacgcccgaggaggacgaggtgctggcgcggttcgtggcgcgggaggggtgcgaccggtggcgcacgctgccgcggcgcgcgggcctgctgcgctgcggcaagagctgccgcctccggtggatgaactacctccgccccgacatcaagcgctgccccatcgccgacgacgaggaggacctcatcctccgcctccaccgcctcctcggcaaccggtggtcgctgatcgccgggaggttgccggggcgcacggacaacgagatcaagaactactggaactcgcatctcagcaagaagctcatcgcgcagggcatcgacccgcggacgcacaagccgctgacggccgccgccgatcactccaacgccgccgctgccgtcgccgccacttcttacaagaaggcggtgccggccaagccgccgaggacggcatcctcgccggccgctggcattgagtgcagcgacgatcgtgcccgaccggccgacggtggcggtgacttcgcagcgatggtgagcgccgccgatgccgagggattcgaaggaggatttggcgatcagttctgtgccgaggatgcagttcatggtggcttcgacatgggttccgcttccgccatggtgggtgacgacgacttctcctcgtttcttgattctctgatcaacgacgagcagttaggcgatctcttcgtcgtcgagggcaacgatcacgagcatggcaatggtgagattggtcatggagacgtcatggaatccaaacagtaa

SEQ ID NO: 12423 - DNA, 618 bp, Oryza sativa
  Clone ID: TFbOSC401434j.C1.o23.np
tcttttatttccttgaagacttacattaatagaagcataccttcatcatctccatgttctcaatgtaaagagactaaacaagataggttggtcaaaggagggtggacaagggaagaggatgaagttcttaggcaaatggtgagacaccatggagatcgcaagtgggcagagattgcaaagagcctcccaggtcgggttgggaagcagtgccgcgagagatggaccaaccatctgcacccggacatcaagaaagacatctggacagaagaagaggacaggatgctgatcgaagcacaccaaacttatgggaacagctggtcggcgattgccaagcagcttcctggacggtcggagaacaccataaaaaaccattggaatgcgaccaagcgaagcctgaactcaaagcggcgactgagaaagaaaaacagcgagcaaactgtgccagggcagccttccctccttgaaagttacatccgtagctgccagcacatgcttcccacgtcaagaaccactggaacccaaccaagcgaagcctaaactcaaagcagcgactaaggaagaaaaacagcgagaaagcagcgccggggcagccttcccaccttgaagagtgcatctgta

SEQ ID NO: 12424 - DNA, 1104 bp, Oryza sativa
  Clone ID: TFbOSC401196j.C1.o2.fg
atggggagatcaccgtgttgtgagcaggacgccgacgtgaagaaagggccatggacgccggaggaagacaagcttctggtggagtacatcggcaagaacggccatggcagctggcggcgcctcccgaagctcgccggactcaaccgctgcggcaagagctgccgcctccggtggaccaactacctccgccctgacatcaagcgcggcggcttctccgacgacgaggagcgcctcatcatccacctccacgccaccctcggcaacaaatggtcgtccatcgcgacgaagctcaaggggaggacggacaacgagatcaagaactactggaacacgcacctccgcaagaagcttctcagccaggggatagaccccgtcacgcaccgcccgcgcaccgacctcctcgccggcctccccaacctcctggccgccgccaatctcggcggcgccgcccaccagctgcccttggacttgaacgccatcaagctccaggccgacgccgccaagttccagattctgcagggcctcctccgcgtgctcgcctccaccaccgccccgccgcccaccgccgctgtgctacctggcacagacctcatgacgtccatcctcggcgccaccctcgccgccaactccgccggcatactcggacagcagcagcagctcgccggcgttgacctcagccgcctcggccagtacaacggcaactacgacaacctgccgccgttgaccaacgacagctgcacgcagcagacgcagccggccatgtcgagcatgtcccccgacagcctactcaacagaatttccagcggtatttccggggacatgctgggctcgccggagctttgccacggcggggacgggcttagctcgccggagctcggccagggcggcccgagcgcaagcaacatgacgacctcaccgatggcgccgccgccgccaatggtagctgcagatgatcatcagtgcaatactaacacccccagcggcggcggcgacggcatgtcgtgtgagcagacgccggcgtcgagcacgttcgacgggctgaacctggacgacatcgacatggaaggttgttgggcgatgacggacatattgctagcagagtga

SEQ ID NO: 12425 - DNA, 2979 bp, Oryza sativa
  Clone ID: TFbOSC414606j.C1.o3.fg
atggagagccttctggacctccgtcggctcctcaagaaggagaaatcagcaatgaaccaaaaaggcgacgacctctcaatgggtaaaaggctaaaagctcttttgactatcgtaatgaggaccaccggtccgacacggcgttccaccaaaggaaattggacccctgaagaggatgccatattgtccagagctgttcagacatacaacgggaagaactggaaaaaaatagcggaatgctttccggatagaaccgatgtacaatgcttgcacaggtggcaaaaggttctaaaccctgaattagtcaaagggccatggtccaaagaagaagatgaaatcattgttcagatggtaaacaaacttggaccaaagaaatggtcaaccattgctcaagctttgcctggacgtataggaaagcaatgtcgagaacggtggtacaaccatcttaaccctggcataaacaaggaggcatggacacaagaagaggaaattaccctcatacatgctcatcgaatgtatggaaataaatgggccgagctgacaaaatttttaccaggaaggacggacaattcaattaaaaatcactggaacagttcagtaaagaagaaagtcaattcatacatgtcatcaggtttacttacccaagtttcgtgtctccctctaaatgaatattctgcaaattgtaattcctcaccagcgatgacccaacaaaacagtgaagatagtggttgttttgctgtccgagaggttgaaaattcatcagggtgtagtcaatcatcacttgccaaggtttcttgctcccaagtgcatgatactactgtgccattgggctgtgatttgcaagtaaacgcgaattttgacaagaatgaagcacatgattctcaatcttccatgggtccccaagcatgctatacttctgcggaggctgttgcatctgctttgcctgctgtgcattgccatgtttcttcctctaacttggatccagatcaacacttgcaagaggactttgctcaaggactgaatttggacatgactatagatgaaatgccaactgttcctagttttgcagacaaccagactgtttgtagtatagaaaatcatgaaagatctctggagccatatgatgtagcaatggaggtgcctctctctatgttatcaagtgattctggagctgagcaaaaactacatttcatgtctgaggctgacttcaacagtcctaactgtctgaaatctgaactctggcaggatatttccttacagggccttctttctggacctgatgcagttgaagctgattcaatttcaagatcaaatcaccaatcggatgtatattcctctgaagcagatacccattttttagcaccaccctacatgccacagacatcaaattcttcaagtgtgatggggcttgctgatgaccagagtccacagatgtcagtacctccatctcttatttgttcaaatgctatgactgatgatgcacctttcgataatagaccagggcggaaggaaatgccactttctcaggcagaagtggttacccaatcttccagttcttctggtgatgctgaaatgtttgctaaccctggttgtagcaatgacagacatgttccttcttcaacgatggaaagcatacctgaatgtggggaccaacaggttactaatgcggaagaacctgaagccagtctagagaaagaaccatcgcttacacagagtgtgactgcaccagatgaacaggacaagggagccctcttctacgaacctcctcgttttccaagcctggatgttccatttgtcagttgcgatcttgtaacctctggtgatctccaagagtttagtccccttggcattcggcagttaatgcattcaaccatgaatgtctgcacgccaatgagattgtggggctcccctactcatgatgaaagcacgggcgttttgctgaagagtgctgccaaaagcttcatatgcacgccatcaatactgaagaaacgtcacagagatctcttgtctcctattccagataaaagaatcgagaagaaatatgggactgaaaaggatcgtggggtatcagacacatcctccaccggcattcaaacaagttgtatcaatgccactaaagatgatgcacttataactacagttttgcgtattgagcgatctgcttcttctaaatctctggaaaagaaacttgttttctctgatgaaaacaaggaaaatttgggctacacaactgaacagacaaaagatggacagagtgctggaaatgacgaacacatggacgagcagacaacaggggaacgcagttctgcaacaaatgtagctactaatgatgacctgtcaggcaatttacaacctgcaggtattcttattgaacacagcggcgatgatcccatttccccagattatggcaaaaataccatgaatcagaagctgaacacaaatgtgaaatctttatcagtctgtaaggagggagtgtgtgctaaatcaaagcccactgaactcatcgtggagaaatcttcaccatgtataaatgtggattatgaatatgtgaacatattggctgataccccaggtatcaaaagaggactagaatctccttcagcatggaagtccccttggttcgtcgatatgcattttcagggttcatacttcaccagcccagctgatagttacgacgcactaggattgatgaagcagataaatgtgcagactgctgctgctttggtggaagcccgtgaggtactggcaagcggcggccaatgtgacaacataagctctgataaggaaaacacggggaatccagatgccaagaaggaaccagggacaaccaaattgcaaacaaaaatcatggcagagggtagagtcctggatttcgagtgtaccacacctgaaagatcatcagacaaaaatgctggcagcaatctgggaagatatctgagctcacctattccttcgtcccatcttctgaaaagttttagatag

SEQ ID NO: 12426 - DNA, 353 bp, Oryza sativa
  Clone ID: TFbOSC413697j.C1.o1.np
gcgtgcagggaagagctgcaggctgaggtggttcaaccagctggacccgaggatcagcaagaggccgttcagcgacgaggaggaggagaggctgatggcggcgcacaggttctacggcaacaagtgggcgatgatcgcgcgcctcttccccggccggaccgacaacgccgtcaagaaccactggcacgtcatcatggcgcgcaagtacagggagcagtccaccgcctaccgacgccgcaagctcaaccaggccgtccagcgcaagctcgacgccaccaccgcctccgacgccccccaaagaccaggtactggctttggactttcgtcgagcacagtgcgtgctttttttctct

SEQ ID NO: 12427 - DNA, 990 bp, Oryza sativa
  Clone ID: TFbOSC401503j.C1.o8.fg
atggcaaccgacaggatgccggatagtcactttatggcctctagcaatggtggggcctgctaccaaaacactcatggtactccaatcactatgggggtccccaacttaggttgtcttgttgctagcataggcattgctccgtcaagctctcttatgccggagaggggtctggcaaccgctaattacaacttggttgctaactttccagaagatgctgccgtggtgcctcaacaacagcagttgcaagctgcatctagtaacagcaactcagggttgatcaaaggagggtggacaagagaagaggatgaagttcttagacagatggtgcgacaccatggagatcgcaagtgggcagagattgcaaagagcctccccggtcggatagggaagcagtgccgcgagagatggaccaaccatctgcacccggacattaagaaaggcatctggacagaggaagaggacaggaagctgatcaaagctcatcaaacttatgggaaccgttggtcagcgattgccaggtcgctccccggccggtcggagaacaccgtcaagaaccgctggaacgcgaccaagcgaagcctaaactcaaagcgccgactgaggaagaaaaacaatgagcaagcagtgccaaggcagccttccctcctcgaagagtacatccgtagctgccagcacccactgcccaatgagacagcaccacccgcatcattcgatatcggtgggtacggtaccggtgggacgatcggtgcaagtccaaccccacccacagtgcatgcgttgggtggatctactccactagggttggtgatgttccttgacctacttaaccaggctacaccgcacccaccacagccagacttgaacttgttgaacataacaccggtggtgccacatctcaacactagtgaatactgcctacagctcgatgcgaggggcaactgtagtatggccagctgccggtgcaaccccacgggatcagcgcccaggtag

SEQ ID NO: 12428 - DNA, 882 bp, Oryza sativa
  Clone ID: TFbOSC401478j.C1.o97.fg
atggacgcgccgtgtggatggacgacgtcggcggcggcggcggtggcggaggaggaggatgttcggagagggccgtggacggtggaggaggacgcggtgctggccgggtacgtggcggcgaacggcgaggggcggtggaacgagctggcgcgggcggcggggctgaggcgcacggggaagagctgccgcctccggtggctcaactacctccgccccgacgtgcgccgcggcgacttcaccccgcaggagcagctgctcatcctcgagctccacttccggtgggggaaccgctggtccaggatcgcgcagcacatgccggggaggacggacaacgagatcaagaactactggcggaccagggtgcagaagcacgccaagcagctcggctgcgacgtcaatagccgccagttcaaggacgtcatgaggcacctctggatgccgcgcctcgtcgagaggatccacgccgccgccgcctcgtcggaacgcgccgcgccgccgccgtgtgccgccgcgccggctagtcacagcggcatgtgccactcacctgacccgtcaaccacgacgtcgagcatggcagggtcgtcggtgacgcacggcgagcagttcccgtcgtcgacgaaccaccacctgatgaccatggccagcgtcaccaccgcagcggcagattggtccagcgagcaatgcggcagcggcagcgccaccagcacgagcgttgggatcagttatgacatgttcgaggggagctggtcggagctcctcgcccgcgcctacgacgacgacggcgccgattcttcgctgctgccggacttccaaatggcagacaccggagacaactgctggtggagtaatttggaggacatctggtcacagcagccgtactga

SEQ ID NO: 12429 - DNA, 933 bp, Oryza sativa
  Clone ID: TFbOSC400554j.C1.o1.fg
atggagatgatgaggatggcgatgagcccggcgatgtcgtcggcgacggcggcggcggcgagcgaggacgagggcgacctgaggagggggccatggacggtggaggaggacatgctgctcgtcgactacatcgccaaccacggcgagggtcgctggaactcgcttgctcgctgtgcagggctgaggcgcaccggcaagagctgccgtctccggtggctgaactacctccgccccgacgtccgccgcggcaacatcaccgccgacgagcagctcctcatcctcgacctccactctcgctggggcaaccggtggtctaagatcgcgcagtatttgccggggaggactgataacgaaataaagaattattggaggaccagagtgcaaaagcacgcgaagcagctgaggtgcgacgtcaacagcaaggagttccgcgacgtcgtccgccacgtctggatgccgcgcctcatcgagcggatccaggccgacgccgccgccgccggcgaagttgcggcaccggcgccggtgtcggcggcggcgacgaggtcgatgagctcgccggctggcgcgatgtacctccaccaccagcagattccgctcgccgccggcgccatggtggtggcgccggcggtgagtagcgaagcgtaccaccaccacggctgcggcggcggcggcgacacgagctgcagcgagccgagccaggcggcggtgaccatgagccccgacgacgcatccagcacgctccggtcgtcgtcggcggcggcggagaacgacacgatccacggcgacgtgcttagcggcagctggtcggagcttcttgccaccaccaccaccaccatcgccgccaccgccggcttgccggacttcgatgagctcggagatttcgaggacaacttatggagccttgaggacatttggctgcaccagcagtgttga

SEQ ID NO: 12430 - DNA, 801 bp, Oryza sativa
  Clone ID: TFbOSC401138j.C1.o13.fg
atggagttcatcgacgacgactgggactaccagccacgcgcgcgagtcatccactcccgcagcaacgctaactccaacggtgccaccaccgcctcgtcgtcccaaccgacccgctccctcccccacaccgccgcctgcgccgccgcggccgtggcgctcctcgccgcggcgtactacctcctcccggactaccagagctcgagctcgaacccgacgcctccgcccccgaagccctcagatccgatcgcgcctccgccgccgcgacacgcggcggctgcggctgcggctgcggcgacggccgtgtcggatggcggcgaggcggtggaggacgccggcgagtggaccgaccaagagatggacatcctccgccgccagatggtgaagcacccggcgggtgagccgcagcggtgggagaagattgccgcggcgttcggcggccgccgcacgccggagagcgtaatccgcgcggcgaagtccggcggcggcgctgctgccgcgggggcctcgttcgaccagttcctccgcaagcgcaagccgctcgacccgaggtccgaggcgaccgacgcaggaagtggcaatgccggaggaggaggaggggagagtggtgatgggtcttggagcgccggcgatgaccgggcattgctcaacgcgctcaaggagttccccaaggacacggcgatgaggtgggagaaggtggcggtggcggtgcccgggaagacgaaggcagcttgcatgaagagggtcaccgagctcaagcgcgatttccggagcagcaaggcagcatcggaggcagctccatag

SEQ ID NO: 12431 - DNA, 837 bp, Oryza sativa
  Clone ID: TFbOSC416144j.C1.o8.fg
atggcggaggcggaagcggaggaggagatgatgatgaggatgatgtgtggttcaggaggcaacgagatgatgaagacgaagatgaagaagaagaatagagaaggggaagaagaagaagaagtaagtggaggaggtaggatgaggaaggggccatggacggagcaggaggacgtccaactggtatggttcgtgcgcttgttcggggaacgtcgttgggatttcttagcaaaggtctcaggtttgaagcgcacaggcaagagctgccgtctccggtgggtgaactacctccaccccggcctcaagcgcggccgcatcaccgccgacgaggagcgcctcatcctccacctccactcccagtggggcagccgctggtcccgcatcgcccgcagcctccccggccgcaccgacaacgagatcaagaacttctggcgaacccacatgcgcaagatcgcccaccacgccaagaagaagaccaattcaccatcgccggcgccgacgacctcctccggttccttgtcctcctcgctcaccacggcgacgacgacgatggcgacggctgcggcgctgcaagaaagcagcagctgcggcggcgacgacgaggccgtcgaccagctggtggcggcggccaccacgccggcgagccagctgctgacgatggactacaccatggaccagctctggaacgacatcgcggcggcggaagccgatacgagctgctacgacgcggcggcgatggcctcgccgccgtcgccggtctgggaattctgcaccgactactcgctgtggaggatcgacgacgaggagtactacaagaagatgctcgatgcctcgcaatag

SEQ ID NO: 12432 - DNA, 930 bp, Oryza sativa
  Clone ID: TFbOSC900101j.C1.o12.fg
atggggaggcagccgtgctgcgacaaggtggggctgaagaaggggccatggacggcggaggaggaccagaagctcatcaccttcctcctcaccaacggccagtgctgctggcgcgccgtccccaagctcgccgggcttctccggtgcgggaagagctgcaggctacggtggacgaactacctccggccggatctcaagagggggctgctctccgacgccgaggagaagatcgtcgtcgacctacatgcccaattgggcaataggtggtctaagattgcgtctcatttgcctgggaggacggacaacgagatcaagaaccactggaacactcacatcaagaagaagctcaagaaaatggggatcgatcccctcacccacaggcccctccagccgccgccgtcgccgtcgccagagaagaagcacgcagagagaaagaacacggcggcggcggcggcggtggccgagcagcatcagcacgacgaactctgggaggaggagtccccgggattctgcaccgacgaggtgccgatgatccacccggacgagatcatggtgccattgcgcgaccacccgccgccggtttgcacggccgccggtgcctcgacgccgacgacatcgtcgtcgtcgtcgtcctcgtcggtggcctcctcgacgacgagctgcgacgaggtcgacgccgcggcgctgctcccggtcctggagtggcccgacgacgccatgtgcctgatggagctcgacgagctgatcgccgcggcggcgccgccgtccctgctgtgggacgacgactaccgcctcccgctgccgccgccgccgctatcgccgccggcgatgtacgaggagctagacgcctttcagtgctacgaccagcagaggagcgcgtttgagcaggaggcagcagcttcagcgtggaacaagcttgagctcttctaa

SEQ ID NO: 12433 - DNA, 1686 bp, Oryza sativa
  Clone ID: TFbOSC30916j.C1.o2.fg
atgcgtgtggggaaggcaaagaggcggctggatctatcgacgagaagggggacagatgagggcgggcgcaccaactgctggaagacggccacgtcagcaccgtcgttggcgcgcgctacggcggtgcgggtgctggccacggacccagatccaagcggcgtggcgtgtgtgcgatgtgatgtgaacggggaacgagtgcgggcgtggtcgtgtggggcaaaaacatgtggtatgggagctgggcgcaagctcaagacccaccgcaggaaccaaagatgggccgacaaggcatacaagaagagccactttggcaatgagtggaagaaaccctttgctggatcatctcatgccaagggcattgttttggagaagattggtattgaggccaagcagccaaactctgccatctgtaagtgtgctcgtgttcagctggtgaagaatgggaagaagattgctgcctttgtgccgaatgacggttgcttgaacttcatcaaggaaaatgaagttgcgtatgtcgatggcatttatgggattaaagtgcttgtcgatgctctcagctcgagcagattgagaggtcgcgatggatcaggaggtgatcatggcgacgccaccgctgccgccgccgcctcgcgcgaggtggcgccaccacctcgcccgcgcgacgtctaccaccgccccttcaccgcccgcgacgacgacgagctcctgcgcctccactaccgcctcggcgaccgctggaaggagattggccgggccgtttacggccgcacatcgcgcgtcatgaagcaccgctggagggagctccggcgcggcggcttcctcgctgctgccgcaaggaaggagctggcggcgctcgacatggcggacgacatggtggaaactagcgaagtggaggagccagctgatcagtcgctgccgtcgctagagttgcagcgcagtacccttgcggacactcttgcctcgagcttcggttcttgcagccttgccactgaccacgtgatggatcccctggccggcagcctcgcgctaggaaaataccaattctttactattataaaaattgaagatgtttttaccggtactttggtacgtcatccttggttgcctcgcctcgtcaaggagaacggcttccgccactggagtagggtcgccaggatcatgccacgccgctctgcaaggttgtgccgtgacaggtggtgccaccacctcgcccgcgacgtctaccaccgccccttcactgcccgtgacgacgacgagctcctacgcctccactaccgcctgggcgactgctggaagaagattggccacgctgtctacggccggacctcgcgagtcatgaatcaccgctggagggagctccggcgcagcggcttcctcgctgctgctgcaaggacggagcagaagctcgacatggcggacgatatggtggaaagcgaagtggaggaatcagatcagtcgctgcccactactaggaaaagcattatcgcaaccggccgaaaagggtctttgcaggcggggcagccgtccgcctgtaagccaacgactgtgaagatcgccgatcttcgcaggcggggcggccgtccgcctgcgaagataattttcgcaggcggacgttggctagtccggtccgcttgcgaaaagaagaatcggccgcctacaaaaaaaaacttccgcctgcgaagatag

SEQ ID NO: 12434 - DNA, 864 bp, Oryza sativa
  Clone ID: TFbOSC400258j.C1.o35.fg
atggggaggtcgccatgctgcgagaaggcgcacacgaacaagggggcgtggacgaaggaggaggaccagcggctgatcgcctacatcaaggcgcacggcgagggttgctggcggtcgctgcccaaggcggcggggctcctccgctgcggcaagagctgccgcctccgctggatgaactacctccgccccgacctcaagcgcggcaacttcaccgacgacgacgacgagctcatcatcaagctccacgcccttctcggcaacaagtggtcgttgattgcggggcagctgccggggaggacggacaacgagatcaagaactactggaacacgcacatcaagcgcaagctcctgagccggggcatcgacccgcagacgcaccggccggtcagcgccgggagcagcgccgccgcggcgagcgggctgaccacgacggccagcaccgccgcctttccgtcccttgcgccggcgccgccgccgcagcagcacaggctacacaacccggtgcacgccgcggcgccgagcaatgcgagcttcgccaggtccgcggcgtccccgccgtcggaggacggccacagcagcagcggcggcagctcggacgcgccgcggtgccccgacctcaacctcgacctcgacctcgacctgtccatgagcctgccgagctcgccgcccaagacgccggccgccgcgtcgtccacgaccgcgtcgcgccaccatcaccaccagcagcagaagaccatctgcctctgctaccacctcggcgtccgcaacggcgacgtctgcagctgcaaggcggccgcgccatcgccggccggcccacgcgcgttccggtttctcaggccactggaggagggccagtacatatag

SEQ ID NO: 12435 - DNA, 2574 bp, Oryza sativa
  Clone ID: TFbOSC401213j.C1.o25.fg
atgtcgccgccggtggccggcgccgcctcctccggcgacgggccgccggggcgcccgccgcgcgagctctacaccatccctgcctcctcgggttggttccagtgggatgagatccacgagacggagcggcgggcgctgccggagttcttcggcggcgccggggggagcgggttcgggacggcgtcgcggaacccgcggatctacagggagtaccgcgactacatcatcagcaggtaccgcgaggacacctcccgccgcctcaccttcaccgaggtccgcaaggcgctcgtcggcgacgtcacgctcctccggaagctcttcgccttcctcgactcctcgggcctcatcaacttctccgcctccccctcccgccccgaggcgcagcagcagcagcggcagacggaggcggaggccgtcgtggaggcgcccgtggggctgcaggtgacgccacggccgccgccgtcgtacttcgcggaggagaagggaggagggggcaacgagaacggattccgtttgccgccgctgacctcgtatagtgatgtatttggagagtgggcgcctgggatggcgcctatatgtgggctctgtggcatggagtgcagagacgggaatgcccaaatattgaaggatggttttaaagtatgctcaaaatgttatgccaataatgataataagggtgaagcaaatatacatccaggtgacaaaaaggagcggatcgacaatcattcttctagtgcatggacagatgcagaaactctccttctcttggaaggtgtactaaaacatggagatgactgggatctcatcgcccagcatgtccgcacaaagaataaatcagaatgcattgcaaggctaattcagttgccttttggtgaacatatgctgggcacagtaaatggtaaattggataacagactccataaaatccaaacaaccgatggaaaagtgaacaagtccactgtgaaggagtcttcaagtcaaccaactgaaacagttgatgacatgcagattgatggaaatgaagatggcgctgataaatctgttgaagaacatcctacaaaacatagacggttgttttcttcaatagatatcactgtctcattaatggagcagttagcgcatcttaccacatcgacaagcccagatgttgttgctgcagctgctgatgccgcaattaaagcactgggtaatgaaaacccccaagcaaggagagcttttcaactcagtgagaaagagtaccaaaccagggcattctcttctaaccatgcccggcagagggattattgcagtgatgatgttggtggtggtgatcgggatgtagaaatgcacgggcacccagaccaggaagaacgggaaatggagctcctaatggcgtccataatagaaactcagctaaaaaagatccaatacaagatcaaacactttgaggagctagagttgatcatggatcaggaatacgctactctacagcaaatgaagtcttcccttgtcgatgaatggcaaaagcaaagccagcaattcggtgtttggagaattggagccatcctgaaccgtttagggtttgatcggacggctggtatggaatctcacagaagggcaccaccatttttccccaacgcggagcggcggaggcggcagccaaaaacccctccctcctcccctcctggactctcggtttcccctaacctcgcgcgccacctctcctctcctcgtcctccgcctccggacgcgcagttcacgggcgccctaatggcgaaaaagggcaaggcggcggcggcggaggccgcggcgcccgacgcgggggtatcgagcccgcagggcggcggcggggagaaggagggcagcttcctgctgggctcgccgacctgggaggacgccgggggcgggcggtggcggtgcaaggagacggggcacgagctgccggagcgggagaaggaggcgtacgggcggtcccgcgcgtgcaggctcgcgctcatcgaccaagccgtcgcgcgcaagaagccgccgctcaacgccttcaagcctcaccccgagcacaagtcgaagcttatatgcaatattactggggacattataaacaagtcggaggaacacatctggaagcacatcaatgggaagaggttcctcaacaaactagaaaaactagaagaaaagatggcatcaggtgaaatggccgaaggtgaagctgaacagtcaaatgaaggggaaaataaaaccaagtcaaggaagaagaaggacaagaagaaagctgctgttgttaacccttctttgccacgagaacctaaaccagagattgatgattcagataattctgatgatccagatttctgggtgcctcctgttggaagtcgttgggatgatgatgatggaaaagaccgatggacctcctctccagtgaaggataaggatgatgcagcagaggatgaagatggtgatgacgatggtgatgacatggctgacaaggatgacaaggagacaagagaaattgcttcaaggacaaagcgactgtcagtagaagcagttggcccaagtagcttcgcttcaaggaagaaaaaaaccaaaaaggagcagtaa

SEQ ID NO: 12436 - DNA, 921 bp, Oryza sativa
  Clone ID: TFbOSC7723j.C1.o2.np
gactcacgctttggttgtagattttgctgagactatgcgcaaggaatttgagatgagcatgatgggtgagttatcgtactttttgggattgcaaattaagcaaacacctcaggtacttttgtgcatcaaacgaagtatacgaaggatcttttgagagggttcaagatagagaattgcaagccaatttcaacaccaattggttctacagttgtgttggatcctgatgaagatggtgaagctgttgatgaaaaggaatatagaagtatgattggatctttgttgtatctaactgcttctaggccagacatacaatttgttgtgtgtttgtgtgcacgttttcaagcttctccttgtgcttcacatcgtcaagtggtcaagcgaataataaggtatttgaatcatacacttgggtttggaatttggtattctacttcatcttctgtatgcttaagtggatattccaatgctgattttggaggttgtagaattgatatgaaaagtactagtggaacatgtcattttcttggtacatcattgattgcatggtcgtctaggaaacaatctagtgttgctcaatcaacttctgaatctgaatatgttgctgctgctagttgttgttcacagattctttggcttttatctactttgaaagattatggtcttacttttgagaaagtacctctcttttgtgataatactagtgctattaacattgctaagaatcatgttcaacactcacgcacaaagcacattgatattcgttttcactttttaagggatcatgttgagaagggagatgttgaattgcagcttttggacacaaagttgcgaattgctgatattttcactaaacctttggattctaatcgctttgcttttcttcgtggtgaattgggcataattcatccttttggcatggtt

SEQ ID NO: 12437 - DNA, 1212 bp, Oryza sativa
  Clone ID: TFbOSC401780j.C1.o7.fg
atggggagggcgccgtgttgcgacaagaaggggctcaagaaggggccgtggacgccggaggaggacaagctcctcgtcgactacatccaggccaacggccacggcagctggcgcctcctccccaagctcgcagggctgaaccggtgcggcaagagctgccggctgcggtggacgaactacctccggccggacatcaagcgcgggcccttcaccgccgaggagcagaagtccatcgtccagctccacggcatcgtcggcaacaagtggtccatgatcgcggcgcagctgcccggccggaccgacaacgagatcaagaactattggaacactcacctcaagaagcagctgcgccggatgggcctcgacgatccgccgcccgggccggcggcgggctgcccggcggcgcgtcacatggcgcagtgggagaccgcgcggctcgaggccgaggcgcgcctctccctcctctcctcctccggcgccgcggcgacgacgacgatcaccgccgccaccaccaccacctccgcctcgtcgtcctccaccaccgcggggcccgtcgccgccgccgcgacgtcacccgcggacgtgttcctccgcctctggaactccagcatcggggactccttccgcaagctagccgtggtggcggcggggtcgtcgtccccttcgcgggcggacgtcacgaaggacgctgtgaagcaggaggaggaggcggcgccggccggggacgactcgtcggcggcgtccaacgaggtggaggcggcgaccatggcggtggacgagtaccagatgttcctcgacttcgccggcgaggagctgggcctgttccacggccgtttacttttactgtcttatgagcatgtcgtgactatcccgacgtacggtggagtcatagaagatgggtatgttggtgttgcagtgcacgttcttgaagaccgtgaggcaggcaaagaaaaaggagtaaatgcaccggatagccggtggggccagcccgacgagaaaacgaatttattgccacgctcagataaaaggccaaaccagagcagcgaaaggtttgccacgacacctgcagcacaggagcagcctgttgcctgtggtggcttcatcgccaggaaagaacagaaatgggcagggcaagctcgtcgcccctacgctaatgattctcttctgggagatactattaaatgccgtgccattgtggtcctttggatatga

SEQ ID NO: 12438 - DNA, 1230 bp, Oryza sativa
  Clone ID: TFbOSC401601j.C1.o8.fg
atggccgggggaggcggtagcctggcggtgggcggcggattgaacgggtggcgaggcgtcagcggcagcgtcggagctgcggggctagaggagggtagtgggccggcttggtggcgggggcatctaaccgccaacggctcgaggatgaagaagggggggggttctcgccggcacgctattccaactggcgaggcgggtagcggcgcggtcagtagagtcgccgtggccgtggccgtgtatgtggactcgtcgatcgagcaggagcagttggaggaggtggtgccgtggtggggattgatggggaggccgccgtgctgcgtgaaggcggaggtgaagaaggggccgtggacgccggaggaggacctcatgctcgtcgcctacgtccaggagcacggcccgggcaactggcgcgccgtgcccaccaacaccgggctgatgcggtgcagcaagagctgccggctccggtggaccaactacctccggccggggatcaagcgggggaacttcaccgaccaggaggagaagctcatcgtccacctccaggccctcctcggcaacaggtgggcggcgatcgcgtcctacttgccggagaggacggacaacgacatcaagaactactggaacacgcacctcaagaagaagctcaagaagatgagcgccaccggcggcggcggcgacgacggcgagggaggtggcgccggcgaggtgaagaccagggcggctgcgccgaaggggcagtgggagcggcgcctgcagacggacatccacaccgcgcgccaggcgctccgcgacgcgctctcgctggacccctcgccgccggccaagccgctggactcgtcgtcgggcgccacggcgccgccgtcgtcgcaggcggcgacgtcgtacgcatccagcgccgagaacatcgcgcggctcctggagggctggatgcgccccggcggcggcggcggcaagacgacgacgacgccgtcctccgggtcgaggtcgtcggcggcgtcggtgctgtccggggaggccagccacagcggcggcgccacggcgccgacgcccgacggctcgacggtcaccagcaagacgaaggacgaggagaccgccggcgcgccgccgccgccgccgccgccggcgttctccatgctggagagctggctgctcgacgacggcatgggccacggcgaggtggggctcatggacgtggtggtgccattgggggacccgagtgagttcttttag

SEQ ID NO: 12439 - DNA, 1800 bp, Oryza sativa
  Clone ID: TFbOSC401616j.C1.o67.fg
atggcgaccggacccgatctgaccccacccgccgccgccgcctccgccgaagcgccgtcggcgtcggcggccaagaaggaccgccacatcgtgagttggagcaccgaggaggatgatgtgcttcgtactcaaattgcgcttcatggaactgataagtatgaattcttcccacttcccatctcaattgactttttttttctagatttaatcaccatattttacactgtttttccttttcctttcggtagctggacaattatagcggcacaattcaaggacaagacggccagacagtgcaggagaagatggtacaattatttgaactcggagtgcaagaaaggagggtggtccagagaagaggacttgctattgtgtgagatttctgaattggcaaatatgcggtcggttacttcctcagtgagacaacaggccaggcatattgctatgcccatggaattgagcatgtacgctcaaaaagttcttgggaacaaatggactgaaatagcaaaggttgtctcaggcagaactgataatgcagtgaagaatcggttttctactctatgcaaaaggcgggccaaggatgacgagctattcaaggaaaatggatcattatgttccagtacaagttcaaagagggcattggtacaaactgggtgtctcacatctggtgcaagtggctctgcaccacctattaagcagatgaggccatgtaattctgatttcaaagagaatatgacaccaaatatgagattagttggacaagacaagagcacacaagattctcgacagcctcttgcaattgtttatcaaaacaatcaagataatatgaatacaatggatacccaaaatcttgttgctaaaactgcagcaaaacaattatttgcgggggaacagaattgcgttaagcatgagggtaattttttgaacaaggatgatccaaaaattgctactttattgcagcgagccgacttgctttgctccctagcaacgaaaataaatactgaaaatacaagccaaagcatggacgaagcctggcagcaactacagcatcatttggataagaaagatgataatgacatgtcagagagcagtatgtcgggaatggcttcactcctagaggatcttgacgatttaattgtagacccctatgagaatgaagaggaagaagaccaggatttaagggagcagaccgaacagattgatgtggagaacaagcaaaattcttcacaaactagcatggaagttacatcacaaatggttcctgacaataaaatggaggactgcccaaatgataagagcacagaagacaataatatggaaccgtgccctggtgaagacataccaacatctgaaaacttgactgaggctgctatcgaagatagcttgcttcaatgtgtggaatacagctctcctgtacacacagttattcaagctaaaacagatgcagaaatagcagcatcggagaatcttagcgaggttctcgaacataacaggcttcagtgtattcaattagcctcccctgctcagacaactaccccagttgaagcaaatgcagaaacaccagcttctgagaagttacgcgaggttgtcaaatgtaacaatccttcatgtatcgaattcacttcgcctgctcatacagtcccaacattcctgccgtacgcagatgacatgccgactccaaaatttactgctagtgagaggaattttttgctgtctgtgcttgagttgacctcgccagggtcgaggccagacacttctcagcagccttcttgcaaaagggctctccttaatagcctatga

SEQ ID NO: 12440 - DNA, 1731 bp, Oryza sativa
  Clone ID: TFbOSC401093j.C1.o58.gm
atgaagaagggaaaatggtccaaggaagaggacgatttgatcaaaaaccacatggagaagtatggcattggccgtagctggcaggcactgtctgatgctttagggctgcagaggtgtggccggagctgccgttcccggtggctgaactaccttcggccggggctgaagcacggcgacttctcgccggcggaggagaggatcatctgcaagatgtacagcaagaagggaagcagctggtcggccatcgccgcgcagctgccggggaggacggacctcgccgtcaagaactactggaacagcacgctcaagaagaggttcccggcggcggcggcggcgaggagcaccgccgccgcgcgccgcaggcaccgccccgccgccagcgccaccacatcgtccgacgacgacgacgacgtcgacgtcgacgacgcgaccccgcccggcctcgcgctggtcgtctacagcgaggggagcaccgccgccgcggcggcggccggcgagctcgctccgtactccatctcatccccggccgccactgccgacgcggcggaagaagaagagccgatcgcggccgttccgatcagcacctgcatcctggcactgccgccgccaccaccaccgccaccgccgccgccgagcgatgccaccggcggcgaggtgagcatcccctgcttccccttctcgccgctgccattcatcgagccggacttgccggagctgacctggacgaccgacctcgacgacattaccgccaccttcgatgccgccgcctgccgctacccgaagcggccgcatccaatcacaccggattcgcctcgccttccgaagcttcccgccattgccggcttcgacgacgtgcagagcttcttgtcttgcatatgcctacggtataatacgtcgccgtttctgcttgctcgtgccaccgcagcgcctcccgccgccgccgccgaccgatgcctcgccggtcgccgctgcctctactctactcctcctcctcctcccctttcaccgcttcattggcggtgctcgcggcgtgaccccgagctcggagctgacgtctcagcgctgctgctccgcggacggctcggcgcgcgccaactgttcgacgaattgccccaccgagtccggtggcgccgcggctaccttcgcgccgccttcgctgcctccgtctccaacctcaacgcgcgagacggccacaggggagcctcctccatcatcagccatgatcatgtggagcagctcaagagcttcttggcttctgttctcatcacacagccccctgagaagaatattgtaggagaagacattgaggcccttgagaagaggattaatggtgatggcttccactctaaatcccttcttgacgacattgcccaaggccgcgaaaccgaggtccaagcggcccgcacggcagcagcagccgatgaggatgccataggtgtgcacggtgggaggagttaccttgccggcgccggctcgggccatgcggttgaagcgggacacagcggccgcggggatgtagcgcgcgacgtcggcgagagcgagcgccgttcaagctgtacatcgaggcgccgctgccttgccggagcaattcgtcgaacacgtggcgtgcgtcctcggcgccaccgccacagactgcaccctccgagcgaggggtcgcgcccacggagcgagggccgccggcggagcgcgctcggctcgagtgggtacgcggcgtgccatggcgcagcctga

SEQ ID NO: 12441 - DNA, 924 bp, Oryza sativa
  Clone ID: TFbOSC400044j.C1.o38.fg
atggggcaccactcctgctgcaacaagcagaaggtcaggaggggcctgtggtcaccagaggaagacgagaagctcgtcaagtacatctccacgcacggccatggctgctggagctccgtccccaggctagccgggttgcagagatgtggcaagagctgcaggctgaggtggatcaactacctgaggcctgacctgaagaggggaagcttctcgcagcaggaggagtccctcatcattgagctccacagggtgctgggcaacaggtgggctcagattgccaagcacctacctggtagaacagacaatgaggtcaagaacttctggaactccaccatcaagaagaagctcatctcccaggccgtgggtagtctgcacccttcctctgcagatttgtactacaacattctggacggagcaggacagagcatcgcagctgcgtcactgaacgcggtggagaatgcagctcacggtgtcactcaatcgccgccgtcttccgtgtacaactccgcggcatgggccagcttcagctcccaccagccaatctttctccccggccacggcgtccacggctgcggcggcggcgaccttcagtacgccgccgccgtcgacggggagttcatcaggctgtgccgagcagcggaggcgtaccagctggagaacggcgccgctggcatcgtcgggggtcagtgcaagccaagtgatcatctcttggctccagagggcgtcgtggcccggagttgcctcccggcgtttgtcgaacagaagggcggcggcggcggcgctttcttggccgatccggccatgggtccggtgatggacttcatggacgccatcctggggtcgtcgacgacgtcggcggccagtgcttcatccgtcgacagcttctcggcgaacaccgccatgcaacctcactggattccctga

SEQ ID NO: 12442 - DNA, 5685 bp, Oryza sativa
  Clone ID: TFbOSC401228j.C1.o4.fg
atggacggggcgcacgggcagaggcagccgatgtctccggcgatctctgcttcggcggtgctcccgcagcagcggcagatgcagctccaccaccaccaccaccacccggcgcggtcgtccatcgccgatctcttcaccctatacctcggcatgaactcgaagcagcgggtcgaggatccaactagggagacctcgaacaagttgcagaagagagtaactgctatgaacagagatctgcctccccgagatgagcaattcatttcggattttgagcagttgcacatgcagttcccagaccaagagcagctgcaggcagttacggaatcagttctcatctcatttgtcctgcagtgtagtagccacgccccacaatctgagttcttgctctttgccacacgttgcctgtgtgctcgaggccaccttcgatgggacagtctccttccttctctacttaatgtagtttcctccgtggaggtaccaatggggcaaggggtttctgtgactactggtggcccggcaacatcttcttcatcagctattgcagtgccaaatgccccaagctttcacccttcaaatcccacatctccattgtcagcaatgaacactataggatctcccactcaatctggtatcgaccaacccataggtgcaaatgtctcacccattaagggagcagaattctctagccctggacagcttggtctgacagctagaggtgaccagtctcgcaggggagcagaaattagttatctgcatcacttatcctgtagaattattctagcagggctggagtctgatttgaagccagccacccatgctgtgatattccagcatatggtaaattggcttgttaattgggaccagcgaccgcatggtgtggaccaagctgatgcattgcaattgcaaaccttgaggcttgaaagacctttgcatgaatggatgcacctatgcttagatgtgatatggattctagttaatgaagataaatgtcgtgttccattctacgagcttgttcgcagcaacttgcagtttctcgaaaatattcctgacgatgaagcactagttagtattattatggagatccataggaggagggacatggatcttgcaaactccattcctaaagggggtttagactgggaacgtgctttgcgttgcttgaggcatgcactccgcacaactccgtcaccagactggtggaggcgtgttcttcttgttgctccttgttatagacaacatcctcaacaatcatcaacgccaggagctgttttctcacctgatatgatcggtgaggcagttgctgacaggacaattgaactactgaggctcacgaactcagagactcagtgctggcaagattggcttttatttgctgacatttttttctttctgatgaaaagtggctgtattgattttcttgatttcgtggacaagcttgcatctcgagtaacaaatagtgatcaacagattcttcgcagtaatcatgtcacttggttactcgcacagattatccgcattgagattgtgatgaacacccttagttcggacccaagaagagagcatttgaacagtgatcagcttcagaaaggcaaacagatagatgagtggtggagacaaatgacaaaagcttctggggagaggatgatagattttacgagcttggatgagcgggcgatgggcatgttttgggttctctccttcaccatggcacaaccagcatgtgaagcagtcatgaactggtttacatcagtaggagtagcagatttaattcagggacccaatttgcagccaaatgaaagaatgacaatgatgcgtgaaacttatccactgtctatgtcattgctttctgggttgtctatcaatctatgtttgaaacttgctttccagcttgaagagaccatatttcttggccagaatgttcctagcattgctatagtggaaacctatgttagactgctgcttataacccctcattcattgttccgcccgcattttacgacattaacacaaagatctccatctatcctgagcaaatctggtgtgtctctgctcctacttgagatactgaattacaggctacttcctctatacaggtatcatgggaaaagcaaggcattgatgtatgatgttacaaagataatatcaatgattaaagtcaaacgtggagagcatcgtctttttagattagcagaaaatttgtgcatgaatttgattctctcactaagagacttctttttggtgaaaaaagaattgaagggtccaactgagtttactgaaacacttaaccgcataacgataataagccttgctatcaccatgaagacacgtggaattgctgaggtcgaacatataattcatcttcaaccattattagagcaaattatggcaacgagccagcatacatggtcagagaagactctaagatattttcctccccttattcgagattttttaatggggaggatggataagagaggccaagctatccaagcatggcagcaggctgagacaactgttattaatcaatgtaatcagctactctcaccatctgctgagccaacctatgttatgacatatttaagtcacagtttccctcagcatcgtcaatatctttgtgctggtgcttggatgctgatgaacggacatctagagatcaacagtgcaaatcttgcccgtgttttgagagagttttcacccgaagaagttacagcaaatatttatacaatggttgatgttcttctgcatcatatccaacttgagctgcaaagagggcatcaaattcaggacttactctctaaagcaattacgaatcttgctttctttatctggacacatgagttacttccattggacattcttctgttagctcttattgatagagatgatgatccttatgctttacgccttgtgataaatctccttgaaagaccggaacttcagcaaagaattaaagcattctgcacttcgcgttctccagagcattggctaaaaaatcagcctccaaaaagagtagaacttcagaaagccctcggtaaccatctctcagggaaagaacgttacccccccttttttgatgacattgctgctcgtctgcttctagtcatcccgttgataatttataggcttattgagaacgatgccacagatatcgcagatagagtccttgcagtttattctacctttctggccttccatcctctaaggtttacatttgtgcgtgatattcttgcatatttctatggtcatcttccatccaagttaattgttaggatcctcaacgtgctgggtgttagcactaagacacctttctcagaatcatttgcccagtatctagcgtcatcaaattcatctatttgtccaccaccggaatacttcgccaaccttttgtttggccttgttaataatgtcatacctcctttgagttgcaagtccaaatcaaacccatcggatgctgctggcagtacagcacgcacaacttataacaagccttatacatcttccgctggaggaatcagtaactctgatggtcagagggcattttatcaaaatcaggatcctggatcatatacacagcttgttttggaaacagcagccattgaaattctctcactttgtgtgccagcttctcaaatagtatcctctctagttcaaataatagcacatgtacaagcaatgctcatacagtcaaatagtggtcatggaatgtcaggtggtttgggccaaaactctggggtgccgacttcttcaggtgggggagttgaacctgttggtgccaaccgaccaaacaccacagcaagtggaatcaatgcatctaactttgtttctagaagtggctattcctgccaacaattgtctgttctgatgattcaagcttgtggtctgttgctggcacaactcccaccagaattccacacacttctatatgcagaagcagcccggatcataaaagattgttggtggcttgctgatagttcaaggcctgttaaagagcttgattctgctgttgggtatgcactgttggatcctacttgggcttctcaagacaatacatctacagccataggtaacatcgttgcccttcttcactcgtttttcagcaatcttccacatgaatggcttgaatctacccataccgtcatcaagcatcttcggccagtcaactcagttgccatgttaagaattgctttccgcatattgggtcccttgttgcctcgtctagcctttgctcgacctctgttcatgaagaccttggctttgctgttcaatgtgttgggggatgtatttgggaagaattctcaggcttcacctcctgtggaggcatcggaaattgctgacataattgacttcttgcaccatgcagtcatgtatgagggtcaaggaggtcccgttcagagcactagcaagcccaaactagagatattgacgttatgtgggaaagaatgcgcggcaatcagtggagtgatgctattagacaagcagttggttgatggtcagagtcaggcctcgccatccatgttactacctccgcattcttgcactgcagactactgtagacagtactacatcgagggtgagcgagctgtgacacaactgctcaaggacgtggatcctctgcagactgcagtggtactgacactacgcagacaacgcccccgtcgagagctcagtccagattacacgtgtacgcgtaacagcattttggaggcctggagggccaggaggctcgcagccgatgtcagtgacggcctgacgccgtcacgcctacgactcgcctcggcctttccacttctggccgcatctattaatccccgagcagcgccggaacctctccaaattaagactcgggtgagctcatcaggctcagttcatccctctcgtgagatacagatagcctcgcaaatcagggatcagcgtgtgatgggcaggcagccgtgctgcgagaaggttggcctgaagaaggggccatggacggccgacgaggaccagaagctggtcaccttcctcctctccaatggccactgctgctggaggctcgtccccaagctcgcagggctgctcaggtgtgggaagagctgccggctgaggtggacgaactacctgcggcccgacctcaagaggggcctcctttccgaagaggaggagaagctggtcattgacctccacgagcagctcggcaacagatggtccaagattgcggcacggctccccgggaggacggacaacgagatcaagaaccactggaacacccacatcaagaagaagctcaagaagatgggccttgatcccgtcactcaccggccggtgatgtcactcgctcagcctgatcccctgaagcagcagcagcagcagcatgaaccgtccgtctccggcggcaccggtgccgacgacaaggaggaggaggaggaggagacgccgacgagcgcccagccacagggcgtcgcttgcgctgcttcatccgcctccgccgtgtcgtcgtcatgctcctcgtccgcctcggcctccgccgcgacacccggcgcggacgtggactggcccggcctcttcgaggtggatgccattcttgacattgactgggctggcttattgtctgcctgcggcgacgatggcggctgcagcgccattggcgtcgatatgttgttcgaccaatgctctgacgttggctttgatcaagatgtgtggatgtga

SEQ ID NO: 12443 - DNA, 639 bp, Oryza sativa
  Clone ID: TFbOSC404183j.C1.o3.fg
atgggtgacctcgtcggcgacggggccgcgccggcggcggcggagccagcaccggcagcggcagcttgtagatggacgaggcagaaggacaagttactggagacgctggtggcgcgatgcgccatgaaccggcagtgcgtgggcggctgggacgccatcgccgccgccttcggggacgacaggacggcggcgcaggtggagcagcggtacggggagatagccgcggaggtgagacgcgtcatggaggagccctgggatgcggaagaccctgcaattgcagcagcagccgccgccgtgccggcggcgccggtgaagcatgcagcggcggggccggggagcgatggcggcggcgaggaggggaaggtggtcgtggagaagaagtcagggatatggagtgaggaagagcaccggcagtgcctacgagggattgaagagatcgggcacggtcgttggacacagatatcgatagagtatgttccatcaaggacaccgatacaaattgccagccatacccagaagtattttctccggatggccaagcccaaggaggatcgcaagaggaagagcatacacgacaccccctatcatcttcatctgcctaatgctgctgatgctcacgctcaccaacaacaacaataa

SEQ ID NO: 12444 - DNA, 780 bp, Oryza sativa
  Clone ID: TFbOSC100215j.C1.o3.np
atcacattctttgtggaggctagaaattcccacattaatcggaaaaaaagaaaaaaaaagaaaatgagagtccaagtagaagtacaatctaagaatagctatctaaaaatagctgaaattcggaattaaaaataagcaatattgaaagaagtttctatataagaacctaatacgagattaattaaaatttgaaataaaaataaaataaaatctaaaattagaaaagaaaagaagagaaaaaaaagcgagaaaaaaaaaataaaaaaggagaaaataaaacttctatcgtaaagaaaacgtccgactcctccggtggaaaaaaaaaaggagagacgacggaaaaaaaatcgatacaaaaaataaaaaaaggagagaaaaatttataccgtaaaaaaaagtccgactctgactcctccggtggaaaaaaaaaagagagacgacggaaaaaaaatcaagaaaaaacaaagaaaggagaaaaagaaaacttctataaaaaaaaagaccgactgactcctaaaagaagtccgactcctccggtggaaaaaaaacagaaaaaaataagagaaaaagaacttctatgtaaaaaaagtccgactccataaaaaaagtccgactatctgtggagaaaaaaaaggcaagaaaaagtaaaaaaaaaaaaagagaaaaaaaaacttctaccgtataaaaaaaataaaaacgttcgattccttaaaaaaaagtacgactccctcgaaaaaggacttttttgtccgtaatcttctcttctacttctactatttt

SEQ ID NO: 12445 - DNA, 444 bp, Oryza sativa
  Clone ID: TFbOSC414560j.C1.o1.fg
atggggagactgaggccgccgtgctgcgacgagagcagcgtgaagaaggggccgtggacgcgggaggaggacgagaagctcgtcgcctacgtcgaccagcacggcggccatggcagctggaggtctctccccaagcgagccgggctcaacaggtgctgcaagagctgccgtctgcgatggattaactatctcaggcctgacatcaagagaggcaacttcactcctgaggaagaacaggccatcattaccctccactccgtcctcggcaataagtggtcgaccatcgcgacacgccttcctgggcgcacggacaacgagatcaagaactactggaacacgcgcctcaagaagaggctcatcggcgccggcatcgacccggccacgcaccgcgcgcggccgcggccgccggcgcctggggacctcgccaccgcgctcccgcagctg

SEQ ID NO: 12446 - DNA, 897 bp, Oryza sativa
  Clone ID: TFbOSC400524j.C1.o28.fg
atggggaggactccctgctgcgacagcaaggtgctcaagaaagggccgtggacgcccgacgaggacaagctcctcgtcgactacgtccaggccaacggctccggcaactggcgcctgctccccaagctcgccgggctgaaccggtgcggcaagagctgccggctgcggtggacgaactacctgcggccggacatcaagcgcgggcctttcaccccggaggagcacaagtccatcctccagctccacgccatcgtcggcaacaagtggtccatgatcgccgcgcagctgcctggtcggacggacaacgagatcaagaattactggaacaccaacgtcaagaagcagctccgccagggccaggcggccgccgtcggcgagcaggccgcgctggcgagcctcggcggcggcgcggccagctgccccgcggcgcgccacatggcgcagtgggagaccgcgcgcctcgaggcagaggcgcgcctctccctcctctccggcaccacctcggtcgcgaccgccagcgtcgctgcctcctcgtcctcgtcgtccacagccgcggccggcggcgccgaggcgccgccggacatctacctgcgcctctggaactccgaggtcggtgactcgttccgcaagtccgcgcgctcggcggcgcgcgaggatcaagagccggcgaacgcatcagacgaagcggcgccggtctcggcgacattcgcacgacccggcgacgactcctcggcggcgtccaacgtgaccgcggccgcggcggcggacgagtaccaggtgttcctggacctggcggccgaggacttcgagctgttccacggccgccacggcgggttcccgctgttcccggcggtggacatgctcggcgagacatccctctacaccgcgttcgactaa

SEQ ID NO: 12447 - DNA, 813 bp, Oryza sativa
  Clone ID: TFbOSC414118j.C1.o7.gm
atggggaggcctccttgttgtgatgagaatggcctcaagaagggcccctggactcctgaagaagatgagaagctcatgagctacattcagaaacatggccatgcaagctggagagtcttacctgaacttgctggcttgaacagatgtggtaagagctgcaggctaagatggaccaactatctgaaaccagacatcaagagagggaacttctcgcgtgaggaagagcaaactatcctccagctgcattccatccttggcaacaagtggtcagctattgcaaagcatctccctggacggacagataacgagatcaagaacttctggaacacccacctcaggaagaaactgatcaagatgggcattgatccaatgacccactgcccaagaacagacttctttcagtccctcccgcagctcattgcacttgccaacctccgccagattatcgagcgacaaccgtgggatggccacattgagggcctgcagactgtggcagttcaggctgccaagctcgaatacatgcaatcactgctacattctgcagtgtgccattgtgaccagccccaccaccaccaccaccaccagcagcttaaacaccttcaccaccgaactggagcagaccaaccacctatgccctccacaggtgccttcttcaacaacattgccctagtttcgggatggatcacattgaaacttgaggacggcgttatacctaccggcaactcaccggtgctcgaccacctcgccggcgaagcgctcgagggggctctcggcattcgggatttcgggtccaccacagcttcctccgcctga

SEQ ID NO: 12448 - DNA, 1107 bp, Oryza sativa
  Clone ID: TFbOSC414185j.C1.o2.fg
atggggcgggcgccgtgctgcgagaagagcgggctgaagaaggggccgtggacgcccgaggaggacgagaagctcatcgcctacatcaaggagcacggccagggcaactggcgcacgctccccaagaatgccgggctctcgaggtgcgggaagagctgccggctgcggtggacgaactaccttaggccggacatcaagcgtggtcgcttctccttcgaggaggaggaggccatcatccagctccacagcatcctcggcaacaagtggtcagcgatcgcggcgcggctgccgggccggacggacaacgagatcaagaactactggaacacgcacatccgcaagcgcctcctccgcatgggcatagaccccgtgacccacgcgccgcgtctcgacctcctcgatctcacctccctcctcaagcccgccgccgccgccgcgtactaccccacgcaggccgacctcgacacgctccgcgcgctcgagccgctcgccggctacccggacctgctccgcctcgcctccgccatcctccccgccgccacgacgaccggcgcagccgccgccgccgccgccgagcaggcgcagcttctcctgccgtggctgcttcaggcgcagatggcgcagcagcaacagcaggtgacgccgccgccgccgccgccgccgcaggccgcggcgaccgaacagttcttgcaggccaccagcaccgcctgccaccaaatgccaggcctggttcacgccagcccgacgcagcagctggcgcagcaaccgcaggatcacatggcggcggcgacctgccaccgccgcggcgccgtgcagcacccgagctacgacaaccagctcgactacgtgccggcgctgatgcagatggcgtccgacgcgtccaacctgcagcagtggagcagcacggtctcgagtagcaacaaccacaacgtcaactccggcgtgtccacgccgtcgtcgagcccagcagccgccggacagatcaactcatcctctacgacgacgacgacgacgtatggcttgaacgcgagcggtgacgtcgacgacgctgggctgctcatcaacatgcacctatccgagctcctcgacgtgagcgactacatgtaa

SEQ ID NO: 12449 - DNA, 228 bp, Oryza sativa
  Clone ID: TFbOSC421637j.C1.o1.fg
atggcgtcagagtggagcaaagaggagaacaagctgttcgagcaggccattgcctactacggcgagggcgcgcctgatctctggcacaaggtgtcccgcgccatggggggcaccaagacagccgacgaggtgcgcctccacttcgagatcctcgtggacgatatcaagctgattgaggcaaggcgagtcccgttccccaagtacaatacacagggagcatggaactga

SEQ ID NO: 12450 - DNA, 652 bp, Oryza sativa
  Clone ID: TFbOSC3910j.C1.o1.np
ctggcgggctcgcagggggagtcgccggcgatgctgcacccgaacggagacggagacggcgacggcggcgatgatgagggtgacgccagcggcggcgaagaggagcagggcggtgggattccgctgaagaaggggccgtggacgcccgacgaggacaagcggctgcgggagtacgtggaggcgcacggcgaggggaactggaaccgggtgcagaggaacgcggggctgaaccgctgcggcaagagctgccgcctccgctgggcgaaccacctcaagcccgacctcaagaaggggcccttcagcaaggaagaggaggagatgatcatcaagctccatttatggctggggaccaagtgggctaagatggcaaactctttgccaggccgcacagataatgaaatcaagaacttctggaacactagatgtaagagaattcagagaactggtgaacctctatatccgaaggagtttaatcattttaagttgacagatctggaagtgatgaactgtgaaagccctgatgaatcacgtgccaagaaacgaacaaatgaggttttacagggaaatggtcaaagttacaaagaggtttttttcgataatttcgccgctgacgggcgggcccgctccgccaccctcgctgacgggtggggcc

SEQ ID NO: 12451 - DNA, 563 bp, Oryza sativa
  Clone ID: TFbOSC400259j.C1.o20.np
cgtgggcgcgagaaacgagggggcgaggtagaaaccctggcgaaaggccttgccaaccaaggtgcgtgaggcggagtgggctccacactcgccttcatggacatcggcgagaagctcgacgcttttcaaaggagcatggacaaggcaagaagatgaagttctcaaacaaatggtgatactccatggagatcgtaagtgggcaacgattgcaaagagcctcccaggtcggatcgggaagcagtgtcgcgaaagatggaccaatcatttgcgcccagacatcaagaaggacgtctggactgaggaggacgacaggatgctgatcgaagcacacaagacttatgggaaccgttggtcagtaatcgcaagatgcctccctggccggtcggagaatgctgtcaagaaccattggaacgcgactaagcggagcctgaagtcgaagcgtcggatgaagaagaagagcacgaggcccatcatgtgcgatgcccagctcggccatatgctgcgagggggcatcggtcatcggtgcgcgccggctgagatgaccaagccgacgagctggcaac

SEQ ID NO: 12452 - DNA, 2115 bp, Oryza sativa
  Clone ID: TFbOSC418226j.C1.o7.fg
atggcgagagcacctggtggcgttcgccgaaggagcgggaggaggggcgcgggcggcggcggcgccggaggcggaggcgaggcgctgcggaagggcccgtggatggcggaggaggacgaggttctgctggagcacgtccgcacccacggccccatggactggagctccattcgatccaaaggcctcttgccgcgcaccggcaagtcctgccgcctccgctgggtgaacaagctcaggccaaacctcaagagcggttgcaagtttactgccgaggaagagagggtggtgatcgagttgcaggcgcagttcgggaacaagtgggcgaggatcgcgacctacttgcagggcaggacggacaacgacgtgaagaatttctggagcactcggcagaagcggctcgccaggctcctccgcgggcctctccctgctgcacggcccaacaagcacaacagcggcaagggcaaagcgccctcgtcatcttctctcgactcccaaacagccacgttccaccagagctcggcctccctggatcaagcttcattggagggcaactccctcggctggcaatgccgcgaggctgcaccgttcatgggatatgatcaggcatgctccgggttcttcgctttcgaggggccactgccgctgcagctactaccacccgccgacggcgaggcgagctcgtccaatgcagctcagtcggcgccaccaccgctgctgttcgaccagcctccgtaccctctgatcaacttccctggatggccggagagatacgtcgacgtcggccacgggttcgtggacgccggcgccatggatggcctcgcctaccaggagctgcttccgatggtgcagtcggttccgatgatcatgccgttctttggcatggagagtaacaacaccaagtactatgaggttcttggagttcctaaaactgcaagcaaggatgagctaaagaaggcataccggaaggctgccataaaaaaccatcctgacaagggaggggatccagaaaagtttaaagaattatcacaagcgtatgaggttctcactgatcctgagaagagagacatatatgaccaatatggggaggatgctcttaaggatggaatgggaggaggcagtgacttccataatccatttgacatatttgagcagtttttcgggggtggtgcctttggggggagtagctcaagagtacgcagacagagacgtggtgaagatgtggcgcatactttgaaggtgtctttagaagatgtgtataatggatctatgaagaaactatcattatcacgaaatattctgtgcccaaagtgcaaaggaaaagggaccaaatctgaggctccagcaacatgctatggttgtcatggtgtaggaatgaggaatataatgcgacagataggactaggcatgattcaacatatgcagactgtctgtcctgaatgcagaggatcaggtgagatcataagtgacagggataaatgcacaaactgcagagctagcaaagttattcaggagaaaaaggtgcttgaggttcatattgagaagggaatgcaacatggccaaaaaattgtattccaaggtgaagctgatgaagctcctgatacagtgacaggagatatagtatttatcttgcaagttaaggtacatccaagatttaagaggaaatatgatgacctgttcattgagcgcacaatctctttaactgaggcattgtgtgggttccaattcatcctcactcatctggacagtaggcagctcctaatcaaggcaaatcctggcgaaattattaaacctggtcaacacaaggccataaatgatgagggaatgccacaccatggccggcctttcatgaagggccgtctctttgtggaattcaatgttgagttccctgaatctggtgtactctcccgtgaccaatgccgggcacttgagatgatcctaccacctaaacctgggcaccaattatcagatatggacctggatcaatgtgaggaaactaccatgcatgatgtgaacatagaagaggagatgaggcgcaagcagtatcaaaggaagcaggaagcgtacgacgaagatgaggaggaggatgctccaagagtacagtgtgctcaacagtaa

SEQ ID NO: 12453 - DNA, 750 bp, Oryza sativa
  Clone ID: TFbOSC413566j.C1.o15.fg
atgcagtatacggtggaagggagcggcggcggcggcgtgcagacggtggaggcggcggtgcgcaaggggccctggacgatggaggaggacctcagcctcgtcaactacatcgccgccaacggcgagggcgcgtggaacaccctcgcccgcgccgccgggcttaaccgtaccgggaagagctgccggctgcggtggctgaactacctgcgacccgacgtgcggcgcggcaacatcacgccggaggagcacacgctcatcgtcgagctacaggccagatggggcaacaggtggtccaagattgcaaggtaccttcctggccggaccgacaacgaggtcaagaacttctggaggaccaagatacagaagaagcacaggaaaagcactgacggaatttacgcgacgacgacgagcgaaagcatcatgcctgcggctacagtgcaccagaacacggtggccgaggaccaaggcagcagcagcgtctccggccggaccaccaccgccaccgtcgccgtcacgcaggagtacgccactgaggcgccgccgccgagcggcatgagtagtggtagctacttggaccagctgcagccaggctacgcgagctcaatccatggaggacaagatggcggtgctgctgccgccgccgctggtgacgtcgtcgtctccgacgagttcttggcagcgtcgagcgacaacttctgggccctcgaggatttgtggcccacggtgcagtctctccacggcaattgctga

SEQ ID NO: 12454 - DNA, 1074 bp, Oryza sativa
  Clone ID: TFbOSC401058j.C1.o76.fg
atgggaagagagtcggcggcggcgtgctcgccgaagccgaagctgaggagggggctgtggtcgccggaggaggacgagaagctgttcaaccacatcagccgctatggcgtcggctgctggagctccgtcccaaagctcgccggattggagaggtgtggcaagagttgcaggctgagatggatcaactacctgaggcctgatctcaagagaggcagcttctcccagcaggaggaggagctcatcatcagcctccataaaatccttggcaacaggtggtcccagattgcggcgcagctgcccggccggacggacaacgagatcaagaacttctggaactcgtgcctcaagaagaagctccggcagcgcggcatcgatccggccacccacaagccgctcaacgacggcggcgccggcgccggagaagagcaccacgacgacggcgacaagcagcagctaatggacgacgtcgacgactgcttcgccatcggcggcggcgggagcagcgactccctggcgccgccgcactcgccggccgtcagcttcgacccgctgtccgtgaccaacgtgccgacgacgatgatgcagtcgtcgtcgtctccctacggcgccgccggcggcgagcactcgtcgttccggtcggacaccctctgcgactacggcgggagcggcggcggcgtcgacgtcgtgtccgacgccggcacgtacagcgcctacaccggcgacagctccagcaacagcaacagcacggcgtggacatgcggcagcgtcgtcgtcggcggcgcgggcgagctgccgccgccgccgctgctgccgcacatggacatgttcggccgggtcgacgccgagccgccgccgtacccgccgttcgacgtccaggccaggttcagcccctggcaccaccaccaccaccaccaccacgagccgacgctgccgacgccgccgcaaaggctggacggcggcggcggcgccgcggcgagcttcccgatccggtcgctgtcgcgggacatgccggagtcctgcttcgacctcggccgcggcgcgctcgacgacgagttcggcgtcgacttcctctga

SEQ ID NO: 12455 - DNA, 1023 bp, Oryza sativa
  Clone ID: TFbOSC408625j.C1.o2.fg
atggggaggggacgagcgccgtgctgcgccaaggtggggctgaacaggggttcgtggacgccgcaggaggacatgcggctcatcgcctacatccagaagcacggccacgccaactggcgagccctccccaagcaggccggattgctgcggtgcggcaagagctgccgcctccggtggatcaactacctgcgccccgacctgaagcgcggcaacttcaccgccgacgaggaggacaccatcatcaagctgcacggcctactcgggaacaagtggtccaagatcgcgtcgtgcctgcccgggaggacggacaacgagatcaagaacgtgtggaacacccacctgaagaagagggtgtcgcagagagagaagccaggtgacaccaagaagaagggcaaggccgcggacgccagcgacgacgccgacgcgcattccccgtcgtcgtcggcgtcctcctcgacgacgacggcggccaataacaacaacagcggcgacacggccggcgagcagtgcggcacgagcaaggagcccgagaacgtcgacgtgtccttcttcgagcaagacatcgacatctcggacatgctggtggacgcgcccacggaggcgccgctggtcgcggcgccaatgccgccgtccccgtgctcgtcgtcctccctgacgacgacgacgtgcgtcggcgccgtgtcggacgagctgctcgacctgccggagatcgacatcgagccggatatatggagcatcatcgacggctacggcggcgatgagcccggcgacggcgatgcaacagtgccatgtaccgccagcccgggagaggagggagcagagtggtgggtagagaatttggagaaggagctcggcctgtgggggcccatggacgagtccctggcccatccggacccacccggacaggtttgttacccgggcccactcacggaaacagagggggacccagtctccacctacttccagtccgggcccaccgcctctccgctccaggagatcgcatcacccgccgttctctcatga

SEQ ID NO: 12456 - DNA, 1230 bp, Oryza sativa
  Clone ID: TFbOSC401044j.C1.o2.fg
atgaggaagccggattgcggcggcgggggaggggcggcgaagggcggcggcgttctgggtgtggcgggagggaacaatgcggcggtggtgggggggaaggttcggaaggggctgtggtcgccggaggaggacgagaagctggtggcgtacatgctgcggagcgggcaggggtcgtggagcgacgtggcgaggaacgccgggctgcagcgctgcggcaagagctgccgcctccggtggatcaactacctccgccccgacctcaagcgcggcgccttctcgccgcaggaggaggacctcatcgtcaacctccacgccatcctcggcaacaggtggtctcagatcgctgcccggctaccggggcgcaccgacaacgagatcaagaacttctggaactccaccatcaagaagcgcctcaagatctcctcctcctcggcgtctccggccaccaccaccgactgcgcctccccgccggagcacaagctcggcgccgtcgtcgacctcgccggcggcggcggcgccacggacgacgtcgttgtcgggacagctaatgctgccatgaagagcatgtgggtggattcctcgtcgtcgtcgtcgtcgtcttcctcgtcgatgcagagccggccgtcgataatggcggcggcggcggcggggaggagctacggcggcctcctcccactccccgaccaggtctgcggcgtcgacacctcgccgccaccgccgttcttccacgaccactccatctccatcaagcaagcatactacggatcaaccggcgcccaccaccaccaccacgcgatcgccaccatggacggatcaagcttaataggagatcatcaccatcacagcagcagcatcctctttggcggcgcatcagtgccacctctcctagaccaccaaaccattctcgacgacgacgacgaccaccctaacaaaaccggcagcaacacgaccgcggccacactgagcagcaacatcacagacaacagcaacagcaacaagaacaacagtgataataacaacaacatcagcagcagctgctgcattagcctaatgaacagcagcagcaacatgatctattgggagggtcaccaccaacaacagcagcagcagcatcagatgctgcagcagcagcagcagcacatgagcaggaatgtcatgggagagtgggacttggaggagctgatgaaagatgtgtcatccttgcctttccttgatttccaagttgaatga

SEQ ID NO: 12457 - DNA, 329 bp, Oryza sativa
  Clone ID: TFbOSC21831j.C1.o2.np
aagacaaggaagaaggggtcgtggagggcggaagaggacgcgctgctgacgaggctggtggcgcagcatggcccccaccggtggagcatcatcagcggcgccatcccggggcgctccggcaagtcgtgccggctgcggtggtgcaaccagctgagcccggccgtgcagcaccgccccttcaccccgcaagaggatgccctcctcgccgccgcccatgcccgccacgggaacaagtgggccaccatcgcccgcctcctccccggccgcaccgacaactccgtcaagaaccactggaactccaacctccggagaagctgcagcaatttctc

SEQ ID NO: 12458 - DNA, 729 bp, Oryza sativa
  Clone ID: TFbOSC7037j.C1.o6.fg
atggcgttggagggagccgcgggcggcggcggcgtcggcggcggtggcggaccaccggggcaggaggcggggaagaaggtggggtggagcaaggaggaggacaagctgctgcgggagctggtgcggaagcaaggcgggaaggactggggcgtcatcgccaccgcgttccccggccgcaccgacaagtcgtgccgcctccggtggaggcagcacctggaccccagcgtcgacgtcgcgctgcccttctccgccggcgaggacaggaagatcgtggagctgcaccgcgtccacggcaaccgctgggccaccatcgcggccttcctccccggccgcagcgacaacgccatcaagaaccgctggaacacccacctccgcaagcgccacgcccaggacgtgcagcagcgcccgtcaggtggcctcgccctcggcctcggcggcggtggcggcgctgggcaggctgcgggcgggaaactgacgccggtgtgcctccaattgttccctccgacgcaggcaccgccgatcggggagaacttaccggggccggcaagaagcgctgtgccggagctcctcaagctcttccccctggctcccggtgatctcaaggacaatgcgagcgcggcggcggcgatggatgtgggtaacgaggccgtccgcgcgctccccgagttgaggctttccccggcggcggtggtgttcgacgcaatgccgctgcaggctatccggatgtag

SEQ ID NO: 12459 - DNA, 741 bp, Oryza sativa
  Clone ID: TFbOSC421348j.C1.o3.fg
atggcggcaatggcggcggcggcggcggggacgaagaagaaggcgaggaagccgtacacgatcacgaggccgcgggagaggtggtccgccgaggagcacgagcgcttccttgacgccctgattctgttcggccgtgactggaagaggatcgaagcgttcgtcgccaccaagacggccatccagattcgcagccatgcccagaagcattttctgaaggcccgcaagttcggcctcgccggtgggctcccgccgccgcttcaccctcgccgtgccacgctgctccgggccaacgccgcggcggcggacatgatgccgcccccgtggctgccatcggccggcggcggctccatcggttgctcggcgccaccgtccggcgtgcagcagagcatggccggcaggtcgccggcgtgctactcaactgatgaagcttctttccggccattgattcatagcaatgacaatgactgttcattcatcgagacaccaagctgcatcggatcaggtggcgaatcatggatcggtgatgatgccttcttcatgcaggatgaaacaattcggctcccaatttctccagatgacctgggattcgctcaggtgtacaagttcgtcggcgacatgttcggctccggcgagcggcggccggtggaggctcacctgcggaggctgcagggcatggaccctgccatctcggagacgatcttgctggtgcttaagaatctcgaagctaatctatctgcttaa

SEQ ID NO: 12460 - DNA, 1119 bp, Oryza sativa
  Clone ID: TFbOSC1073j.C1.o10.gm
atgggccggccgccgtgctgcgacaaggaggggatcaagaaggggccatggacgcccgaggaggacatcatcctcgtctcctacatccaagaacacggccccggcaactggagatcggttcccatcaacactgggctgatgaggtgcagcaagagctgcaggctgcggtggacgaactacctgcggccggggataaagcgcggcaacttcacggcgcacgaggaggggatcatcgtccacctccagtcgcttctcggcaaccgctgggccgccatcgcctcctacctcccccagcgcaccgacaacgacatcaagaactactggaacacccacctcaagaagaagctcgccgccgccgccaactccacttcatcctccaaccgccaccccatcttcgccgacgccaccttcccctccgccgccggcggtagctacacggtgagcagcaactccgatgtcacccagatggcagccattgctaggcgctcccccttcgccgactgcccatcctcctcatacgcctccagcatggacaacatctccaagctgctcgacggcttcatgaagaccaactccccgtcgccgccgccgccaccgctgcagcactatgacagcggctattacgacgacgtcaagcccgccgtcgatgtcggcggcaaccccttgctgtcgtccttcgactgcatgtccggcgccgacctggactgctgcttcgacgttcatcagcagcaccagcagcagcagccggcgtcgttcatggagtacggcggctatggcggcggctacggcgacgagagcaagcagcagctgatgaaccaggcagcgccgccgctgtcatcgatcgagaagtggctgttcgacgaggcggcggcggagcaggtcgccgacctcatggacctctccgacgcaatgttagatggtaattggactactctcataatgtataaagttcactttagaggtttaattaagactcacgtttatgtctgcattgtggctgccctaaggaagtgccagaagccccagatcaggcaggctttggaccagcggggtgaggccgaccaggttacatttttcctggcccaaccacatccaaccatgctggcattgctgccatag

SEQ ID NO: 12461 - DNA, 897 bp, Oryza sativa
  Clone ID: TFbOSC400505j.C1.o28.fg
atggcgcgagaggtgagcagcgaggaggaggctggcggcggcgacgagctccggcgagggccgtggacggtggaggaggacctgctcctcgtcaactacatcgccgcccatggcgagggccgctggaacgcgctcgcgcgctgcgccgggctgaagcggacggggaagagctgccggctgcggtggctgaactacctgaggccggacgtgaggagggggaacatgacggcggaggagcagctgctgatactggagctccatgggcggtgggggaatcggtggagcaagatcgcgcagcatctccccggccgcaccgacaacgagatcaagaactactggcgcacccgcgtccagaagcacgccaagcacctcaactgcgacgtcaactcccagcagttcaaggacctcatgcgctacctctggatgccccgcctcctcgaacgcatccaccgctcctcccaatcccaatcccacgacgccgacgacgccgacctctccgtctccgccgccaccagctgcatcacctccgacctcgtcgtcgacgcgcatcacccgccgctcgccatggccgacagcaacgactctgcagccatgtggcagcaacatcaagcaccacagatgagcgtcgccggcgcgccgccgccgacgacgacgatggcccaacatgtagtactgccgaccgcggcggcgtcgtgccaccagatgcaggatcagttcgtctgcgcgcgcgcggcggagacgacgacgtgctgctggtccgagtcggagtcgctgccgggtctcgcggggctgtactacgacgacgcggcggcggcgctgccggagtttgacgtggagaccatggccatgtggggccctgaggacgacccatggtacacgcaaatgcttggcttgtga

SEQ ID NO: 12462 - DNA, 927 bp, Oryza sativa
  Clone ID: TFbOSC400651j.C1.o15.fg
atgggacggccgccgtgctgcgacaaggaggggatcaagaaggggccatggacgcccgaggaggacatcatcctcgtctcctacatccaagaacacggccccggcaactggagatcggttcccatcaacacagggctgatgaggtgcagcaagagctgcaggctgcggtggacgaactacctgcggccggggataaagcgcggcaacttcacggcgcacgaggaggggatcatcgtccacctccagtcgctgctcggcaaccgctgggccgccatcgcctcctacctcccccagcgcaccgacaacgacatcaagaactactggaacacccacctcaagaagaagctcgccgccgccgccaactccacttcagcagcctccaaccgccaccccatcttcgccgacgccaccttcccctccgccgccggcagccacacggtgagcagcaactccgatgtcaaccagatggcagccattgctaggcgctcccccttcgccgactgcccatcctcctcctacgcctccagcatggacaacatctccaagctgctcgacggcttcatgaagaccaactcgccgtcgccgccgccgccgccgctgcagcactatgacggcggctattacgacgacgtcaagcccgccgtcgatgtcgtcggcaaccccttgctgtcgtccttcgactgcatgtccggcgccgacctggactgctgcttcgacgttcatcagcagcagccggcgtcgtcgttcatggagtacggcggctatggcggcggctacggcgacgagagcaagcagcagctgatgaaccaggcggcggcgccgctgtcttcgattgagaagtggctgttcgacgaggcggcggcggagcaggttgccgacctcatggacctctccgatggttgctgctccgtcccaatgatgttttaa

SEQ ID NO: 12463 - DNA, 801 bp, Oryza sativa
  Clone ID: TFbOSC414191j.C1.o1.fg
atggggaggtcgccgtgctgcgagaaggcgcacacgaacaagggcgcgtggaccaaggaggaggaccagcgcctcatcgcccacatcaaccagcacggcgagggctgctggaggtcgctccccaaggccgccgggttgctgcgttgcgggaagagctgccgcctccggtggatcaactacctccgccccgacctcaagcgcggcaacttcaccgacgaggaagacgagctcatcatcaagctccacgagctcctcggcaacaagtggtcgctgatcgccgggaggctgccggggaggacggacaacgagatcaagaactactggaacacccacatcaagcgcaagctcctcgcccgcggcctcgacccgctcacgcaccgcccgctcaatgccgccgccgccgtcgccggccaccaccacctcgccgccggcggctccagctgctcgcccgacgcaacaagcggccacagcagctgcagcgacggcgacgagtaccgcggcggcatcgacctcaacctgtccataagcccgccgtcgtcgtcgtcccagccgtcttccccgccgccgccgccgcacgaagcagaggcgagacgcgccggagcgacggcgagctacacctaccaccaccactactcggagacgagggagaagatatgcctgtgcttgaaccacctcgggctgcacggcggcgacgagtgcagctgcggcggctcgtcggcctcttcctcctcctcgccgccgccggcgacggcgagctcgcgagcgttcacattcgccaatgcatcgtcgtcaacagtgtaa

SEQ ID NO: 12464 - DNA, 1446 bp, Oryza sativa
  Clone ID: TFbOSC100839j.C1.o7.fg
atggcaaccgacgaaaacggtgccgacgatcgcgccggcggcgagagcaccgtggatcatctcaggagccatatgaactacggcgacatggatttgtcaggggaagagcacgtgccaaaggcgcgaaagccgtacacgatcacgaagcagcgcgagaagtggacggacgaggagcacaggctgttcttggaagccctgcagctgcacggccgcgcatggcgccgtatacaagagcacataggtaccaagactgccgtgcaaatccgtagccacgcgcagaagttcttctctaaggtcgtcagagaatcttcggggagtaacaccggctcgggcggcgcgtccgccgcggcggcggcggcggccatccagatccctccgccgcggccgaagaggaagccggcgcacccgtacccgcgcaaggtggacggcgcggccaagaagcacgtcccggcgctcaggcagctggagaagccgccgttgtggatgcagtccctgtccgagcaggaggagggctcgccgacgtcggtgctgacggcggcgcagataggcaccgaggccctgggcggtgggttctcgaataactcgagcggcagcgggtcgctggctccgtcagccgccggtacggatgagcatgtcgacggtggcggctcgccggcgtcgtcggtggacagagaggacgggtgcctctcaccgagcatcccgactgctgagttggctatgcaggcgccaaatactaagatgtcaattgcaaccacggatgccaaagaagcatcctcagaagcatcagtcttcaggctattcggaaagagcgtagtggttaaggattcagaccagctgcacctgcttaatggcagtaacattgcaacgagtggttcagttgagagagcaaccagaaacatactagtaccttcttttgctgctgccccagaagggagctcgtcgaatccatggccgagcagcatgcaacagtttctctacttccttcctcgatcggatggtttcgccgcgcaacctgtcatgccatggttgagctacaacgggagccttccatgcgcgctgttctacccggcggcggcggcggctgcgaaccagcagtgccaccgtgattcagagggcgtagagttcagagtctcgcagagggaaggatcgctgacgggctcgaacacggcctccagcgtcgtgcttggatcgtcggcggcggtaccggcggcggcggcggcggctcagaattcggacgtcgcggagtcccgtggccaagggaacagcagggaggcggcggcctcgccacggctgaccaagtgcgagagctcggcgtccgtcaccctgctgcagaggggcttcatgccgtacaagaggtgcgcggcggagagcgagctgctgcgatcggaggccgccggaggagaggaggccgtcgccgacggtgagctgacaaggctgtgcttgtga

SEQ ID NO: 12465 - DNA, 660 bp, Oryza sativa
  Clone ID: TFbOSC400726j.C1.o24.fg
atggggttgctccgctgccgaaagagctgctgcctccactggatgaactacctcagccccgacctcaagtgcagcaacttcaccgacgacgacgacgagctcaccatcaacctccacgcccttctcggcaacaagtggaacacgcacatcaagcgcaagctcatgagccagggcatcgatccgcagacgcatcagccggtaacaaacacctttggcaatgtggtgttcgcaggattggcctatctcacttcctatctcaaagcgaagaagcacaattcctgcatattctctaaaaacatcctgttagaagctcttcttgctagtttattctgcttgactgcttcaaaaatgccaaaaggggtaggagctctaactattgcattgaaggagggagctgtttttgctgcttgtgcaggacaaattctccaggctttccctttttggtggaaatggaattcaatgtgtcacaggaaggctgaaattgtaaggtcaatacttgctatcattgttgttatttatcagcctatccagtcaagcaaccgtgcacttgctgacctcccgagccttcttcagaaatctccttcaccatctgtagcgtttgttaattttttcctggctaaaaaggttgtgaagcacacctcccaacatgacatcaactag

SEQ ID NO: 12466 - DNA, 1782 bp, Oryza sativa
  Clone ID: TFbOSC401760j.C1.o2.fg
atgccggcggtgaaggtggaggaggaggaggaggagcggaatccggtggcgtcgagcccttcggtctcggaggggagcgcgcacgccgccgcgctggcgtcgcccaccgcggcggattccatcttcggtcgcaggcgaaaaagtggcccggtaaggagagctaagggtggctggacaccagaagaggatgaaaaattgcggaaggcagttgatatttataatggcaaaaactggaagaagatagccgaatctttctctgataggacagaagtacaatgtctgcatagatggcagaaagttcttgatcctgaacttataaaaggtccatggacccaagaggaagatgatgtcatcatcaatatggtaaagaagcatggaccaaaaaaatggtctgttatagcaaggtcactaaatggtcgaattggtaaacaatgccgagagaggtggcataatcatttggacccacaaataaggaaagaagcttggactgttgaagaggagcgtgtgcttgcccgtgctcattgtatgtatgggaataaatgggcagaaattgctaaacttcttcctggaaggacagacaattctataaaaaaccattggaacagttcattaagaaaaaaaatagatgactacaataccagagatattctgccagttcatccaccagttgttggtgatggtttgaaacagttaccaaagcggccacctgctgacaaccattttgacttaaacaaagagccaattatctgttcaagagaccgcttaggagtagttcattctgaccctacctctcatcaacgggcatccaatttgaaagactttaagggctgtgcagattacctctcacttggtcagccagtaacttcatgtgaggcttctgcagctgatgattctgcttttgatctagcaacacagggaatgagaatggattctgttcatgacaagggtactgggaacaattttgtttgtgggaaggttcagggaatcaattttcttggtgacaagggacttaaaattaatcagatatcagataaaatgggctgttcaagacaagctaagagagaaggtgaagcagccattaatggcggcggatcatccttgcagagtgaggctcactctgttggttctctttgttatcagatacctaagatggaagacattgctcctgcccaatccccagtgtttacagcaaattatgtaccggaacactctaggaacgtaatgcactcacccaatggctatactactccacccactcatggaaaaggatcagatcagcttagtgttgaatccatattgagaagtgctgctgaaaaattccatggtactccctcaatactaagaagaagaaaaagagataaaccgacgcctgctgaagataatgatttgaagattggcagattaagcagtgatgacttccacactcccataggaaagtgtactacagatagcccacagtcattcaaaactgcagcacttttgtccttgggtcctatggatgagcaagggagtcttgatgtttcccctccatatcgactaaggtcaaaaagattggctgtcctgaaaactgttcaaaatcatctggatttttcatctgatgaaatgagcatttgtgatactacaatgaaatctgcctgcgggaattctgattgtgctaatgccagtagtggtgtttcaagcattcaagggaagaaactggatgagcatatgattggattggaaactttaaccatgaactttgcgcatacgacaaagttggatgctacccaacctaatttgtag

SEQ ID NO: 12467 - DNA, 804 bp, Oryza sativa
  Clone ID: TFbOSC900293j.C1.o1.fg
atggggaggcagccgtgctgcgacaaggtggggctgaagaaggggccgtggacggcggaggaggaccagaagctcgtcgccttcctcctcacccacggccactgctgctggcgcgtcgtccccaagctcgcagggttgctgaggtgcgggaagagctgcaggctgaggtggaccaactacctgaggcccgacctcaagaggggcctcctctccgacgacgaggagcggctcgtcatcgacctgcacgcgcagctcggcaacaggtggtccaagatcgcggcgcggctccccgggaggacggacaacgagatcaagaaccactggaacacacacatcaagaagaagctccgcaagatgggcatcgaccccgtcacccaccagccgctggagccgcctcgtcctccgccgcgcgagcaggatgccacgccgccgccgccgccgccgccgcctcaggagatcgaggagagcgaggaggaggagcaggagccttcgccgttgatcgagccgcacgagatcaccgcgccaccgccggcggccgcggccgaggccgccacgagcaactgctctgtttcccctgcttcggtgctctccccgtcctgctcctcgtcggcgtcggctgcctcggcggtggacgtggcggagtggccggagcccatgtacatgttcggcatggatggcatcatggacgtcggctggaacggcctcatctccggcgccggcgtggacgtcgacgtcgacgtcgacccgttcgaccattactaccacgacgccagcttcgacgatcaagacgtctggatcatctga

SEQ ID NO: 12468 - DNA, 870 bp, Oryza sativa
  Clone ID: TFbOSC401237j.C1.o40.fg
atggaagggcagcagttcgcttggggaagggaggagggagggtggaggaaagggccatggacagcgcaggaagacaagctgctggttgagtacgtgaggcagcacggcgaagggaggtggaattctgtcgccaagatcacaggtctgaagagaagtggcaagagctgcaggcttcgttgggtgaactacctgagacctgacctcaagcgaggcaagatcacgccacaggaggagagcgtcatactcgagcttcatgccttgtggggaaacaggtggtcgacgatcgcgcgtagcctgcctggcaggacggacaacgagatcaagaactactggaggacgcacttcaagaagggcaagccgtccaagaacatcgagcgcgcgagggctcggttcctgaagcagcgccgcgagatgcagcagcagagccagctgatgcaaaccggccagcagcagcagctcggccaagacgacgacgccaccagcgcggtggtggacgacaaccttgcggaggtcgcgccaccagccgccacctcgctgacccacgacggcgagctccagataatgcaggagatggcgccggacatggacgacctgctgtactaccacccgggagacatgtcgccctattcctacgacgacctcctcggcagcggcggcggcgagtgcggcgccgtggcggccagcgctggcgctgccgcctcgacgagcgagggctcaagcgaggagctcgacggcggcgccgccacgtggggcagcctgtggaacctcgacgacgtggtgcacgacatgatgatcgactgcgccgccggcgccggctgctgctggggtagcttccctccgctacaggataaaggcctcgctttctactag

SEQ ID NO: 12469 - DNA, 207 bp, Oryza sativa
  Clone ID: TFbOSC33250j.C1.o1.gm
ctgcaggcttaggtggttcaaccagctcgacccaagaatcaaccggagccccttcaccgaggaggaggaggagctcctcctcgcgtcgcaccgcgcccacggcaaccggtgggcggtgatcgcgaggctcttcccgggccgcacggacaacgccgtcaagaaccactggcatgtgatcatggcgcggcggtgcagggagcggatggg

SEQ ID NO: 12470 - DNA, 1191 bp, Oryza sativa
  Clone ID: TFbOSC400225j.C1.o51.gm
atggggaggtcgccgtgctgcgacaaggcgagcgtgaagcgggggccgtggtcggaggaggaggacgccatactcaggagcttcgtcgagaggttcggcaatgccggcaactggatcgcgctgccccacaaagcagggcttaaacggtgcggcaagagctgccgcctccggtggctcaactacctccgcccggcgatccggcacggcggcttcaccgacgaggaggacaacctcatcctgtcgctctacggcgaaatgggaagcaagtggtcggtgatcgcgtccaagctccccggccggacggacaacgacgtcaagaactactggaacaccaagctcaagaagaggtacttggccgcggccgcaacagaagcaaccactcctcctcctcctgccgccggcgacgatgacaacaacccaacgacacaagcctccagccaacccgctcctcctactcctccggcgcccctcgtcaacctcgacgcggccggcctcgacggcgccgtgggcgacaacgacgagctcctgctgcacaagtcggagcagctgtacgccgagctgatgggcctcatcgagcagcagcagtactccacgatcaccgccgccgccgtcgacgcggcgacgacgacgacgtcgtggtcgtcgccgtcgacgggaacgacaagtccgaccgctagcagcagtactgacggcagcagcagcagcagcaacctgccgtggccggccgtggacgtgcacgacagtacgatgatgccgccgttgtcggagtccagcggcagcagcagcggcttgttcttcggctctcacgcgttcggtagtggctcgttccaagacctgctcggctctgcagcttccttcgacgatgtcatgctgtcgcaagagatgcttgataatttcaaaaatggcgcaacgcctggcggagatggtgatctctccccgacggacgcctgcctcacggtgatggagctggtgaacatgatctccgtccttatggcgctcaccgctgccatccgccttgacgtcccagccaagctctgggctagaggtgccaatgccccgttccccacgggacaccctaacccctttgtcctcgagcgcctcctccgcctgctcacctcctgcagtgtcttctgcgagcacaagggctccccgcgccacttcgcgctcaccaccggcgatgatgaatcctag

SEQ ID NO: 12471 - DNA, 511 bp, Oryza sativa
  Clone ID: TFbOSC3478j.C1.o1.fg
cggaaaaggattcatccgatttggcaatcaacaaaggcccgtcgctggatcttgtcaaatctcccttgatgatgaatgatgcatctgcaactgtaactgcaatgcagcccaacgaggggatggaggagttccctgtcaaggttcggaagccttacacgatcaccaagcagcgggagaagtggacggaagaagagcacgacaagttccttgaggcattgaagctgtatggtcgctcttggcgtcagatacaagagcacattggcacaaagactgctgtccaaattcggagccatgcccagaagtttttctcaaaggtggtgcgtgagcccggttccaataatgcgattgagatccctccacctaggccaaagagaaaaccacttcatccgtaccctcgaaagtgtgcgaattctggatcggacgcaaatccagcaacagcgcaattgaagcttgcatgcctgcaggtcgactctagaggatccccgggtaccgagctcgaattcgccctata

SEQ ID NO: 12472 - DNA, 1317 bp, Oryza sativa
  Clone ID: TFbOSC900059j.C1.o19.fg
atggcttccatgccgcagctggaggaaaaggattcatccgatttggcaatcaacaaaggcccgtcgctggatcttgtcaaatctcccttgatgatgaatgatgcatctgcaactgtaactgcaatgcagcccaacgaggggatggaggagttccctgtcaaggttcggaagccttacacgatcaccaagcagcgggagaagtggacggaagaagagcacgacaagttccttgaggcattgaagctgtatggtcgctcttggcgtcagatacaagagcacattggcacaaagactgctgtccaaattcggagccatgcccagaagtttttctcaaaggtggtgcgtgagcccggttccaataatgcgattgagatccctccacctaggccaaagagaaaaccacttcatccgtaccctcgaaagtgtgcgaattctggatcggacgcaaatccagcaacagcgcaattgaagcttgctcctggctcatcttcatctggctctgatcaagagaatggttctcctatatcggtgctatctgcgatgcagtcagatgcttttggatcgtcagtatccaatccatcaaccagatgtacctccccagcgtcatctgacgatggaaataacattcccacattcacgagtggggaagataataatgtgccttgtgaaccaacagtgatagatccgtcccagtcccacaaggaaatagaccaagatagaaaagacgtgaataatatgtctgaagaggattcttcagaagaagaggtgcaagaaacaagcttgaagctatttgggaggacagttgtcatcccagatccaaggaagagaagctcctcagatccgaagcatgaaagtgaggagcagatatcacagccttccaatgaagaaatgttgcaggcttcttcatcggttggggagattccagcggcatattgtgcaccaaatggttggtttatgtcatacaattctttcccattccaattcggtgaatcagcggcagatgctagaattccccctttacacgtgtggtggccttactacggttttgctcccattagccatcctagaggactaagcacagtgatgcagcagactgaaggtagtgacgagagtgacggtgtgaagagccactcatccgaatcaagttcggactccggggaaaatgtgcagatgaccgctccccagagctcgagaatagtggaatcacttggagcgatttacgtccgagactcaggttcaagttttgagctaaaaccgagcgcaaattcagcgtttgtaagagtgaagccaagcaacagcggagatgaagagatttga

SEQ ID NO: 12473 - DNA, 3015 bp, Oryza sativa
  Clone ID: TFbOSC405568j.C1.o6.fg
atgaggatcatgataaagggcggggtgtggaagaacacggaggacgagatcctcaaggccgccgtgatgaagtacggcaagaaccagtgggcgcgcatctcgtccctcctcgtccgcaagtccgccaagcagtgcaaggcccgctggtacgagtggctcgacccctccatcaagaagttatgttctcctcatgccatattgctgcaagcatacactgcttttgaagggctgatgactgaatggacaagggaagaggatgagaagttactgcatcttgctaaactcatgcctacgcagtggaggacaattgcacctattgttggtcgaacaccatctcagtgccttgagcgttatgagaaacttcttgatgctgcctgtgcaaaggatgagaattatgagcctaatgatgatccaaggaagttacggcctggtgagattgacccgaaccccgagtcaaaacctgcacgtcctgatcctgttgatatggatgaagatgaaaaggagatgctttctgaggcaagggctcgcttagctaacaccaggggtaaaaaggcaaagcggaaggcaagagagaaacaacttgaagaggcaaggcgacttgcctcactgcagaaaaggagagaattaaaggcggctggtattgatacacggcagaggaagagaaagagaaagggtatcgattataatgctgagattccttttgaaaagaggccgcctccaggtttttatgatactgttggtgaggacaggccacttgagcatgtacagttcccaaccactattgaggagcttgaaggtaagagaagagtagacatagaggcacaattaagaaaacaagacattgccaggaacaagattctccagaggcaggatgctcctgctgcaattatgcaggcaaatagactcaacgatccagaagctgtcacaaagaggtccaaattaatgcttccaccaccccaaatctctgatcatgagctagaagagatagcaaagatgggtaatgctggtgatccttctttagttgaggaacttggcgaaggtagtactgccacaagagcattgctttctagttattcccaaactccaagacttggaatgacaccattgcggacgccacaacgaactccagctgggaagggtgatgctattatgatggaggcagaaaatctagcgcgtctaagggagtctcagacccctcttttaggaggggataacccggagcttcacccatcagatttctctggtgttacaccacgtaagaaggaaatgcagactccaaatccaatggcaacacctttggcaagccctggccctggtgctactccaagaattggaatgacaccctccagagatggaagttcttttggtttaactccaaaaagtactcctttccgagatgagcttcgcataaatgaagaggtggatatgcaagatactgctaaacttgagcttcgtaggcaagctgaattgagaaaaagcctacgatctgggtttgcttctattccacagcctaagaatgagtaccagatagttatgccacctatcacggaggaggagaaggaagaagctgaagagaaaattgaggatatgtcagacaggcttgcacgagagagggctgaggaacaagcaaggcaggaagccttgctcagaaagagatccaaagttttgcagaggagcttgccaaggccaccggcagcttctatagaaattctccgacaaactctaattaagggtggtgaaagcagaagcaggagcaccttcgtgcctcctacatcacttgaacaagctgacgaactaataaatgaggagcttcttcggctccttgagcatgataatgctaaatatcctctagatgagaaaactcaaaaggataaaaagaaaggaagcaagcgccaggcgaatgggactccttctgtacctgagattgaagattttgatgaagacgaattaaaagaggccaattctatgcttgaggaggaggttcaataccttcgtgtcgccatgggacatgaaagtgaatctttggaagattttgtgaaagcacatgatgcatgccaagaggaccttatgttttttccaaataacaacagctatggtcttgccagcgttgctggaaattctgataagatagctgctttgcaatatgagtttgaaattgtgaagaagagaatggatgatgaagctaagaaggcttcgcggcttgagcagaaaatcaagcttctgacaccaaggataccaggtaggcttgggatgatgcaccataagcattgcaacatgtaccgagctggtaaactctggtcacaggttcaagatacattcaagcagatggacacttcagcaacagagcttgaatgctttcaagagctgcagaagcaggaacagatggctgcatcttatcgtataagaaatttgactgaagaagtaaacaaacagaaagcattagaacggactctccaaagccgctatggtgatctgttaactagttacaagaggatccaagagcagcttgaggagcataagaggcaactgatgatacaggaggaaatggaagcacagaagcgtgctcaggaggaggaggaaatggaagcacagaagcgtacgcaggcagaggaagaaaaagaagcggcgaaagctgaagaggaagcaagaaagatggatagggctgctgatgaagaagcggcaggaagcaaacaagtcaatgaggatcagatggatgttgacaactctaatgctgatggtgatgaattcgtaggtccgattcccccaggaccaggtactcaaggtgacgacaatgtggtggcggtcgaagagaactctagctcgcagagcggtgatactgctaccacggaagatggatcttgtggcatgatcgacgcatcaaaatcaggaggtcaggatcacatcgacagcaaggatgaacttcccactgttggtgccagtctagatgatggaagtgctgctgcatcttctgatcaagatgtctcaactgaggtgaatgccactgtccctgaatag

SEQ ID NO: 12474 - DNA, 870 bp, Oryza sativa
  Clone ID: TFbOSC900289j.C1.o24.fg
atggggcgcgcgccgtgctgcgacaaggcgagcgtgaagcgggggccgtggtcgccggaggaggacgagcagctgcggagctacgtccagagccacggcatcggcggcaactggatcgcgctcccgcagaaagcagggctcaaccgctgcggcaagagctgcaggctccggtggctcaactacctgaggccggacatcaagcacggcggctacaccgagcaggaggaccacatcatctgctcgctctacaactcgattggaagcaggtggtccatcatcgcgtcgaagctccccggccggactgacaacgacgtcaagaactactggaacaccaagctcaagaagaaagccatgggcgccgtgcagccgcgcgccgccgcctcggcgccgagccaatgcacgtcgtcagcgatggcgccggcgctctcgccggcctcctcgtccgtcaccagctcgagcggcgacgcctgcttcgccgccgccgccaccaccaccaccaccatgtacccgccaccgacgacgccgccgcagcagcagttcatccgcttcgacgcaccacccgcggcggcggcggcggcatccccgaccgacctcgcgcccgtgccaccaccggccaccgtcacggcggacggcgacggcggctgggcgtccgacgccttgtccctcgacgacgtgttcctcggcgagctcacggccggcgagccgctgttcccttacgccgagctgttcagcggcttcgccggcgcggcgccggacagcaaggccaccttggagctctcggcgtgctacttcccgaacatggcggagatgtgggcggcctccgaccacgcctacgccaagccacagggtctctgcaacaccctgacatag

SEQ ID NO: 12475 - DNA, 744 bp, Oryza sativa
  Clone ID: TFbOSC400014j.C1.o33.fg
atggacgagatcagaagcctgatgctgcagcaagggtggaggaagggcccgtggactgcgctggaggacaggctcctgaccgagtacgtgcagcagcacggcgaaggcagctggaactccgtggccaagctcacagggctgaggcgcagcgggaagagctgccggctgcggtgggtgaactatctcaggccggacctgaagcgggggaagatcacccccgacgaggagaccgtcatcctccagctgcacgccatgctcggcaacagatggtcggcgatcgcgcggtgcctgccggggaggacggacaacgagatcaagaactactggaggacgcacttcaagaaggcgaggccgtcgcggcgtgcgcgggcgcagctgctgcaccagtaccagctccagcagcagcagcagcatcgccagtatctccatagcctgaaccttctgcagcagcagcagcagcagcttcagcaacagcaacagcaacagcaacagcagatgatgttgctgcaggagcaggagcagcagagcccgcaggaggaggcagctgacgattccatggtgatgatgatgatgaacgatctccagagcaaggagcgttgctgcacggcggtctcggtggtgcccgacgactgcgtgctccccgccgatgatgatgcgatctgggacagcctctggaggctcgtcgacggcgatggcagctgcggcgaaggctcgagcgggggcgagtactgggctactagctaa

SEQ ID NO: 12476 - DNA, 246 bp, Oryza sativa
  unsure (1)..(246): unsure at all n locations
  Clone ID: TFbOSC26666j.C1.o1.hg
ctgtcgtcggctgagctccggcgagggccgtggaccgtcgatgaggacctcaccctcatcaattacatctctgatcacggcgagggccgctggaacgcactcgcacgcgccgccggtctgaagaggactgggaagagctgccggctccggtggctgaactatctccggccggatgtgaagcgcggcaacttcaccgcagaggagcagctgctcatcctcgacctccactcccgatggggcanaccg

SEQ ID NO: 12477 - DNA, 783 bp, Oryza sativa
  Clone ID: TFbOSC401685j.C1.o176.fg
atggggagagcagtggagcagcagcagggtggatgctgctcggagaagaagaagaagctgaggaaagggctatggtcgccggaggaggacgagcggctggcgacgcacatcgcgcggttcggcgtcagctgctggagctcggtgcccgacctcgccgggctgcagcgctgcggcaagagctgccgcctccggtggatgaactacctccgccccgacctcaagcgcggccgcttctcccaccacgaggaggagctcatcttggctctccatgacaagctcggcaacagctggtcacagatcgcggcgaggctgccggggaggtcggacaacgagatcaagaacttctggaacgcgcggctgcgcaagaagctccggcagacggagtcgtcgtcgtcggcgacgacggcggcgggggcggcggcgaccggacaccgccgcggcgaggctgaccggagtcgaccgccgccgcctgcatcgttcaacaccttctctcacgacgaccggacgactcctgctcctgccgcccacattgccgccgccgccgccgtcgaagcacccgcagcgatgacgacgacgggcggcgccgtcggcggcggtgttctcgtggacaacagtggtggtcaccgtgatgcggtggcggaggcggcgcggggacacgtcggcagcggcgacgacgatggcttcttggccgtgctgcttggggagtactacctcgacgccggcggccacggcgacggattcagcttcttgggcggcggcggcggcggccacgtgttcagctaa

SEQ ID NO: 12478 - DNA, 720 bp, Oryza sativa
  Clone ID: TFbOSC400792j.C1.o8.fg
atggcggcggcggaagtgcagtcggctgccgggtgggggaggcagctgcagcaggacggcggcgggtggaggaaagggccgtggacgagccaggaggacgcgctgctcgtcgagcatgtcaggcagcacggcgaaggccggtggaattctgtctccaagcttacaggtctgaagagaagcggcaagagctgcaggctacgatgggttaactacctgaggcctgatctgaagagaggcaagatcactccccaggaggagagcatcatcgtccagctccatgccttgtggggcaacaggtggtcgacgatcgcgcgtagcctcccgggcaggacggacaacgagatcaagaactactggaggacgcacttcaagaagggcaagccgtccaagaacatcgagcgcgccagggccaggttcctgaagcagcgccgcgagatgcagcagagccagcagctgcagcagccgacgctaatgccgacgccgacgccgcagagcaaggacatcatcgttgccgagaccggtgacgcgcgcaccgacgacgacgcgggcggcgccgcagcggctgtggcgccgtcgtcgtcgtcggcgtctttgtcgatggcgggccgagaggcggaggacttgatcatgcaccaggacgcgatggacgacctcatgatgtgccccgccatgtctaccacctcatcctccacggcgccgccgtcgccggccatcagctga

SEQ ID NO: 12479 - DNA, 1536 bp, Oryza sativa
  Clone ID: TFbOSC101298j.C1.o8.fg
atggccacgccgtcgatgccagcgccggcggccgaggcggcggcggcggcgactacggcgacggcgaactccatgcctctcgctccgccgcagccgccgtcctcgggggcgccgttctcccagcccccctcgacggcaggcaccgtcaagacggaggcccctccgccgccatccacctcggcttcctcagccgcctccgccgccgcccccgcccctgccgccgccgccgccgccgccgcggccgaggagtcgccctgcaccatcaccatcccgagctattcagcgtggttctcctacgactccatccacgagaccgagcgccgcctcatgccggagttcttcgaaggggaggcggcggcggcgtccgggtccaggggcccggaggcttacaagtactaccgtgacaccctcgtgaggaggttccgggcgcggccggggcggcggctgacgctcaccgaggccaggcgtgggctcgtcggagatgtcggctccgtgcgtcgcgtgttcgacttccttgaggaatgggggctgataaactatggagcttcgccgtcgggagcgaagcaggggagagataagaaagaggaggcagcgttatcgcagtcctctttgccgattggggcaacaatgcccagtaagctttgcaccgggtgccgcaccgtgtgcgggcttgcttatttctcttgtgagaaggcagatataagcctctgtgctagatgctatgtccgtgccaattaccggccaggtcttacttcggcagacttcaagcgaattgaaattactgaggacgcaaaatcagattggacagataaagaaactcttcaccttcttgaggccgtcctgcattatggggaagactggaaaaaggtttctcatcatgttggtagtcgatcagaaaaggactgcattgctagattcacccgattaccttttggggaacagttcatgggacccaaggaggacaaaattcagtttgggaatgattgtgatctcaatgaagaatctggatcacatatctcaaaacgactacgcctcacgccactggctgatgctagcaatccaatcatggcccaggttgcgttcttgtcagccattgttggttcagatgttgctgtagctgcagggcaagcagctatttctgcacagtcccaggttgatataagtgccagcgagactgattcttctatcaacatcagcaaggaagaagaatcttcttgcacaaatggtctttcagccaatgatttgctcaaagaggcgtctgccaacgcacaagtacaacttgaaaaggaacggaaggctatagagcagtctttatctgacatagtgggtgttcagatgaaggaaatccaggataaaatacgtcgtttcgagcagaaggagctgctgatggagaaagagaggaagcaactccactgcttgaaggaattgctcttttctgatcagctagctgttgtgcagcaccaacgcaggcccccggctgtcaccacagagagcaaggacgatgagaaaccgaagcccgttatcagcataagttga

SEQ ID NO: 12480 - DNA, 891 bp, Oryza sativa
  Clone ID: TFbOSC401685j.C1.o194.gm
atggcggccttctcctccaactccggcgacctcctcttcttctccggcattggcgacaccctagactctaacagaggaccctacgggtttttggggagcgcaacgcgcgactactcactgttcgtcaacatctacttcaccttcaccaatatgtcgaacactggagacaacggcaacactggatacaagaagaaggaggctcccgtcaacaccaacggaggcaatactacctcaaactccagcggaggaccattcttggggctgaggtggatgaactacctgaggcctgacctgaagaaggagcccatctccgatcgagaggcggagaccatcctctccctgcagaaactcctcggcaacaggtggtcggtgatcgcggcgaagatgccgggcaggacggacaacgagatcaagaactactggaattcccgcatcaggaagcgtcagtccgccgccgccggagctaaaggcgagccggcgccggccacggtcatggagaaagaaccgacggccaatgcggccaccgtggcggcggcgccggaggcggcatctcctcctcctcctcctatcccggcgcggctcccgatgttctcctgccaactgctcgacggaggcggcagcggcggcgccaccgccaccacacagtcgccgccgaacgccggttcatcggatatcagcgaggtgagcgcctgcggcggcaacggcggcggcgaggactcctcccgtgactactgcttctccggcggcgacgtcgacggcgacggcgacatggtccacctcctcgcgctcgatgacctcgacttgctcgtcgatgtccccggattgctcgacgttgatgcgtgggattgcgagctgtaccgtgcagattattcgacgagtagagctcgatga

SEQ ID NO: 12481 - DNA, 921 bp, Oryza sativa
  Clone ID: TFbOSC29542j.C1.o5.gm
atggtcggcgcagtgacagagggggagagaggtggccggcagcgggagagggagagagagacggtcgacgtgatagcggcggcgggagaggaggagaggtggcggccggcgcgacggcgagctcggtggtggagatgttctaacgcgccgggtgctcgaccacgggccccgccgccgcctgccgacaagcggcgcgctctccccatcgaccctctctccctccccaaggcggtggggctgctccgctgccgaaagagctgctgcctccactggatgaactacctcagccccgacctcaagcgcggcaacttcaccgacgacgacgacgagctcaccatcaagctccacgcccttcttggcaacaagtggaacacgcacatcaagcgcaagctcttgagccagggcatcgatccgcagacgcatcagccggttagcgccgggaccagcgttgccgcggcaagcgagctgactacgacggccatcactgtcggcttcccgtccctggcgtcgtcgctagtggcggaggggtctctggcggaggccgagtcagcgacggaggtgagctcgagctccgtgtcgaggagcgccgcgaagtcgtcgttgccggtcgatggcgacggggaggacagcgacttggcggtgaggcttacggccgagggcaaagggcgtgctttggttggctggggtggggtggatgcgcctccgtgctcgcccaccaccgctctgctgctccacccgtcgccgcgctcgcccatcgcctcttcgctgccgcactcgccctctgcttctctgcccgcggccgctctcgcccgtcgccgcgctcgcgctcacacccgccgctccgctaccgcgctcgccctctgctgcgccacccgcatctgcgcgctgctccgcctgccgccggcctccctcactgaataa

SEQ ID NO: 12482 - DNA, 921 bp, Oryza sativa; identical to SEQ ID NO: 12481
  Clone ID: TFbOSC404645j.C1.o7.gm

SEQ ID NO: 12483 - DNA, 4104 bp, Oryza sativa
  Clone ID: TFbOSC401001j.C1.o59.gm
atgtatcgggtgaagagcgagagcgactgcgatatgatccatcaggagcagatggactcgccggtggccgacgacggcagcagcggggggtcgccgcaccgcggcggcgggcccccgctgaagaaggggccatggacgtcggcggaggacgccatcctggtggactacgtgaagaagcacggcgaggggaactggaacgcggtgcagaagaacaccgggctgttccggtgcggcaagagctgccgcctccggtgggcgaaccacctgaggcccaacctcaagaagggggccttcaccgccgaggaggagaggctcatcatccagctccactccaagatggggaacaagtgggctcggatggccgctcatttgccagggcgcactgataatgaaataaagaattactggaatactcgaataaagagatgccagcgagctggcctacccatctatcctaccagcgtatgcaatcaatcctcaaatgaagatcagcagtgctccagtgattttgactgtggcgagaatttgtcaaacgatcttctgaatgcaaatggtctttacctaccagattttacctgtgacaatttcattgctaattcagaggctttaccttatgcaccacatctttcagccgtttctataagcaatctccttggccagagctttgcatcaaaaagctgtagcttcatggatcaggtaaaccagacagggatgctaaaacagtctgatggtgtgcttcctggattgagcgataccatcaacggtgtgatttcctcggtggatcaattctcaaatgactctgagaagctcaagcaggctgtgggttttgactatctccatgaagccaactctaccagcaagattattgcacctttcgggggtgcacttaatggcagccatgcctttttaaatggcaatttctctgcttctaggcccacaagtggtcctttgaagatggagctcccttcactccaagatactgaatctgatccaaacagctggctcaagtacactgtagctcctgcgttgcagcctactgagttagttgatccctacctgcagtctccagcagcaaccccttcagtgaaatcagagtgcgcgtcgccaaggaatagtggccttttggaagagttgattcatgaagctcagaccctaagatccgggaagaaccaacagacatctgtgataagttctagttcttctgtcggtacgccatgtaatactacggttcttagcccagagtttgatatgtgtcaggaatactgggaagaacaacatcctggtccattcctcaatgactgtgctcctttcagtggcaattcattcactgaatccacccctcctgttagcgctgcatcgcctgacatctttcagctctccaaagtttccccagcacaaagcacttcaatgggatctggagagcaagtaatggggcctaaatatgaacctggggacacttcacctcatcctgaaaacttcaggccagatgcattgttttctgggaatacagctgatccatcagttttcaacaatgccatagcaatgcttctgggcaatgacttgagtatcgattgcagacctgttcttggcgacggtatcatgttcaattcttcctcgtggagcaacatgccacacgcctgtgaaatcctgcaaacctgtgtcaccagcggcagcgatgacgcaaggatcggccaggtgtcaggccatacagagataggagttgtgatactgcaacaggctgagagttcttctcctgatgcttccatgactgacattgcacctattcttgatgagattgacccgctcttgggtgcaagctctactcatcctgatacaattccaaaggatgattcggacactgattcacatgtttcctcacaggatcatcaaactgatgatgatagtaatgatgaaactgacaataatgatgctaaagagaatggtgaggaaaagaataaagaacaaggaaaggaagctgcatttatttggacagcagatgatgaaaaaaatctgatggatcttggatattctgagatggaaagaaaccgcaggttggagcttttgatggccagacgaagatccaggaagaacataagaagaagcggcaattctggctcagcaccctcagttctgcatacaaggaaaaacccattcgatcttcctcttgatcagtccaatgatggtgatgtttctgcagataataatgaggaccacaaggacctcgatgaaaaagatttgcccaatgagcatgggtctccagctctgcagagacaggatagcgaccttgcggatgttggaagtgaatgctcggatggcatcaactccgtggatgttgaattagacaacagtgacattgatgatcgtgagattgctctacaacactttgtctttgaaagatcacaggaaagagaagcatatctttcctcaacaaaaggaaagggtcctgaagatgattacctgctcagttcagttgggaactccaagacacttcatccagtagctgacctgtttagctgggaagatggaaatggtgaaagcagccttggtgttaactcttcccataacatgtcagttgaattctcggactgggtttcatcccccaagccaattgcagagcatgattcaggaccagagaaccttcaggagtttcttaatactgaagttgcatcaagttcaaagacaattgttctaggcgcaagaaatccagctgaaaataatggaaatgttgattccatatcctattcaaacaatgaaatgccttcagataacttgggtcatgggtccatggagttcccatctgaattttgtaatgaatcactgccagtaatatctagggacttgcaccctatccctgaagagagggttgtcgagaacttcaatgtgcaagaaaagcatgaagcagaagaaacagctgcaggatatccacttgattctgatgatgatgctgataaaatctatcctgagcccatggaggacaatgtaattgatgaaagtttcctatcagaactggatgcggtaggagatttccgggtagaagcaacaagatcggaccagcagatgcctgatgttgactcccatattgataataacacttccaatggtgttgcagagagctccttgattagccctcagatttcaagtaacatattttcaaatatgaaatatgccagtatgctcgaacatgaggagaattctccattggttgatgacctaaatggcaccggtcctgaatttggttggtcattaggagcatcttatgatgaccctgagcagactgtctacaatccgaggcgacggattcttggagcaagtcgttttgaagaaactaacacagagatgaagccactatttgatgagacagaagcatcttttgtcaatgcaccaatagaagcaaacttggtagttggaccaagtaaagtggatgttgctaatgagtctgagttaactaaaactgatacaaacatgatcgttcttgatgccaattctctggaggatatagagacggcctttaaacaagcaagcaatggcgttgttgagtccaccgtggacaatgaaaccccacaggagcacacaactgctgctatgaacagttccttcgaagaaaacgaagacaagcatggatgcggtgatactgtaaaattcaccatgcatgatgagcttccagaaggaacacatattgaaggtaacacagttggagatggtaaagagcctgaaccaatggggattacaagcagcatggatgtcattgatgcaaaatccatcgatgacatatatgctgctttgaagaagcagtcaagtgctgctgcgaatagttccttcgaacaaaacgaaggcaagaacggatgtggtgatactgtaacattcaccacgcacgatgagcttccggaaggaacacacattgaagatagggataatacagttgaagatggtaaagagcctgaaccgattgggactacaagcagcatggacactattgaggtgaaaacaattgatgacatagacgcagtgttcaagaagctctctgatggcggtaccaagagtgctgcccaggcagtggattgcgagaatacttgtgaagcaagtgatgaaagtgaacagcactga

SEQ ID NO: 12484 - DNA, 1524 bp, Oryza sativa
  Clone ID: TFbOSC401161j.C1.o11.np
atgatggcagaggcgcttcgggaggtgctaccgctgccctacttccccgggcagccgtgctggtacttgcaggagcggcgaggtgcggaggcgtggtcggcagaggagaacaaggtgttcgagagggccctcgcacaggtcgacctggactcgccgaacaggtgggagatggtcgccgcgatgctgcccaggaagacggtcatagacgtgatgaaccactacagggacctcgagaacgacgtcggctccatcgaggcagggctggtgccgttccctcactacagcagcagcttgtccccggcgtcctccgggttcaccctgcaggactgggacggcagcgacggcgggttcaggcgcggctgctacctcaaacgcggccgcgccccggaccaggagaggaagaaaggcgtcccgtggacggaggaggagcacaagtcgttcttgatggggctgaagaagtacgggaggggagactggaggaacatctcgcgctacttcgtgacgagccggacgccgacgcaggtggccagccacgcgcagaagtacttcatccgcctcaactccggcggcaaggacaagcgccggtctagcatccacgacatcaccacggtcaacctgccagaagaagacaccagcaacccctccccatcgccgccgtccgtgctcaccaccgcctcagaccagctcggctccctcgtggacacgaaacccgttcccccgccaccgtcactcggcgcgcaacggcacttcatgtcgccgctgccgggagcgctcggcgtcagccaccacccctacggcaacgtgaagctagagcccaatgcctcgttcttggccggcggcgatgcaatgcggacacttgtgacggcggttctcagcggcggagaaccgcacaaggaggaacacagagcaccgcctccgatcatatctacgggaacgacgaggctccggccaagtcgcagtcccgtgtcagtgtgtgattggctagccagttggttgcagagttgcttcatgcgtctcaggatcgcaaagtactggacggaagggccactaaccggttactgttttgatcaggaacaccagggctttccgagaaagagaaagcgaaaggctctgcttgatcgatgcgactatacaattcactgcatgaatctttcacttgattgtttgttcggcaagccgcaccgaccagcctcagccggaggtcagtgtatctcaacgccgacgccgtcggcgatcccgattcccgaccgaatgcatggtgaaataggagatcacagaccggagataaagtggcaccggtgctactgccgctttgtgttgtgctccagcgacttttgttcgtgcgaggtggaggaaagtgccagtactggcggtggtgcgctcctttccagcatttgctctgccattgggcacggcagggagagtgaaagcatcatcgacgccatcgcgcttttggggcgtcatgtccgccctcgccttcgtgcaaatattcagattctgcaaatggacgatataattgaggaa

SEQ ID NO: 12485 - DNA, 1023 bp, Oryza sativa
  Clone ID: TFbOSC400944j.C1.o23.fg
atggggaggtcgccgtgctgctgccacgacgccggggtgaagaaagggccgtggacggaggaggaggacagggcgctggtggagcacatcaagaagcagggcgggcacgtcggaagctggcgcggccttccccgggcggcggggctcaaccgctgcggcaagagctgccgcctccgctggaccaactacctccgccccgacatccgccgcggcaacttctccgacgacgaggagcgcctcatcatccgcctgcacgccgccctcggcaacaagtggtcgacgatcgcgacgcacctggacgggaggacggacaacgagatcaagaactactggaacacgcacatcaagaagaagctgctgcgaatgggcatcgaccccgtcacccaccagcgcctgccacccgacctcctcgccgacggcggcggcctcggcgccgcctcccctctcctctcgccgccggggccggcggcggcggcggcgctccagcctctcctctcggcggtggcgagcctcgggagcctcgacaccgcgctgaggcagttccagctgctgcagcacctgctgaattccatcacctcctctagcagcgacgtcgctgcgactgctggtctcatggccaccaacctagctgcaacaaacaccatggtgaactcgagcagcaacgtcgcaagcttccaggagcagatgaacgcattggcacatgcaaactaccagccaggttatctccgtgatgtcgtcccaagctttccagggcaagacatggcgccgcaactgaacagtactagcagtacacctagtacggctccagtgctcagatcaagcgctgaaccggctgatcagtgctgcaacgatgctgcattggtgcctgaaacttatccacgggaagtggcagcatctgttgatcactggaaggtgcaggattttcccagcttggagcccctggagctaccaaatctatcaactctggagagtgatcttgatccgttctggaaagagatactagaaagcagcttccgttcataa

SEQ ID NO: 12486 - DNA, 791 bp, Oryza sativa
  unsure (1)..(791): unsure at all n locations
  Clone ID: TFbOSC19785j.C1.o1.fg
atggcgacggcggcggagtcgcaggggctctccccggggttcaagttcaatccgtccgtcgagcagcttctctgcttcttcctcctgccctacttgcagcaccgacgcctcctcgtcgacggcgtcgtcttcctcgacgacccggcgagcgcgccgccgtgggcgctgctccaccgccacggccggggcggcgaggacgaggcctacttcatcgggccggtgcccgcaggtgacggccatggtggccggcggcagcagcaggtgagccgcaccgtcaccggcggcggcggcggcaagtggataaagcagaggacggagcggccgagaggggaggaggagccggtggtggtgttcggcggcgagacgttccggtgggaggagttcagcctcaacttccacgccgacgagcggtgccggagcggcagcaccgggtgggtgatgcacgagttcgccgtcgtgccccccgccggctcccgcgtcgccgccacccacaccgcctgccgcatcgccttcaccggccacggccagaagcgcaagcgcgtgcccgacggctacgtcttcgtcgacgtccatgtccagaccgccgccgccgncgccgccgtcgttcctccgttgccgatgttgtcctcgtacggcgaaccaccgcacgaacacttctctgacgatcatccgccgccgcattcttacacttattacacccaaggataccagcagttcttgccggcggcggagcaaaacgatcaagaacaggaatactgtgcaccggaccacagatttccaagaatattacc

SEQ ID NO: 12487 - DNA, 279 bp, Oryza sativa
  Clone ID: TFbOSC400170j.C1.o5.gm
atggaggcggaggaggagctgatatgcttctacctccgcaacaagctcgacggcctccacgacgacatcgagtgcgtcatccccgtcttagacatatactccgtcgacccgttgcagctctcagagattcaccacgagatgctgggcagcagcggcgaggagggggagccgtggttctacttctgcccgcggcaggagcgggaggtgcggggcgggcgaccgagctggaccacgccgtcggggtcctggaaggcggtgggcacgccgggggtcgtctaa

SEQ ID NO: 12488 - DNA, 849 bp, Oryza sativa
  Clone ID: TFbOSC101065j.C1.o12.fg
atggcgtcttccgcccatatggctgccgtgctgaacctgccctggggctaccgcttccgccccagcgaccgccagatcatcgccaactacctcggccccatggcgatccacggcgccgactccctccctcagaggggagacgtcgtggagggcgtggacgtcttcgccacgcgccctgccgcgatccccttcgagccgcggcgccacgtgtttgggcgggacgaggtgcgcgcctacttcttcggggaccagcccaccgacagccggggccgcgaggtgcccggaggtgcatggcttccgtgcggcggcggcgacaaggcgtactccggcggcgcggacggcggggaggcggtcgcgtacaggcgcaagtacgagttccgcgccgccaacgaggaagccgaccgcgcgggggaggaggcggcgacgccggcgcggccgagatggcggatgaaggagtaccggctcaacaagagcgccgccgagttccgccgcgcgtacgcgcagcccaaccccaaggcgaacatggactgcgtggtccgcgagatctacacgaaggcggtgccacctccaacgccaccgtccggccgctccggcgacgaggaaatgcaggaaggctccgactactccgtcatggacgaggacgagttggtggactacttgcttcagggcttcgaggacggcaacttcgacgaggaccaggaccagcccgcagcggcagaggacggcgactactccgacgaggacgaggaccagcccgcggcagcagaggacggcgactactccgacgaggaccaggaccagcccgcggcggcagaggacggcgactactccgacgaggatgagccctga

SEQ ID NO: 12489 - DNA, 1596 bp, Oryza sativa
  Clone ID: TFbOSC400934j.C1.o28.fg
atggccggcgagatgcctgacgccgacggcaagccccgctcggcctcctccgggttccagccgtcggcgccgccgcagccgcaggcgcagcagtaccagtacggcacgttcggggccccgtcctccgcccccggtgaggtcccgcagccggcggtcgggttcccccagccggccccgccgccggggctccggcactacccgcagccgcccccgccgtcctacgcggtctaccctccgcttcccccgcagacgtacccggccgccgcgccgtactacgccctgggctaccaggccgtgcaaggttacattcccgttgttgaaggaaggcctgtgagaatgcgacgccttccattttgcggccttggcatgggctggttcctgtttatcattggcttcttcctcgctgccattccatggtatattggagcttttgttttgatatgcgtccgagtacatgattacagggagaaaccaggatatgttgcttgcactattgcggcttcgcttgctgccattgctatcctgcttggtgtcacaagaggagaagagatttggagctcatcgagacgtagctccgcccacgggtcgtctcccggcgacaagccgccgccgtcgtcgtcgtcgtgcgggttcatcatccacgaggcggacgtgtactccgccgaccccgccgacctcacgagggggttcgcgccggcggtggcgaggagcagcggcgacgaggcgtggtacttcttcagcgccgtgagggggctcaagggcggccgcaaggcgcgcacggtggacgacggcgccgggtgctggcactcggaggccggcgcgaagcccgtgctcgccgcctcctccggccgccgcctggggcaccggcagagcttctccttcatcaccaaggacgacgacggccagcgcgtccgctccgggtggctgatggtggagctcagcctcgacgtcgacgaagaggagcagctggtcctgagcaaggtctacttcagcccgcgcgcgcccggcgccaggaaacccacgacggcggcggcgatgtcccgccacaagaggaagctgtccaccaccgacatcgcctcaccgccgcggcgccagagacgccaccgtgtagtaccatcatctccaccggaggagccgaacacgtccccgtcgccggcggctgcgcctccggaccagcaggaaggcggcgacgacgaccccgaccgcgggagcatttcgtggtggctgcggagggtgttcggcctgaccgccacctttaccgaggaggagtccatcgagctcaacccatggctgaaggacatcctgaggccgttcccgcctcccttgccgccgacgccgccgcctccatgcccgagccctcgccggaagctgatcgacatgccggagatcagggagttcatcatgcgcgggtcgtacctcggcggtggccctgcacctccgcgctacgagtgcgatcatccggccatggtgatgaccggcggcgatgatcagcagcagctcgatgagcagcgcagagacgatgttggcgatgatcgagctcattacgatcgggtggacggccagctgcagttcgaacggcactacctgcagttgtaa

SEQ ID NO: 12490 - DNA, 2847 bp, Oryza sativa
  Clone ID: TFbOSC900006j.C1.o17.fg
atgtcagccaccctctcctcttttcttctccttctcttctcttttctctcttctcttcctcttcaaagcgagcggaaggcgaagcaggtagagggcagcggcagagcagcgacgggcaagcatgacagcggggtggaggtggacgtgatcgcctcaacctactacatgagggcgcgagagcgcgatgctggcgcggaggcggacgcgttgcgggaggagctgtggagcgtgaaggccgagctcgagctcgccaagacaaaggcagtggcggcggcggcggcggcaggcgcgctagcggagaaggcgcaggaggtgtacaagcgcggcagggaggacgtgagaaacaccattgcatcttatcgcagtgcattgctgaaaatggagttattttctagggtactaccaccacttggcattgctatgggggactcttggtctgatactgaaatcatcatgttcttggctgagagaaaaacatgggatcctcttccacagaacatactggtgggggttgaccttactatgattgatccacgggactcccctggaaccctttggttcttgaattggcctgataaccagctatgctatgatgacgagaacaatgttttcagaaaggcaaagaatggatattggaagtgcgttgatgcttgcagaatacagacaggcacatctatcttgggcgtgaaactctgtttagagtttcatgaaggccaaacaccatgcggtacaagaagtgggttgatgatgtacgaatatttgatagaacagaatgatgaactgaatttaccacaggcctacaagtctctatgtagaatgttccttcagaaagacagaaagattgttgaagatgaacatatctccttgaatttaggtgttcatcataattttctgggatcctactctcaatatcttgcagaaatacaaaggcaaaatatggtaatgaattcccaggctgtgtcttcagacaaaaaaagtatcttcatcagagaattggatgaacgaaaaagcaagaaatgttccaccaagataaccaggtcaagcacaaggctctaccgacaaaagattcctcatatttggtgtctacgtcacagtgtgtctaggaaatggtttcgtgaatcaatgttcagagttattgataagttggcaaaattgcttgagtcagtattacttgatttggccactgtgagacaaaaaataaacaaaggtaaaaaacgaatttggaagatggaaggcaaattggaaaaggctcagattcaacatctgacagacttcaacaacaaatatggaccatctattcgacaatcagttgaaactgctgaacataataactgtgctttgaggtgtcttaataattatttggagttgatgattgaggaaccacggtttagttcaattgcctatgttcgtctggattcacaagtcaagaaactcgataaggagaacacgtctgcgatggatttatcatccagtttgcaccagatgcttcagaagttaaatttaagagtacaagatgaagaagtctgggtgtcacagttaggctcaaatttgcaggcttcattcagaaaaatcatggatacctcctcagaaataggaaaattagaagatgaagttttgcagctgaaggtcgatatagctgagtttgctccaggtgaagtaaccagttgtgcagtatatgaaatgatcaagacacttcaaattgttgaactgttcatgaataattccaccagacatttgaaacttatcgatggaattaattctgaaatgagagagtttggaagtatctttaatggcaaagtgagatgccttgttcgctttgctagatatcaacaaactattatggagaagtctacacagataaatttgttccagataatcaatttccttggtgacatccgtgctaaagttgacaaaatgactcaaatgtatggtctatctgaagttgtgcccattgtctcaaaccagtttatagaggggagcttcaatgccgatgcatatgcttttgagagtttgaaagagcacagcactgatctctgttttagttggagaacaaggaagtttcataacagattaattctccctccagtgaggcaacaaacttctgggacgtgttcatattacgcgacactatcatcagttgagtccttgtataaaagagaatatgcatcataccctactatcttaaaagataagattggacagcctgatgaatttctggttaatctgtcaagagctcagttggaagatatagtagaagatttttataccaggcataaagtcaagggttcgaaaaggttgaatgtttgtttagataagatgaaaaatgaaggcgttatttcggaagaatcatatatgaaccctcaggctcagtccacagaaagatacaaaatcaaacaatacgaagagctcaatcttgagattgcgatgagggaacgtgataaggaagaagtaagcattgttgacaagaagtgtataggaaagaagaaaaaaaggaggttcagaaaaaagatgagaatgaaggagcacatatttctgacgaagataaagaaagttattgagagccatataatggatggaaaggtgctcattgctagtttccgggtaacaactggttacttcaggttgctacctcatcaaatctacaaaattccagaagaagatccccaatatgaattgaataaaaaaggtaatccctgttctcattgtgtcgttgttgttggttttgggattcgggacggtgaatgttatctgatctatctaaattcatatgggacttcctggggacatgacggattcggtagaatataccttgatagtgtcaggaagctttttttagctcaggtctaa

SEQ ID NO: 12491 - DNA, 1095 bp, Oryza sativa
  Clone ID: TFbOSC900089j.C1.o24.fg
atggctgagatcggcaagggcttggtgttctcccccagcgacgaccagctcaccgacggctacctccggagctaccttgtccggaccagcctcgacgacctgccctccgccgccacctcctacttccacgtcgccgacgtgtactccgccccacccgatcagctcgtcgccggcctcgccccggcgcccggcaccggcgacggcgatggccgggtgtggtacgtgttcaccccagtgcgcgttctcggcagccgcggcgcgaggaaggctcgcaccgtcggcggcggctgcggcgagtgctggcacgcggagggaggccccaaggacgtcaagggcagcgccgccggcggcaagctgcagaagttctcgtacaagatcaagacggcgttgggcgccgtcgtcaagcccgggtggctcatggtggagttctcgttccccggctccgaccacctcgcgctctgcaaggtctaccgctcgccccgcacgtcgcgctacggcgcgccctcgccgccgtcctccgccgcgtcgtcaccgtcgagggccgcgccgccgcccgtgtcgtcgacgtccggccgcaagcgcaaggcagaggaggagtccgaccaccccgaggcgccagcgagcagcgcgccgcggcgaactctgccggcgtcggagcaacacgtcgacgtcgacgccgctgcagcatccgagccggatcagggcggctacctgagcactgaccagctggacagcgtcgcggcgttcgtgcaagaacacgaggcgttcgtgcaagaacacgagggggacgaggagttctgcaagagcctcgggttcgacgagcgctcggatccgcaatgctggaccaacttcttcttgtcggcgttggaggagttcgggccggcgccagaaaccgacgccgccgccgtcgccgtcgccgccgttgagcctggcccttgcccggagtacgaggaacacgatgacactgccactactgctgcgtccagccatgcttacgacagtgccacggctgagctggtgaacctctcggacaaggagttctatgacatcatcttctccggtgaccaacaaggcggcgccgctgtggctggatga

SEQ ID NO: 12492 - DNA, 1587 bp, Oryza sativa
  Clone ID: TFbOSC400849j.C1.o10.fg
atgcaccactacctcaaccggtggatcgccggcaagacgataccggagatggaggccgggttcgtcgccggcgccgacgtctacggcgacggccccgacgcgctgcggcggcggcaccggccgggatactggtgcaactgcgtgtacaagtggttcttcctttgccaccgcaagcgccagagctcgcgcaggaccaccggcaacaagcgcgccgagcgcgtcgtcgccgccggtgggcggtggaaggtggagcaggggaagaaggtgctcggcggcggcggcggcggcggggagagggacagcttagggttctactccagtaactccacgaagaagacgtcatggattatggaggagtacacgagctccgccgctgatggcgccgccgccgcccgcggcgaggaggacagaatggagcccgtgctctgcaagatctacctctcgccgcgcgcccccgccggcgagaagcgggcgctgttcggggaggacggcgtggcggtcgggcccgacggacgcaagaggaacgcccgggtgacggttctggcgacactgttcgacgacgtcgcggcactccttggacagccggtcgccgcgccgccgctgccggcgccaggcgaacagcttggccatggccatggccatttcgatgatgtagcggctcgtttcggacaggtcgccgtggcggcgctgccggcgtcgggcgatcttggccacggcgatttcgatgacgacgccgcggccctccttggacaggtcgccatggcgccggcgccggcgccgggacatcaccaacagggttatgtcgtcgcggaggcgccgctgccggagtcaggttatcttggccattatcaccacgacggccatctcgcgcaggcggcggcggcgccggagcaagatcattatcttggctatcacagtcacgacgcgcatgtcgtggacgcggaggcgacgccggagcaaggctatcatgacgacgcgcatgtcgcggtggcgccggcgccggagcaaggcgatcttggccatgaccaggggcatctcgcggcggcgctgacgccggaggaatgtggcgagatagttggcgcatacgaatttcacccggaaatggtgcagatgctgtccattggcttcgccgcgcccgacgaacagttgttgccgcagctgctagaccccaccggcggcggctacgacatggctagctccgccatcgccgccgttggcgacgtgaacgcatatgccgccgcggcgcccacgccgcgaattagacccaacgcggcggaggcaatggcggcgacggcgacggcagagacaatgccaccaccgctggacgccgtggcggccgagctatccgcgccgccgcgtggcttaccgccggagctcgctttcagtgccttgccgtcggtgcagcaggagccatcctgtgacgacggcgacaacttcggcgagctcgtggcggaggcgatgccgccgttgatcggggagaacgccggcgtcgatgccggcagcgacgagcctctgccggatttggccggcatcatgacggagttggattttggacatgactttttcagcaatcagcacagagaatga

SEQ ID NO: 12493 - DNA, 2709 bp, Oryza sativa
  Clone ID: TFbOSC401141j.C1.o34.fg
atggcaaggcttgttacagttgcagctgctaaggtgaagggctcagcttccagatttcgatacgtttgtagtactcctagaacactggatcagccatggattatagctggtggaaaggtaattgctacaaaaataagaaatgcaactcagcttctgagttgtaaacttggagaattggttccagaagcatggagggaatgcccaaactgcaaatgtcacattgataatagcgatgttactttacagtggccagaattccctgacggtgttaaatttgatccatctgatcttgaagtacttgaacatttagaaagaaaaattaacctgggaaatccagggcctcagggtcttattgatcacttcatcccaactctagaaaagatttaccataacggtgtcttaaaaggatggaagaaaatactggttctttacaaaggctccaaaaagaacaagatagtacaagctaattgggttatgcatcaatataatcttggtgtggaagaaggcggggaggacggagagcttgttgtttccaaggtattctaccaattatcctccaagcaaactggcacgcctgaaatggactctgttactgaagaagcatctgatgcactgaccataagaagtgatcccattacacccataacgaaccctccgctgcctcgctgcctgatgaacagcccgtgtgacacggagcagaatggcaccatttcacatgatcaggagggggaatgcagcacatccactctccggcccatggtagaagctggaaaccgtgcagggtgttctgctggagcgtcaacagccggggacttcaacgaagatctgctgcagcgctgcgagtttccggaggaccccgtcccaactcttgatgacacgctgccttttctttacacggacgaaacggaccttttcagctgggaagattttcaattcgggtcgcaggaaagcttcggctgggtggatggggatcacactcttgttcagtttctgtacctctgcatgtgggaccgccttttggtagacgatctgctgagagaaaaatcaataccattgcccaactctgtagaaaactcacgaaaaaccctcctccgaagtccccaattccacatggcgccgcccacctccgccgccgccgccgtcgcggcggccgcccgcgcctcgccgacgtcggcggcggcgctcgcgctcttcaagtcggtgctgtccgcggacaaggcgctctcgccgctcgccgtgctcccgcacctcgacggcgcgccgtcctcgctgcccaacctcctgctcaccgcctccgccgccgtgcgcccccacgccacctccctccgcctctactcgcggatgaagtccctatccctccccatctcgaccgcctcgctccacccgctcctctccgccctcccctccgccccggccttcgccctcttcgccgacatgttccgcctccgcctcccgctctgcaccaccaccttcaacatcatgctccgccacctctgctccgccgggaagcccgcccgcgcgctcgagctcctccgccagatgccccgcccgaacgccgtcacctacaacaccgtcatcgccgggttctgctcccggggccgcgtccaggcggcgctggatattatgcgggagatgcgagaacgcggaggaatcgcgcccaaccagtacacctacggcacggtgatctctggctggtgtaaggttggccgggtcgatgaggcagtgaaggtgttcgacgaaatgctgaccaagggagaggttaaaccggaagctgtgatgtacaacgccttgattggtggatactgtgaccagggtaagctggatactgcgctcctttaccgtgatagaatggtggagagaggggtcgcaatgacagtcgcgacctacaatttactcgtgcacgccttgttcatggatgggcgtggaacagaggcatatgagttggtcgaggagatgggtggaaagggtcttgcgccggatgtgttcacgtacaatatattgataaacgggcattgcaaagagggcaacgtgaagaaagcactagagatttttgagaatatgtccaggagaggggtccgtgcgacagtagtgacctatacggcattgatatatgccttgtctaagaaggggcaagttcaggagacagataagctgtttgatgaggctgtaaggagaggcattaggcctgaccttgtcttgtacaatgctctgatcaatagtcactccacttctggcaacatcgatcgagctttcgagataatgggtgagatggagaagaaaaggatcgcaccagatgatgtgacctacaatacgctaatgagggggctgtgtctactgggacgtgttgatgaagcgcgcaagctcattgatgagatgacagagaggggaatccagccagaccttgtcacttataacacgctgatcagtggctacagcatgaagggtgatgtcaaggatgctctgaggattcggaatgagatgatgaataaggggttcaatccaacgcttttgacatataatgcgctgatacaggggctctgtaagaatggccagggagatgacgctgagaacatggtgaaggagatggtggagaatggcatcacccctgatgacagcacatacatctcactgattgagggtcttaccactgaagacgagcgtgccattgatgatgagcgactggctgcagcagatgctgcgaaagtatga

SEQ ID NO: 12494 - DNA, 324 bp, Oryza sativa
  Clone ID: TFbOSC401019j.C1.o11.gm
atggaaaatggcggcaacgacggtgatgggtcggcggtgctagtggtgagctggaagcatgagctggtgtcacggctacagttaagtcctagcttccactttgtgccgacggacaaggagctcgtggacttccacctccgcggtaagatcaagagacgcaaaccgcctctctacctcatcaatgagaaatacaagggctatggggaaggtatgtggtactttttcatggtgagggggccatcgaagacgaagaagaaggatttgcctcagctgcacatgaagctcgactacctctgttgccccaagcattcacctgccttttga

SEQ ID NO: 12495 - DNA, 1395 bp, Oryza sativa
  Clone ID: TFbOSC400621j.C1.o9.fg
atggccaatccttcgccgatgggatgtgccgtgggagtggcagacggtggtgctcaccatggtgggctgtggaatattaaagaaccattcaagcttcaaaatggctggcttctgtgggctggagttggtctctttggcgctataatttctattgctttagttggggttgctatgacttatctgaatggtgaacctccagaaagagagactgactcgttagttcttttattgccattaatcggctcatcaagtgccagcactgcttttctggtgggcattactggagttctagcaccaattctggaggagactgtgtttcgaggatttttaatggtgtccttgactaagtggtttcctactccagtttgcatacttgtcagtgctgctctatttgcctttgctcatctgacacctggacaattcccacagttgtttatacttggtgttgcgttgggtttttcatatgctcaaacccataatcttctaactcctatcacaatacatgcattttggaactcgggagtaatattactgttaacctttcttcagaggcccatctactcttccgagggaaccaaatgcataagcctgaagaagtctcttgtcttttacaaagggagagcagcaaaagggttcaagactgattggatgatgcatgagttcagacttccttcactcacggagccttcactttctaaaataccaatagataaaaaaccagccaaagatatctgggctatttgtaagatatttaaaaagcctaactctatggcacaaagagcgttatctcacccctggggtcctcaatcaactgcaacaacaagctcgcaatttgcttcagagagttcctcttgctcagaagaagttgcaataccgataactcagttgaacagtcagcagtgcctgcaggggaggcagcagaagcccaacaatagacaagatggctcttctagtaaagtcataaacttcaagtgcagtccatctttaactcatcaatcagacaaagacaaccataattgtccagtcaccttaccattcaaaacacaaaccctgcagcatatgtcaggtgccacatcgctgcttctcagcataacccctggaataatcaatagcatatatgaagcctcgccaaacatacggtttggacagactgaaccatgcaatggatatgaagttgattgggttataggcacaaatggaggcattgaaaatagtgatgaggatccatatacaagaactggtactgaatacagtacaggcagtgaatgtggaatccggcagaaaataaagtttccatttgatttattgggtgatccttcagataactggacaagcaatatcaatatgccatgtgaattccccttaactcccaactcctacagtcatgtgcaatag

SEQ ID NO: 12496 - DNA, 431 bp, Oryza sativa
  Clone ID: TFbOSC5422j.C1.o2.gm
atggcgacggcggcggagtcgcaggggctctccccggggttcaagttcaatccgtccgtcgagcagcttctctgcttcttcctcctgccctacttgcagcaccgacgcctcctcgtcgacggcgtcgtcttcctcgacgacccggcgagcgcgccgccgtgggcgctgctccaccgccacggccggggcggcgaggacgaggcctacttcatcgggccggtgcccgcaggtgacggccatggtggccggcggcagcagcaggtgagccgcaccgtcaccggcggcggcggcggcaagtggataaagcagaggacggagcggccgagaggggaggaggagccggtggtggtgttcggcggcgagacgttccggtgggaggagttcagcctcaacttccacgccgacgagcggtgccggagcggcagcaccgg

SEQ ID NO: 12497 - DNA, 936 bp, Oryza sativa
  Clone ID: TFbOSC401612j.C1.o17.gm
atggggatcgggtgcgggcgccgcggctgtgggcgcgcgtgtgtgggttcgcaaggggaggatggtgatgagttgagcagtgatgccattgttggtgatgtggtgatgtatcgagtcgagcgtgtcgacggggaaaagaaggtgcccacgcccgcgcccgtcggccctaaccctaaccccaacccaagcccacccgccggccccattcgcctcgcactcgccctcgcctcacgccgcccgatcccccagcgcgcacgcgcgcgcgccgagacgacggccgcggcggcgacggcgacggggatggcgccgctcgcagatcccgccgccgagggcttccgcatccccttcctccccagcgacagcgacctcctcgactgcctcctccgccccaagatcgcctccggccgcgtcgacccccgcttcgcgccgctcgtgcacgacgtcgccgacgcgttcgccctccccccggcccagctggcggccgcgcacgcgcccgcgcccggcgccggcggcgccgaggcgtggtacttattcagcgtgcgcccccgcgcccgcgcccgcgcccgcgccggatccaagagggcggcgtcgcgcgcggtcggcggcggcggcggcaagcggtggtgctcgatgggcgccaagaaggcggtggagggaggcgggtactgccagaggttcaggtacaaggagaggacggcggcgggcgtcgtggcgccccgatggatgatggtggagtacggcgtcgcccaggaacacgacggcgagggcgtcgcccaggaacacggcggcgagggcgtcgccgagctcgtgctctgcaagatcttccgctcccccgagccttcccgtcgctcggagtcggggtcgccgtcctccagctcgtcggcctccgcctccccgtcctgctccggcggccgcaagaggaaggccgccgaatag

SEQ ID NO: 12498 - DNA, 1284 bp, Oryza sativa
  Clone ID: TFbOSC403595j.C1.o7.fg
atggcaacattgccgcaaatggccgcgaccaaggagcgtcaagaggcggctaacccgaccacgacgaccaggacgctggtcgagtccgtcaccaactggatccgcgtctactccgacggctccgtcgaccgcctcggcccgccggaagccgccgcgttcatggtcctcgtcccgccgtacgacgacccacgcgacggggtcaccgtccacgacgtcgccacggaccatggcgtcgacgtccgcctgtacctgacgacgacggcgccggccaggcgccgccctgttctcgttcatttccacggcggcggcttctgcttgtcccacgccgcgtggtcgctctgccaccgcttctacgcccgcctcaccgtggacctcgacgtcgcgggcatcgtctccgtcgtcctcccgctcgcgccggagcaccgcctacccgccgccatcgacgccggacacgccgcgctgctctggctccgtgacgtcgcgtccgggggcagcgacaccatcgcacatcctgcggtcgaacgcctttgcggcgccgccgacttctcacgcgtgttcctcatcggcgacagcgcgggcggcgtcctcgtgcacaacgtggcggcacgcgccggcgaggctggggccgaggcgctcgacccgatacgcctcgccggtggtgtccagctccacccgggcttcatcttgccggagaagagcccgtcggagctggagaacccgcccaccccgttcatgacgcaggagacggtggacaagttcgtcgtgctcgcgttgccgccgacgaaagacaccgagaagttcatctgccgcgccgatgtttacggcagcgagcccagtgacctcgccggaaagttcgcgccggtgcccaggtgcgagaaaggtggcaggctcttcttcactagctgcaagcggcacaaggggagtagcaccaggaaagagcgaaccgcgggggatggcacctgggtgaggcagaacagcaagggggtgaagaacaaggcaggggtcaaggtcggcgagacgcagaacttccgtttcaagaaggacgggagctacaccgactggctgatggaggagcaccactgctgccggcagcaagccgtcgccggcgacgaggagcccgtcatctgccggatgtatgtgtcgccgagggcgcctccggattccgcggcgcgccaggaatccgctgcttttgtgcagcagcagccggcgccgcaggtttccgagccgccgtgcgacaagaagaagagagatgatgtggcagaagaagcccctgccgcagcttag

SEQ ID NO: 12499 - DNA, 798 bp, Oryza sativa
  Clone ID: TFbOSC401567j.C1.o17.fg
atggcgatctgcgctgctgcagctgaccactcccgcgcatccccaagctccgcggcaacgcaaccaacaaccatctgctggagacccagcaaggtcaaggaggaagtagaagaagacggaatggttgtcgatcccccggacgacgccagcgaggcgtccgataatctgcgcgcgacaggtttccaggacacgccgacggtgggcgagctcgtcctgcgccacctccgcccgcgtctccgcggcttccactgcgccgacggcgacgtccccgtcatcggcgtcagggacgaccccgccgccgcggcgccgctggacctcgtcgcgcggcacgggggcgccgccgacaggcgccgcggcgaggcgttctacttcgtgcggcggaggcgctgccgccggccgaacgtgcggcggaccgtcgccgagggaggcggaggcggtggcggtgcgggcgggctgtggaagaagagctggaccgggtccggcaagtcggtgaccgacctcggcgtcgtcgtgccgtggagcaagacgtgctactgcttctaccggcgcgacgagggcggccggctgagcaccttcgggggagggtgggtcttggcggagtacgagatcacggaacccggtacgtaccggcgcgccgacgaggaggaagacgacgacgactactgggtactttgccacgtcaggaagacggcaagcaagaagaggaagcggaatcgctgcgatgaggccgtggctgcacgggctgtagccggtacggagtctaagtcgtatctcctatgtgggctgacagcgaattga

SEQ ID NO: 12500 - DNA, 1035 bp, Oryza sativa
  Clone ID: TFbOSC400792j.C1.o9.fg
atggcgagggccgtggcgtccggcagcagcggcggcggaggcggccagccgttcgaccccacggcggaggatatcgtcaaccggtacctgccgttgcgccgggcgctgcggtgcgacgcgctgccgaggcaggtgcacgacgcggatgtgtacggcgcgcacccggcgctgctcgcgtcggtgtacccggcggcgaacgagcggttcgagtggttcttcttcgtgtgccgccgtcagtgccccggtggccggcgcagggccgggcccggggactaccgcctctcgcaggaggcgaagcaccgcggcaacgcgttctgccacagcttccggtactacgagtacgaggacgccggcggcggcttcagggagaccgagtggcgcatggtggagtacggcgatcgcggccgcgacgccggcgccggaggctccgagggcttcgagctggtcgtctgcaaggtctacccggcgcgcggcggggcgctccacgagcggctcggggccgaccgggcggtgctcgcgacgcgccaccgcgccgacgaggacgccaagccgcaggtgctcgtccagctctacctcgccagcctccgcctcgggaacccgctcgcgtgccgcgtgcaccgcgccgacgacgtcttcgacgcgcacccggcggtgatcacggccgcgctccctgctgccaacgaccggtgcgagtggttcttcgccgccgtgcgcccgcgcgggcacgcgcaagggcacggggacggcgcgccgccgcgcccgcggaaggccgggccaggggcgtacgtgccggtgcgcgagtgccgcgtcgtggacgggaggcgcggggacatgggctgccgcctcgtgttctggtacagggaggacgacgaggaggcgaggcgggcgtcgcggaggacggagtggtggatggacgagtacaggttcggcccggacttcccgtacggcgagctgcccgcgcccatggcgcgcggcgaagacgaagagctggtggtgtacaaggtgtatcctaggctggtcggtaaccggcgataa

SEQ ID NO: 12501 - DNA, 1125 bp, Oryza sativa
  Clone ID: TFbOSC400978j.C1.o35.fg
atggcggcggctggcgcggatgggctccctccggggctcagattcgaccccagcgacgacgagctcgtcggccggtacctgctccggcgcctccagggccagcccctcccgctcgacggcgtcgtcctcgatgccgatcccctgagcgcgcagccatggaggcttctcgcggatcacggccggggcggcgacgaagccttcttcctcgcggaggcgcacgccaagaacgccaagggcaagcgccagaagcgcaccgtcgagggtggagggttctggcaggggcagaggatgtgcgtcgacggcaagaagctgctcgtccccggcggcgacgacggcggcggcggcggcgaagtactggagatcgcgtggcgcaagtatgtcctgagcttctttgccgagggggagagggggagctcggggtgggtgatgcacgagtactccgtgacggcgccggctgacctcgcctcgtcgccgctccggctctaccgcatccgattcagcggctacggcaagaagcggaagagagagccggaagacgacggtcgagcacatggcgcgccccggcgggctgaggcggagactgctctgttcgatctggaggtcgggccaccgccaccgccactgctcgttcctcctcccgcggcggcggcggcggatcatggcaccgatcagagctcctccggtgtgaccgacatggtgttccgtgatcttcccgacctgatcgctgatgctggagctgctctgcccgatcagaaccaacaggattggtctgaagtcgccgatcagagctccttctgtgtgatgggcgatgactcttctctgctgctccctgatcttcctgggatgattgatgacaatgagcaccagcagtttgtgcgcgagtgcgacatgccacacctgttcgtcccgcaagcagaggaagccattgctggtggtggtgcagcatcggcgccatcggcggacaaccagaactgcgagttcaatgacggcgaggacatggcattgtcagattttgagtttccggagagtattgatgaggtgcttagctacatcgacttcagcacgagcgacacgagctgccgcgacttcaccatggacgagctgttcgatctgccggtggactag

SEQ ID NO: 12502 - DNA, 1554 bp, Oryza sativa
  Clone ID: TFbOSC401327j.C1.o19.fg
atggagtctttacgtgacatggtcctcccaccaggatttggattccacccaaaagatactgagctcatttctcactatctgaaaaagaaaatacatggccaaaagattgaatatgagatcattccagaggtggatatatacaagcatgaaccatgggatttacctgcaaagtgcgatgttccaactcaggataataagtggcatttcttcgctgctcgtgacagaaagtatcctaacggttctcggtcaaatagggcaacagttgctgggtattggaaatccactggaaaggatcgagccataaaaatgggcaagcaaactataggaacgaagaaaactttagtttttcatgaaggccgcccacccactgggagacgtactgagtggatcatgcatgagtactatatagatgagcgtgaatgtcaagcctgccctgatatgaaggatgcatatgtactttgtcgtattaccaaaagaaatgactggatcccagggaatggcaatgagttggacaacagtgatcctcatccagaaccatatgatgctcctccatcagttatcagtactgaacagctaaatcctgctgctgaaccagttgtcggtgttgaagctgcaccagttaccgttgctgaacctgacggtgttactacgtcagctatcactgctaatataccatctcctagtgatgacattaatctggatgattggttgaatgaactatttgatcctttctttgaccctgaacagagtctggcttctgctgatctgtctccagatgaacaaaatgttgaatcatcggtgagtttcttcacagtcactgtgtttgcagttcttagcctgtgcatacttgctcatcgcgctatcttccttcttaatttacagaacgtaggtgctttggctccaaaggtggaacaagactattctagtcctaacgagaacgtagtagatgatacggagtacttgttgcctgaagatgtttacaacatactgcaccctggtacagatgacttcaatatgctccagaatcctttggatcagtaccccattcaatatgcaaccgatgtttggagtggaattcagaaggaagaactgtggtcgccccaggccaatgctgagcctagtcagtcgaatgaagctgctgataatggaattataagacgttatcgtagtatgaaaacacctgaaactagtgtgccgcagttcaagggtaaaactcaggctaaaatgcgggttgggatcaacaagatggctacgagtagttctgaatctatcaaccagactatcaagtttgagaacagtggtcgtcttgttgagcaccagaagaaccaagcgcatgatgtagcttctaccaagcggtcagacgcagggaagccaagtacagagctcagcagcaatcgaggatttctcaggggtatccgaaatgcatttgcaggctgttcggatgctcgatggaacatgatacttgttgcgggtttcgctattggagtcgctgtggtagcgcttcatataggccaacgccttggattaagccagagagatcagcagcatacctag

SEQ ID NO: 12503 - DNA, 831 bp, Oryza sativa
  Clone ID: TFbOSC401434j.C1.o2.fg
atggcggcggcgaagcggcgagtgcgcgacgcggaggcggacctgaacctcccgccgggcttccgcttccaccccaccgacgaggagctggtggcgcactacctctgcccgcgcgccgcgggccgcgccgccccggtccccatcatcgccgagctcgacctctaccgccacgacccatgggacctcccccaccgcgccctcttcggccgccgcgagtggtacttcttcaccccgcgcgaccgcaagtaccccaacggctcccgccccaaccgcgccgccgcctcgggctactggaaggccaccggcgccgacaagcccgtgctgcacaacggcaggacggccgggatcaagaaggcgctcgtgttctaccacggcaagcccccccgcggcgtcaagacggagtggatcatgcacgagtaccgcctcgccaagaagggcggcgccgccgccgccgcgggcgcgggcgcgctcaggctggatgactgggtgctgtgccggctgtacaacaagaagaacgagtgggagaagatgcagagcaggaaggaggaggaggaggccatggcggcggcgcagtcgtggggggagacgcggacgccggagtcggaggtcgtcgacagcgacgcgttcccggagatggactactcgctgccggcggcgtcgttcgacgacgccctgctgcccaaggaggaggcgcgcgacgacgactggctcatggggatgagcctcgacgacctccagggcctcggctcgctgctgcaggccgacgacctctccatgctcgcgccgccgccggcggcgaagacggagccgctcggcgcgccattcttctga

SEQ ID NO: 12504 - DNA, 675 bp, Oryza sativa
  Clone ID: TFbOSC400708j.C1.o1.fg
atggagcggtgcagcgtgctggggctgggcggtggcgggggcgggggcgggcggctggacggcgagctgccgccggggttccggttccacccgacggacgaggagctgatcacctactacctgctgcggaaggtggtggacgggagcttcaacgggcgcgccatcgcggagatcgacctgaacaagtgcgagccgtgggagctgccggagaaggccaagatgggggagaaggagtggtacttctacagcctccgcgaccgcaagtaccccacgggactccgcaccaaccgcgccacgggcgccggctactggaaggccaccggcaaggaccgcgagatccgcagcgcccgcaccggcgccctcgtcggcatgaagaagaccctcgtcttctaccgcggccgcgcccccaagggccagaagacccagtgggtcatgcacgagtaccgcctcgacggcacctacgcctaccacttcctctcctcctccacccgggatgagtgggtgatagccaggatcttcaccaagcccggcgtgttccccgtcgtccgcaagggccgcctcggcataagtggcggcggcggcgacacctcgtgcttctcggactccacctccgcctccgtcggcggcgggggcggcacctccgcctcgtcggcgctgcgcgcgccgctggactga

SEQ ID NO: 12505 - DNA, 1122 bp, Oryza sativa
  Clone ID: TFbOSC401682j.C1.o1.fg
atggagcggtgcagcgtgctggggctgggcggtggcgggggcgggggcgggcggctggacggcgagctgccgccggggttccggttccacccgacggacgaggagctgatcacctactacctgctgcggaaggtggtggacgggagcttcaacgggcgcgccatcgcggagatcgacctgaacaagtgcgagccgtgggagctgccggagaaggccaagatgggggagaaggagtggtacttctacagcctccgcgaccgcaagtaccccacgggactccgcaccaaccgcgccacgggcgccggctactggaaggccaccggcaaggaccgcgagatccgcagcgcccgcaccggcgccctcgtcggcatgaagaagaccctcgtcttctaccgcggccgcgcccccaagggccagaagacccagtgggtcatgcacgagtaccgcctcgacggcacctacgcctaccacttgctctcctcctccacccgggatgagtgggtgatagccaggatcttcaccaagcccggcgtgttccccgtcgtccgcaagggccgcctcggcataagtggcggcggcggcgacacctcgtgcttctcggactccacctccgcctccgtcggcggcgggggcggcacctccgcctcgtcggcgctgcgcgcgccgctggctgaggcctcgctgttcgccgccgccgcggcgccagccgttgacggcgccgacagcagcaactacggcgggggcggcggcgccggcagcgccaccgccaccgccaacttggtcaccggccttgagctcgtgccctgcttctccaccacagcccacatggatgcctcgttcggcaccgggcagtacaacccggccccgctggccgtcgagccgccgccgccgccgccggccttcttcccgagcctccgctcgctgcaggagaacctgcagctgccgctgttcctctccggcggcatgcaggcgggcgtgtcgtcgcagccgctcagcggcggcggggccttccactggcagtccggcatggacgtcaaggtcgagggcgccgtcggccgcgcgccgccgcagatggccgttggccccggccagctcgacggcgcctttgcatggggcttctag

SEQ ID NO: 12506 - DNA, 1077 bp, Oryza sativa
  Clone ID: TFbOSC100569j.C1.o6.fg
atgtggtcttggcttataactggtaggggagttgctaagaaaataagaaatgcacctcattgctctagtcgcccaataagtgaattgggtgcagaagcacagatggaatgtccaaactgcaaacatgttattgataacagtgatttgcaaaaaggtaggttattgctgatgagaaaggaggttgctatacagtggcctgggctgcctgctggtgtcaagtttgatccatctgatttggaattgcttgaacatttggaacaaaagattggcctggggggttcaaagccacatacattcattgatgaatttattccgactatagataatgatgaagggatatgctattcacatccggaaaatcttcctgggaaatccaaagccatagttgaaaagggggttacaaaaggttggaagaaaataatggttctgtacaagagttcacaaagaggtgccaaacctgataaggctaactgggtgatgcatcagtaccatcttggggcagaagaagatgaaaaggatggggagcttgttgtctccaaaatctcctaccagttgcatggaaaacagatagacaagtctgaaacaggaaatgctgatgaagaatctgatgcatttgctgcaagggttggtccaaaaactccaaagtcaaacaccccacagccatgtcgcttaaaaaacagtccatgtgaaacagaaaattacgatcccatcttggaggaccaggacgaagaggagtctaacatacctattgttagcctgaaggatgatgctgggaatcctgcgtggtgcgctggagaaacccaggccgcgagggaagcagttcaggcctgtcctaacttggatgaatccctgcgctgtcatgaagttctggattccttctatcatgaaacgttgcttccttctgaccgcccaattctgtcccaaggcgggaatgagattcttgacaggaacctgaatgcggtgtatggactacctgatctctacaatgtagaccttggaacacctccagattttcagcttgctgatttgcagtttggatcacaggagagcattggcaactggctggatagcatctag

SEQ ID NO: 12507 - DNA, 1599 bp, Oryza sativa
  Clone ID: TFbOSC401435j.C1.o7.fg
atggcagaactaccaccggaaggccgcggcggcggtggcaacaacaatgggaagtggaaggggaaggaaaaggtggtgcccgagtacggcaagaaccggcacggcatgtccgtcggctggtacttcgtccccaaggatctggagctctttgccatcctcaagtgcaagctcgtccgcggccagctccccggcgccctcaacaacgtcttcgagcatatcaggatcctcgaattccaccccgccctcctgcatgagatgtacatcaagaacgaggaggatgggtacatctacttcttcagcaagaggcagttcacgacgaaggcagggaacaagaggcggccgacgcgggtgacaaagggcgggacgtggaaggcgtctggcgggagcaagacagtgaggagcaagaaggtcggcggcatcgacgttggccagaagctcaccatggtgttctacgagcgcaggtttgagggtgaccggaaccccatcaagaccaattggggcatgcatgagttcaccaagatcattgatggcaccaaaaaccagcttgaggaccttgccgtgtaccgcctgtacaagatcaaaaggaaggaggacgaagaaccgtcgaacactgccgccgcggcgtcgagcaccgacgagccctccacgtcgtcggcattgccacctcctacgccaccgcggccattgccggacatggccggaccgtcgtcagcaacgccgctactgccactgcaattgccgggcctggccgggtcgtcgtctgcgatgtcgctgcctgcactgcagctgccgggcatggccgggtcgtcgtcggcgatgccgctaccgccactatcgttgccgggcctggctggagggatgatgtccatggcggaccaggcgaacatggcctcgacgtcgcaggcgtccacaccgtcgtcggagctcctgcaagactggtacgacgagttcgagatcacgtacggcgccgtggctccgccgtctcctagcacgatcagctgggtggcgccgcagagctcgccgacggggtggtggccgtcgccgaacggcgggccggtgcagcacgacggctacctcgggatggcagcggatccaacgtcgtacatgctggaaaacctgttgcccaccgcggcgatcccgccggagccgatgatgccgccgacgagctcgccggcgccaccaccagccgtcgaccaccaccaccggctctcgcctccgcatgacgccgccggcagcaactacaaccacccggagctcgccgactacaacggcggcgtccaggcgcagcacgagcatcagtatcacccacaggagccgcaggcatcgctggtggatgccgaggacggctacagcgccatggccggtggcgacgacgcgcagctgggcggcgcggagcttgacaccgaacgaatcgccgaaatggtaaaccatataatggatggcgaattcgagttcaaattcgaggacaacaccgtccttaagtacaacgaagtctttcctgacaatgatgaggtggtggcggcgccgatgatgatcgacggtggtagggatggcgatggcgcagatggaggtgatggagacgacccattcgacaattag

SEQ ID NO: 12508 - DNA, 1347 bp, Oryza sativa
  Clone ID: TFbOSC900188j.C1.o4.fg
atgacgccgcgcgcctccaacctcaccggcgtggagatctactcgccggtggagatgaagtggaaggagaggagcggcacggcgaagacggcgaagatggcgaagcggcgcggcggttgggaaaacgacgcgacgaggatggcggcgggcgagcaggagcggcaggcctcgcaggtgcttgggtcgatccaagcaagaatgagcagcgacggcgcctctggaagcattggaatgaagcacgacgacggcgatcaccggccgagcaccggagcgtcgtcgcggcggtgccccagctgcggccacgaccctgactgcaacaagccgttcgacatggttgggatgcctgccggcgtcaggttcgatccgacggaccaggagctgattgagcacctggaggccaaggtgaaggatggcggctcaacatcgcaccctctcatcgatgagttcatacacaccattcaaggagaagatggcatctgctacacacatcctgagaacctgcccggtgtgacaagggatggcctgagcaagcacttcttccaccggtcagccaaggcctaccccactggcacaaggaagcggaggaaggtcctggctgatcagcagcctgacgaccatccacaggccagcaagggcagaaatgtcgcggcggcggagacacggtggcacaagaccggcaagacgcgggagatcacggtgcgcggccagcccaagggctgcaagaagatcctggtgctctacaccagcttcggcaagaagcgcaaggcggagaagaccagctgggtgatgcaccagtaccacctcggcgagctggacgacgagaaggaaggggagctcatcctctccaaggtcttctaccagacgcagacgcggagcgccgccgcagcagaggcaccggtaagctcgggtgctgccatggaggtgcagggacagcagcagcaagtgctgaagctgcaggctgatgatggtcacttcagctcagctcctaccaagaagagactgcatcaggatgttgtagcacaagtaaaagttgatcggggtcaccactgcatgccagcacaacgccaagtcaacttcaatttgaaagtaactcctgtgcccaccaccagttcattccctgtcgttgtcgacaaacagttgtattctcctgtggcgctattccgaagtgaacatcttcatgtagttcaacattacgacacttccattttacaaattaaaccttttgacttgtttacattctacagggaagaacttcaattcatcagccccaaaaagcagattggcctcaccagcgctggcctcctgacaaccaagatcaacatggataacttcctggattcacagtag

SEQ ID NO: 12509 - DNA, 1671 bp, Oryza sativa
  Clone ID: TFbOSC900220j.C1.o29.gm
atggcgaagcggcgcggcggttgggaaaacgacgcgacgaggatggcggcgggcgagcaggagcggcaggcctcgcaggtgcttggtgagggtgctcgtcggcatcccggtcttgatccagatctccgtctgcgaggcagcgaggacgttgtccaggaggactgtcgtcggcggcggcggcaccgccgcgacgctaggtctagcgggctgcctcgcctcgccgccaccgccaagccgacgagctcgccgcctccccgcgcctccgccggctgcgcgtgtggctccagctccgccgccgcggtcgcccgccgctcctcctcatcggcgagcacggagaggaggctgacgccgccgccttgctcctcgttggcgagcacggagaggaggctgacgccgccaccttgctccccccgccgcccgccgccgccgccttgctcctcctcgtcggcgagcacgaagaggaggctgacgccgccgccgccttcctccccacccgtcagccggcgccgccgtcctgcccgttgccccagagagaagaagagagagagagagaagaggaaaggagagaagaggggaaagaaagaggaggctgacctggacaggctgacatggtcgatccaagcaagaatgagcagcgacggcgcctctggaagcattggaatgaagcacgacgacggcgatcaccggccgagcaccggagcgtcgtcgcggcggtgccccagctgcggccacgaccctgactgcaacaagccgttcgacatggttgggatgcctgccggcgtcaggttcgatccgacggaccaggagctgattgagcacctggaggccaaggtgaaggatggcggctcaacatcgcaccctctcatcgatgagttcatacacaccattcaaggagaagatggcatctgctacacacatcctgagaacctgcccggtgtgacaagggatggcctgagcaagcacttcttccaccggtcagccaaggcctaccccactggcacaaggaagcggaggaaggtcctggctgatcagcagcctgacgaccatccacaggccagcaagggcagaaatgtcgcggcggcggagacacggtggcacaagaccggcaagacgcgggagatcacggtgcgcggccagcccaagggctgcaagaagatcctggtgctctacaccagcttcggcaagaagcgcaaggcggagaagaccagctgggtgatgcaccagtaccacctcggcgagctggacgacgagaaggaaggggagctcatcctctccaaggtcttctaccagacgcagacgcggagcgccgccgcagcagaggcaccggtaagctcgggtgctgccatggaggtgcagggacagcagcagcaagtgctgaagctgcaggctgatgatggtcacttcagctcagctcctaccaagaagagactgcatcaggatgttgtagcacaagtaaaagttgatcggggtcaccactgcatgccagcacaacgccaagtcaacttcaatttgaaagtaactcctgtgcccaccaccagttcattccctgtcgttgtcgacaaacagttggaagaacttcaattcatcagccccaaaaagcagattggcctcaccagcgctggcctcctgacaaccaagatcaacatggataacttcctggattcacagtag

SEQ ID NO: 12510 - DNA, 882 bp, Oryza sativa
  Clone ID: TFbOSC401940j.C1.o3.fg
atggatcggcatgaggaggaggcaggagagtctccatgtgtgccgccggggttcaggtttcacccgacggaggaggagctggtgggctactacctcgccaggaaggtggcctcccagaagatcgatctcgacatcatccaggagctcgatctctacaggatcgagccatgggatctgcaagagcgttgcaagtacggtgggcatggcggcgatgagcagacggagtggtacttcttcagctacaaggaccgcaagtaccccagcgggacgaggaccaaccgcgccacggcggcgggcttctggaaggccaccggccgcgacaagccggtgctctcgtcgccgtcgacgagggtgatcgggatgaggaagacgctggaggaaggttgggtggtttgccgcgcgtttcagaagccgatgcccaaccagcagcagcacaggctgtcctacggctgcatccccggcagctacggcgccggagcctacgccgccgtccccgacaactacagcttgctgctgcaccacgacaaccctagcttcgccgggcggccattgatgagcgccgctgcctcagctctcttcgccaacaacaacaataacagcgtcgtcgaccacagcaacattctgagttcagagtccaagcttcacttctccgacatgatgccgcctctggagagccccaccatcgtcgacggcgagggctacgtctcgcaggctagcagctgcgtcgacgtcgatcagcaagccggcatcgtcgactggaacctgctcaccagcttgctgccgccgccggcgcatcagctcttccaccacctgccttccgcttctagctccaagaacagcaacaacatttcttcgtcaggcttcatcgatgaccgagactga

SEQ ID NO: 12511 - DNA, 1056 bp, Oryza sativa
  Clone ID: TFbOSC400651j.C1.o3.fg
atggtggagcctgtgaaatcggagcttggcagcctgttcttacctccaggcttcaggtttcatccgacggacgctgaagttatcttgaactatctccttgagaagttcatcaaccctagcttcacctccttgcccatccacgaggtcgacctcaacaagtgcgagccatgggatctcccaacggcgaggatggggaacaatgaatggtacttcagccgcaaggacatgaaatacccgacggggatgcgaaccaaccgagccaccaaagagggatattggaaggccaccggcaaggacagggagatcttcaagcctgccatttacgaaggaagcagcaagaacaataagcagcttgtcgggatgaagaagacgctggtgttctacatggggagggctccaaagggcaccaggaccaactgggtgatgcacgagttccgtccccacgccaacctccacaaccactacccaaaccttcgtctcaatcccaacgaatgggttgtgtgcaaggtgttccacaagaagcagggagacgaagccatcaacaaccagcagcagcagcctgccgttgatcaagccgacgacgacgacatctttcagctagatgacatcttcgccgaccccagcatctacgacttcagcaactcatctgccaacatcttgtcggcgccgcccaacaacaatgcggttcattcctccgtttctgcaggtacgacgatgactagtacgactaccgccagtagcttccagcatcagccaaactgctatagtgcgcctctgcagcagcacgtctcctcttggaataatacgcctggagctggaggagcccatggaattggaagcagctactacaacttgcagcagcagcagcagcaggcagcaatggtgaaagacctagaagatatcattgctgtcccggattatggtacgctactgccgagcagcaacaagggttcatcaataaggtcggcgacggctggagtttcgcagcagaatccccttggcgtgccgcagtacaagatagagaattatggggatcattacatatcacgagagtaa

SEQ ID NO: 12512 - DNA, 152 bp, Oryza sativa
  Clone ID: TFbOSC100708j.C1.o4.hg
atgcatcctaatggcgcgccgctggccgtgccaccgggtttccggttccatccgacggacgaggaattgctctactactacctgaggaagaaggttgcttatgaggccatagatctcgacgtcatcagggagattgacctcaacaagcttga

SEQ ID NO: 12513 - DNA, 996 bp, Oryza sativa
  Clone ID: TFbOSC400302j.C1.o15.fg
atggggagggaaggagaggagttagaaaggaggaagaggaagggattatgggggagggaaggagaggagttagaggagaggaggaggaggaagatgaagagatgggatgaagagataagtgatgatagtatgatgatgggtggtgaggtgagggcgatcgagtcgaggctgcctccgggtttcaggttccatcccagcgacgaggagctagtcggctactaccttcggaacaagcagcagcagcagcagcagcagacggcggccacctccatgctcgtcgaggttgacctccatgcctgcgagccatgggacctaccagaggtggcgaaggttggttcggatgagtggtatttcttcagctggagggagaggaagtacgcgacggggtggcgcaggaacagagcgagcaagcaagggtactggaaggccaccgggaaagacaagcccatccttcatccgacggtggccggcgccaggaagacgttggttttctactccggtcgcgcccccaacggccgcaagaccgcctgggtcatgcacgagttccgcctcctccatcatcatcatcatccaaacccaaatattcagaatatgcagcagcaggagggggatgactgggtgctgtgcagggtgttccgtaaggggaacaacagcaatggacaacctctagccacttcttcgccacctgctcatcacctggtggagtcactcatcagctcacctgcaccaactatcatgagcgatcacgatcggctcttcaccatccagctgccgcatcaccaacattgtgatgagcagtactttttcttagatgacgatgaacagcaccagcagcagctgctagatctttcagtgctccaagctccaacctcgttcgagtctgagcaagctccaggccacggtggcatggagattaatatcgcagagatggagagcttcgacacgacctgtgctgcgctgcaagacgcgagcgattactgcatgcagctctattaa

SEQ ID NO: 12514 - DNA, 879 bp, Oryza sativa
  Clone ID: TFbOSC400311j.C1.o13.fg
atggagcagcagcggagcaggtcgacggcggcaggaggagaggtggaggtggagcagctgccgggattcaggttccatccgacggaggaggagctgctggagttctacctgaagcaggtggtgcaggggaagaagctcaagttcgacatcatccccaccgtccacctctaccgccacgacccgcgcgagctccccggactcgcccgcatcggcgagcgcgagtggtacttcttcgtcccccgcgaccgcaagcaggccaccggcggcggcggcggcggtaggcccagccgcaccacggagcgcggcttctggaaggccaccggctccgaccgcgccatccgctgcgccgccgaccccaagcgcctcatcggcctcaagaagacgctcgtctactacgagggccgcgcccctcgcggcaccaagaccgactgggtcatgaacgagtaccgcctccccgacgccgccgccattcccgacaccatgcaattgcaaatgcaacacgacgacatggtgctctgcaaggtctaccggaaggcggtctccctcaaggagctggagcagagggtcgccatggaggagcttgcacgctccaccacgtcctccggcacccacaacaccggctcgcccctgcagcaggactcctcctccatctccatctcctcctcctcggacgccatgaagaaagaggtggtgggggtggatgaggcgtcggcggcggcgcatgagctggtccgcccggcgacgctgagcctgccgcagctggaggtggcgaggccgcagagcgggctggagtggatgcaggagccattcctgacgcagctgcggagcccatggatggagacctggtcgccctactacgccagcgtcctcaacttctga

SEQ ID NO: 12515 - DNA, 1482 bp, Oryza sativa
  Clone ID: TFbOSC400785j.C1.o19.gm
atgagcatatcggtgaacgggcagtcggtggtgccaccggggttccggttccacccaacggaggaggagctcctgacatactacctgaagaagaaggtggcctcggagcgcatcgacctcgacgtcatccgcgacgtcgacctcaacaagctcgagccatgggacatccaagagaggtgcaggattgggtcagggccgcaaaacgactggtacttcttcagccacaaggacaagaagtacccgacggggacgaggacgaaccgggcaacggcggccggcttctggaaggccaccggccgcgacaaggccatctactccagctccaaccgcatcggcatgcgcaaaaccctcgtcttctacaagggccgtgccccccacggccagaaatcagactggatcatgcacgagtaccgcctcgacgacccctcctccgcctccgcctccgtctccgtcaacctcccctcctactactcttcctcctcatcgtcatcttccccaatgcacggtgtcgccggagaccaaggagctcaggaggaaggctgggtgatctgcagggtgttcaagaagaagaacctcgtgcaccacggcggcggcgccgccgcggcgagccaccacgcggcggccaagctcgcggcggcggccatggagggcagcccgagcaactgctcgacggtgaccgttagcgaccacgtcaaggcgcagatgctgcactcgtccgccagcgacgacgccctcgaccacatcctccagtacatgggccgctccggctgcaagcaggagaccaagccggcggcgatgtcggcgtcgtcggcggcagcggcggcggcgctggagcagcacctcagtacgcctcagtacggcaagttcatgaagcttccgccgctcgagcacgtcgccggcggcgtgggcctcctggcggcggccggcggcggcggcgagtactgctccgccgccgacgcgtcggggatcgccgactgggacacgctggaccggctcgcggcgtcgtacgagctcaacggcgccctctccgacgtcgcctccggcaagaacatggccggcttcttcgacgtcgtcgatcagcccgccggcgccgccgccttctcctccggcgacggcgacctgtggagccttgcgcgccttcatatacgggaggtggcaattaagataggcgtgcatggcgatggaggcgagcgacgtgtgcagggaaagggatgtgacgacccgagaggaaggttcgtcgcatgcggaaacgccgaaaagaggttgagagtgagacgacgcaagcggacgagccataaaaccgggtataacgccgcctccatccgccgtgacgaccgcggcgtgaggatgttgtacacaagttggaggtgcagccacgacgggagaaacaccttcacgggcacatcatcgtcgggcacctctgacgacggcggtgggagcttcacctcgggctccaacaataggggcggaagtcgagcttag

SEQ ID NO: 12516 - DNA, 951 bp, Oryza sativa
  Clone ID: TFbOSC408811j.C1.o12.fg
atggccgacgacgacgagatcgctcttgagccaggctacgtcttccacccttccgacgacggcctcatcaccctcttcctccgccccagcatcgccaagatccccttcgaggaccgcctcatcaaccacgccgacgtctactccgccaatccggccgagctcgtcggcgagcacagaccggcgccgggcacccatgggagcagcagcgtctggtacttcttctgctccccgcgcttcaccagcaagcgcaagacctccgggaggcggcagcgcgcggtcggcggcggcggcggcggcgagagcgtgtggaagtcggagggcggcaagaaggccgtgatcggcgccgatggccgccgcgtcgggtacctccagaagttctcctatggcgtctacgagtcgtcgtcgtcggggtcggcgcgcacgttcacgaggctagggtggtgcatgacggagtacggcctcgacgacgacgccatcgacggagcagacaagcaggtgctctgcaaggtctaccgctcgccgcgcgcggtctgcgcggaggcgcgcacggcggcggcggcgaagtcggccgattcgccatgctccggctcgaagaggaaggcggacgacggcgcggatcacccggaggcgccgcccagcgcgcggccgcggcaagaggaggccgggagcgagcagccggcgatcctgccggagttggacctggatgcgttgctgtcggcgccgatggacgacagtttgggagtggaattcgacacggccacgacggagcagtacatgaggtatctgatgaacgacgagccattgccgtgggctccgacgatggaggttgccggcggcggagacgaattcatcgagacgacgaacggaccttgcatgggcgaagaggagatcatccagcggctggcttccggagaaaccctcgacgacattcttggctcgaaccctaattaa

SEQ ID NO: 12517 - DNA, 771 bp, Oryza sativa
  Clone ID: TFbOSC400259j.C1.o78.fg
atggccgacggcggcggccgccgggctcccgggttccgcttctacccgacggaggaggagctgatatgcttctacctccgcaacaagctcgacggcctccgcgacgacatcgagcgcgtcatccccgtcttcgacgtctactccgtcgacccgttgcagctctcagagattcaccacgagatgctgggcggcggcggcgaggagggggagccgtggttctacttctgcccgcggcaggagcgggaggcgcggggcggccggccgagccggaccacgccgtccgggtactggaaggcggcgggcaccccgggggtcgtctactccgccgaccgccggcccatcgggatgaagaagaccatggtgttctaccgcggccgcgcgccgtcgggaaccaagaccgcgtggaagatgaacgagtacagagcattccactaccccgacgcctcctccgcctccgcctccagcgccggcgccgccgcgccaccaaaccatcttcctccgcagctgaggagcgagttcagcctgtgtcgactgtacaccagatcgggaggcatccggcaattcgatcggcggccgctagcgggtggtggtgatgagaacccggggccatccatggctgccgcggcggcgtcacccgaggaaaacgacggatcaggaagttccatgcagcaactggagctgatggatcaaggtggcgccgttgatccggattgggaccagtgggacgacttggccaccttgaccgcacttctgtactggcctagagattag

SEQ ID NO: 12518 - DNA, 615 bp, Oryza sativa
  Clone ID: TFbOSC418721j.C1.o3.fg
atggggaaggagatgaatctgatccgagaagacgagtacggcggcggcggcgtcgggttcgagccgacggaggacgagctgatgctccacttcctccgtccgcagctgcgcgggttcgcgccgcgcgtggcgggcgccgtggtggaggccgacccctgcggcgcggcgccgtgggagctcctggcgcggcacgggaggcgggaggaggggttcttcttctcggcgcgcgcgcggaggaagccctcggtgcggcggaccgtggcgggctgcggcggcggcggtggcggcggtggcgcgtggatgcacagctccaccaagaacgggcagtccgtgaccgacctcggcgtggtggtgcggtggtgcaggatcaactactgcttctacgtgcgcggcgagatggggcagcagcggagcaccgggtggatgatggccgagtacgagatcaccgacccgcggtgctaccgccgcgccgacgacggcgaggaggacgacttctgggttctctgccatgtcaggaagagctcgaggccccaagccgccaagatctctccagccaagccagcacggcggcgcaagcccgccgccgccgccgccgcggatgtccgggctgcgtga

SEQ ID NO: 12519 - DNA, 858 bp, Oryza sativa
  Clone ID: TFbOSC407962j.C1.o2.fg
atggaggaggagtggtgttgtgtggcgccgggattcaggttccacccgacggaggaggaactggttggttactacctggcacggaaggtggtcgggcagcaggacgacgggatcatccaggaggtggatcttaacagcatcgagccatgggacctgctgcaagctcagcagcatgatcaggagtactactgctacttcttcagctacaaggaccgcaagtaccccagcgcgcgagggacggggacgcggaccaaccgcgccacggcggcgggcttctggaaggccacgggccgtgacaagccggtgctctcctcctctcgatcatcatcgtcgccggcggtgatcggcatgaggaagacgctcgtcttctaccgcggccgcgcgcccaacggctgcaagaccgactggatcatccacgagtaccgcctcgtcgcccaccatcagcagccggacggcagctgctgggtggtgtgccgcgcgtttcacaagcccaccaccaccaccctgcagcatcagcttcacctgcacaggccgcctcctctacttcatcatcccggctattacgccgaacaaaatttatatcctcctctcgctgctgctgctggtggcggcggcttgctctgctcacttgccttggacatggagttggaggacgaggaggatgaatccaagatgatgatcttaagcaatgataatattccgctggtggtgagtccgactgccgtacacacacaaggcaccggcggcgacattattaacgacgctactaccgcgcctgctgctgctgctgctgctgatcatcgtcgacaccttgctccaccaccaccacttcacttgttagctaattcagtcgattaa

SEQ ID NO: 12520 - DNA, 873 bp, Oryza sativa
  Clone ID: TFbOSC900274j.C1.o4.fg
atggaggagtggtgttgtgtggcgccaggattcaggttccacccgacggaggaggaactggttggttactacctggcacggaaggtggtcgggcagcaggacgacgggatcatccaggaggtggatcttaacagcatcgagccatgggacctgctgcaagctcagcagcatgatcaggagtactactgctacttcttcagctacaaggaccgcaagtaccccagcgcgcgagggacggggacgcggaccaaccgcgccacggcggcgggcttctggaaggccacgggccgtgacaagccggtgctctcctcctctcgatcatcatcgtcgccggcggtgatcggcatgaggaagacgctcgtcttctaccgcggccgcgctcccaacggctgcaagaccgactggatcatccacgagtaccgcctcgtcgcccaccatcagcagccggacggcagctgctgggtggtgtgccgcgcgtttcacaagcccaccaccaccaccaccctgcagcatcagcttcacctgcacaggccgcctcctctacttcatcatcccggctactacgacgaccaatatttatgtcctcctcctgctgctgctggtggcggcggcttgctctgctcccctgccttggacatggagttggaggacgaggaggatgaatccaagatgatgatcttgagcaatgataatattccgctggtggtgagtccgactgccgtacacacacaaggcaccggcggcgacattattaacgacgctactaccgcgcctgctgctgctgctgctgctgctgatcatcgtcgtcatcctgaattgctagctgcaggtcccatcgacaccttgctccaccaccaccacttcacttgttag

SEQ ID NO: 12521 - DNA, 990 bp, Oryza sativa
  Clone ID: TFbOSC900019j.C1.o16.fg
atggagtgcggtggtgcgctgcagctgccgccggggttcaggttccacccgacggacgacgagctggtgatgtactacctgtgccgcaagtgcggcggcctccccctcgccgccccggtgatcgccgaggtggacctctacaagttcaacccatgggatctccccgagagggcgatgggaggggagaaggagtggtacttcttctcgccgcgggaccggaagtacccgaacgggcagcggccgaacagggcggcggggacggggtactggaaggcgacgggggcggacaagccggtggggtcgccgcgggcggtggcgatcaagaaggcgctcgtcttctacgccgggaagccgcccaagggcgtcaagaccaactggatcatgcacgagtaccgcctcgccgacgtcgaccgctccgccgccgcccgcaagctctccaagtcctcccacaacgccctcaggttggatgattgggtgttgtgccgaatctacaacaagaagggagtgatcgagaggtacgacacggtggacgccggcgaggacgtgaagccggcggcggcggcggcggcggcgaagggtggtcgcatcggcggcggcggcggcgcggcggcgatgaaggtggagctctccgactatgggttctacgaccaggagccggagtcggagatgctgtgcttcgaccggtcggggtcggcggaccgcgactcgatgccgcggctgcacaccgactccagcgggtcggagcacgtgctgtcgccgtcgccgtcgccggacgacttccccggcggcggcgaccacgactacgccgagagccagcccagcggcggatgcggcgggtggcccggcgtcgactgggccgccgtcggcgacgatggcttcgtcatcgacagctccctcttcgagctgccctcgccggcggcgttctcccgcgccgccggcgacggcgccgccttcggcgacatgttcacgtacctgcagaagccgttctaa

SEQ ID NO: 12522 - DNA, 972 bp, Oryza sativa
  Clone ID: TFbOSC401022j.C1.o2.fg
atggaggaggggttgccgccggggttccggttccacccgacggacgaggagctggtgacgtactacctcgcccgcaaggtctccgacttcggcttcgccacccgcgccatcgccgacgtcgacctcaacaagtgcgagccatgggacctccccagcaaggcaagcatgggggagaaggagtggtacttcttcagcatgcgcgaccgcaagtacccgacggggatccgcaccaaccgcgccacggactccggctactggaagaccaccggcaaggacaaggagatcttccacggcggcgcgctcgccggcatgaagaagacgctggtgttctaccgcgggagggcgcccaagggcgccaagaccagctgggtgatgcacgagtacaggctccagtccaagttcccctacaagcccgccaaggacgagtgggtcgtctgccgcgtcttcaagaagctccagtgccacctcgccaagccccgcccgccgcacgacgacgtcgacggagacggcgcctcgccgccggagatggtggacgcctcgtcgctcggcgagcttggcgagctcgacgtctcctccatcctcctcggcggcttcgcgccgccgtcgggcgagctctgccatggcggcggcggcggagacggtttcggcgcgcacaggcttcatgtcggcgcgtacatgagctggctgcaggcggcggcggcggccaaccagggcatgttccagtggccggcggccacgcaggcggggctggtcggaggcaccgtgttcgcggcggcgcacaaggcggcggggacgatgccgttcggcggcgggtgcagccagcagcaagcgcgggacgtgggcgtttctctggcgaacgtaggaggaggcgatgcgttgttcggcggggcgccgctggcgaaggtggacatggaatgcggcgagcaggcgccgcagctggacatggacgactccacatggagagccttctga

SEQ ID NO: 12523 - DNA, 1704 bp, Oryza sativa
  Clone ID: TFbOSC22429j.C1.o1.fg
atggcggcggcggatgggctcctcccgggcctcaagttcgatcccagcgaccacgacctcgtcggaaggtacctgctccggcgcctccagggccagcccctcccgctcgacggcgtcatcctcgaggcggatcccctgagcgcgccgccgtggaagcttctcgcggatcacggccgcggcgacgaggccttcttcttcgcggaggcgcatgccaagaatgggaaggggaagcggcagaagcgcaccgttgagggcggcggattctggcaggggcagcccacgtgcgttgacggcgagaggctttgcgtccccgacgacggcgtcggcagcggcggcggcggcggcggcttgcagatcgcgtggcgcaagtacgtgctcagcttcttcgcgaacggagagaggggcaagttcggatgggtgatgcacgagtacccggtgacggcgccggatggcctcgcctcgtcccaattgcggctgtatcgcgtccgattcagcggctacggcaagaagcgcaagaggaagccccaatgtccgggagcccacggcgacgacgacggcgagctacaatgcgcgccgcccccgcgccccatggcgaagacggctctgctcgaggagcgtgggccactgccccatcccgttcttggccctgcatcggtggtggatcagtgcaccgatcagggctcatccggcgtgatcgacgattcttcgctggtgtttcgtgatcttcccgacctgattgacctgccagttgcggaggaagcagatgccagccatggtgcagagactgctctgctcaacgagcacctgccgctgccgccgccacagttgttcgttccccctactgcagtgccgctggacctcgccgatgactctaatggcgccgatcagaactcctatggcatgatgggcgacgatcagctgctgcttcctgaccttcccgggacaatcaatgacgacatgccagacctgttcgtctcccaagcagaggaagccagtgcagtgcccgcgatcagctaccactcgtcgggcttcatgggcaacgaggttgcggcattgtctgattttgagttgccggagagctattcctcatctgatgccatggacggcgaggcgctggcattgtcgaattacgagtttccagagagcttcgaggaggatctgagctgcatcgacttcgccactgccaacgcgagcagcctcggcttcccaatggacggataccccatggacgagctgttcgatgatatgcctgaccagggctcttccggcgcgatggacgattcatcggtggtgttccgtgatcttcccggcctgatcaacctgccagccgcagaggaagcagatgccatcggcgatgcagagactgctctgctcagggatctcgccgatgactctaatggcaccgatcgaaactcctatggcgtgatgggcgacgatcaggatcggctgctgcttcctgaaattcctcggagaatcgacatgcccgacttgttcgtctctcaagcagaggaagccggtctcggtggcggtgcagcgctggactcctcatcgggcgccatggacggcgaggcgctggcattgtccgactttgagtttcccgagagcgtcgaggaggtgctgagctgcatggacttcagcacggtcgacatgagcttcttggacgtccccattgacgagctgctagatgatctgcccgcagactga

SEQ ID NO: 12524 - DNA, 1005 bp, Oryza sativa
  Clone ID: TFbOSC421430j.C1.o8.fg
atggaagaggagcagcggttgccggcggggttccggttcttccccaccgacgaggagctcgtcacctactacctcgccaggaaggccatggacgccaccttcacctccgccgccatccgcgacgtcgacctctacacctccgatccatggcacctcccatgcgactcgtcggcggcgagcaccggaggcggcggcggcggcgagtgctacttcttctgcagacggagcagcaagtacccgtccggcgcgcgcgtccgccgcgcgacggccggcggctactggaagtcgacggggaaggacaagggcgtgtacgctgccggcggcggcggcgggctcgtggggacgaagaagacgctggtgttctacgaagggagggcgccgcgaggggagaagacgagctgggtgatgcacgagtactctagagcaccgagcaccaacttcatcagaggagctcaggcacgtacacataatcttctcgatattatctacagcgagtgggtgatctgcagggtgttcaagaagcagcctccaattgaacactggctggaaatggaggaggtggagacgacgacgacgacgacgacagtgcaggagcacacgccaaaccggcgccgtctccctccggcggaggctgcggcggcgccgccgccgccgtccggtcagccgtggcaacacacgagtcgccggtccggcgatggccgtgctgccatcgatggtggcaaccgtgaggaggaggaggatgaacatggcctggctcgagaggagtcgtcgtctccggtggtcatcagctcaccatcacgctgcacctcctcaccgtcgtctcggcttctcaaccatgagcaccttggtgcttcgtcgtcagatgacctgccggagttgatggagttcggcgacatctacggcgggatcgccgccggtggcccgacggaccagcaggcctcatcatcaaactcaaattccatttgcaactttctcgacgagccatactactgctggaacttctga

SEQ ID NO: 12525 - DNA, 732 bp, Oryza sativa
  Clone ID: TFbOSC406649j.C1.o1.fg
atgagcatctcggtgaacgggcagtcgtgcgtgccgccggggttccggttccacccgacggaggaggagctgctcaactactacctccgcaagaaggtcgcctccgagcagatcgacctcgacgtcatccgcgacgtcgacctcaacaagctcgagccatgggacatccaagagaggtgtaagattgggtcagggccgcagaacgactggtacttcttcagccacaaggacaagaagtacccgacggggacgaggacgaacagggcgacggcggccgggttctggaaggccaccggccgcgacaaggccatctacaacgccgtccaccgcattggcatgcgcaagacgctcgtcttctacaagggccgcgccccccacggccagaagtccgactggatcatgcacgagtaccgcctcgacgaccccgccaccgacaccgccgccgccacacccacggttacttctgctgctgctgcggcggcggcgatggcggcggcggcggacggcgggcaggaggatggctgggtggtgtgcagggtgttcaagaagaagcaccaccacaaggaggccggcggcggcggcggcaagcacggcggcgacggcagcgccggcgccaaggcggcgcacgcttactcctccagcgacgacgcgctcgaccagatcctgcagtacatgggcaggtcgtgcaagcaggagcacgagctcccctcgcctcaggccagcggcggtgcg

SEQ ID NO: 12526 - DNA, 930 bp, Oryza sativa
  Clone ID: TFbOSC900198j.C1.o5.gm
atgagcatctcggtgaacgggcagtcgtgcgtgccgccggggttccggttccacccgacggaggaggagctgctcaactactacctccgcaagaaggtcgcctccgagcagatcgacctcgacgtcatccgcgacgtcgacctcaacaagctcgagccatgggacatccaagagaggtgtaagattgggtcagggccgcagaacgactggtacttcttcagccacaaggacaagaagtacccgacggggacgaggacgaacagggcgacggcggccgggttctggaaggccaccggccgcgacaaggccatctacaacgccgtccaccgcattggcatgcgcaagacgctcgtcttctacaagggccgcgccccccacggccagaagtccgactggatcatgcacgagtaccgcctcgacgaccccgccaccgacaccgccgccgccacacccacggttacttctgctgctgctgcggcggcggcgatggcggcggcggcggacggcgggcaggaggatggctgggtggtgtgcagggtgttcaagaagaagcaccaccacaaggaggccggcggcggcggcggcaagcacggcggcgacggcagcgccggcgccaaggcggcgcacgcttactcctccagcgacgacgcgctcgaccagatcctgcagtacatgggcaggtcgtgcaagcaggagcacgagctcccctcgccgcaggccagcggcggcggcggggccggcgcagggagcaggccggcgtcaaggtacctcccgccaatgtaccccagcctgcgggcgtctggttttggaaatcggtccctctttcgccgcccgcgtgggggctccgcggcgattggctactcgtcagttctgcctgataataatattgtttacatcctgtacgtcgtctcaggctcatcagcagattaa

SEQ ID NO: 12527 - DNA, 1485 bp, Oryza sativa
  Clone ID: TFbOSC900189j.C1.o17.fg
atggcgggattaggaaagggggagagtagcggcggcggtggcggcggcggaggggagatggggttcaggttcaagccgagggaggcggaggccgtggagtactaccttctcccccggctgcagggccggccgcccgtgcccaaccccgccatcgtcgtggagaacgtctacgagttcgagccggagcggctcatcaatgagaagtgcaacggcggcgtcgccggcgagggcgaggaggggtggtacttcctgtcgccgagggatcgcaagtacaggaacgggaagcggccgtcgcggagcacggaggacaaggccgggcggtggaaggcgtcgacggggaagacggaggggaaggacccgatcacggagtgctatggctgggtcaagttctgcgtcaccagcctcgtctacttcaagggccccgtcaagacggagaagaagaccaagtggctgatgcgcgagttcaccatcccgcacttcgagaacaagctcgacaagaccgccgccgccggcggcagcagcaaccagcggcagctggatcagtacgtgttgtgcaggatttacacgtcgccgaagaaaggcgcagacgacggcgagcaagccgaagtcgtccgcggcggcggcggcggcggcgaggacatcgacgagtgggcggaagcctgcgctgtcttcgacttgggtcccgagacggcggagggcagcgacaatgcggatgcggcggcggcggagggagacatgcggtcggcgaaacaggcgggcaagaggcccgtggcggcggcggcggtggccgagcagccgtcgaagcggccgtggctgccaccatcaccgtcgacgccatgtgacggcgggccatcgcaagcgatgggcaaccgccaagtcccaatgcaggggctatcactcatgcacaacttcccgcctccgccgacgacgttctgcggccacgcgccatttcagcaaggattcccggtgcacaacaaccgcgcgcagatgcggtggccgacgatgcagcacaactgcatgccgtcgccggcgcacagcttccagccgcggccggtgcagcggcgaccggtgctcgtcggccaagcgccaccgcagcggcgaccggtgcatcacgtcggcggccacgcgccgatgcacatgcaccaggcgcagtggacgccggtgcacatcgcccaagcgccgatgcagcagctgccgtttgacgattgggtgttcgatccgttcgacgacccgccaccgccgatgcagcagctaccggtgatgatgaacaactaccagccgcaagcgccaatgcagctgccgccgatgatgaacaatgaccagccggcgatggtgcacggcggcgagctccaggcgccaatgcagctgctgccggcgacgacgcacggcggcgaggtccaggcgccaatgccgctgaacgtgtacgaggaggagcagaggccatcgcaagaagacgggggacaatgcacaaatgcagaaggatga

SEQ ID NO: 12528 - DNA, 2052 bp, Oryza sativa
  Clone ID: TFbOSC900291j.C1.o15.fg
atgaaacaagggaaagtggagatgacgccggcggtcgccgccgcggcggttctgccggtggggttccgtttccggccgacggacgaggagctggtgaggcactatctgaagggaaagatcgctgggcggagccaccctgacctcctcctcatcccggacgtggacctctccacctgcgagccctgggatctcccggccatgtccgttatcaagtccgacgaccccgagtggttcttcttcgccccccgcgaccgcaagtatcccggcggccaccgctccaaccgctccaccgccgccggctactggaaggccaccggcaaggaccgcctcatccgctcccgccccgccggccccctcatcggcatcaagaagaccctcgtcttccaccgcggcagagctccgcggggcctccgcaccgcctggatcatgcacgagtaccgcaccactgagcctcacttccaatcaggcaaaaacggtagcttcgttctgtatcgcctgtttaacaagcacgaacaagatgatacccataccccggcctccaatttggaccaacaattgtccacgtcttctcaaggcaatccccaaaatggcacacctgctgtccaaccggccctcgcctcaataatgaaggatcatcagaccttaccatcatctggtttcagccaactgactgaaatacaagatgctagtacatctgtccatgacaaagagcaaactgtagcccatgacgatgcttttctggacgtgttatctcaacttccagacctagagcctgagcaaagatacaatggattccctaatatcacctctccaattcgcccttacagcgatcacccttttgtcggcaatctgggtgagcaagatctttcagcgcattttggcagtaccttgtctgagcaggacctgcaaagtttgttgtttagtccaaattacaccaaaatggataagcaccccactggaaacgtagagtctaatcctaccgcgtcgtccaacaatccaaacaataacacattactcatggatagttggaggaagaatgattcatatcagatgcttctaattcagcgtgcagacaacacagatgctacttgctgttcttcttcaatcaatgcaccacaaacagaaacaagtgatgctaatcttgaagcaagagcccagagtagcagcatggtctacagtggagtagccgagggctcccccttgtgcaaccaagatcaactacactccgcattcaatcctcacatggagtcacaaaagagtggagccttctgttgggctggattgtggaccccttatccccagcattggttcgatactatcgtagaaccgggcaggagtggcatgacattttcagatgccttgaaagaacaaggtcaggaacaggcaccttcaatgaagcacttgacagctcaagatctcgttgatccacaacaaggaactgctgcaagaaggatccgccttgtatgctctgttgagagggcatcagtctctcaacctgtatcctcacatttgcagagtgaatatgaagctggatcatgctgtaacactcgcaattcatctaataacaagaaggaaagtgtcaggagtgaagatgaagctggatcatgttgtaacactggaagttcatctaataaccacagcgaggaaaatgacgatgcagcctcccagattatggtactactacagtttattgatggagaaccaatgcatattcagtgcaaagaggatacccctattcaagtggatcattcagtggaagttatggacaagctccaaggcttctcctttcatgaagagatgttggtacatgctaatcagccccgtggaactaatctaaagcagaggctgttgagagtggagtctagaaatagcaatgagaataatgtaccttcgttggagacacgagaacagcagcatgcacctcatattcagaaatggactagctctgttgtgcgactagggtgggggtggcagtggccggctctctttgtgatggccggctctctgcttttgttggttggtgtgtggaaatctctgaatcacactacctga

SEQ ID NO: 12529 - DNA, 969 bp, Oryza sativa
  Clone ID: TFbOSC407684j.C1.o4.fg
atgagcggcggcggcgaaggggcggcggcggcggagaggcaggagctgcagctgccgccggggttcaggttccacccgacggacgaggagctggtgatgcactacctctgccggcggtgcgccggcctccccatcgccgtccccatcatcgccgaggtcgacctctacaagttcgatccatggcatctcccaagaatggcgctgtacggcgagaaggagtggtacttcttctcccctcgggaccgcaagtacccgaacgggtcgcggccgaaccgcgccgccgggtccgggtactggaaggccaccggcgccgacaagccggtgggcacgccgaggccggtggccatcaagaaggcgctcgtcttctacgccggcaaggcgcccaagggcgacaagaccaactggatcatgcacgagtaccgcctcgccgacgtcgaccgctccgcccgcaagaagaacaccctccggctagatgattgggtcctgtgccgaatctacaacaagaaaggcggcgtggagaagccgagcggcggcggcggcggcgaacgttcgaatatgatgagccacggggagaccgcgtcggcgggctcgccgccggagcagaagccggccgtgctgccgccgccgccaccgccgtacgcggcggcggcgccgttctcggagctggcggcgttctacgacgtgcggccgtcggactcggtgccgcgggcgcacggcgcggactcgagctgctcggagcacgtgctgacgacgtcggcgtcgtccggcggcgtcgtcgagcggccggaggtgcagagccagcccaagatcgccgagtgggagcgcacgttcgccggcgccgccgccccggctggcgccgtcagcacggccggaccgattctgggccagctcgaccccgccgccgccgtcgccggcggcggcgacccgctcctccaggacatcctcatgtactggggcaagccgttctga

SEQ ID NO: 12530 - DNA, 687 bp, Oryza sativa
  Clone ID: TFbOSC401583j.C1.o24.fg
atggcggcggaggcggcctccggtggcggtggtgggtaccggatgctgccgcaggcggggttgccgatcggtttccggttccgacccaccgacgaggagctcctgctccactacctccgccgcaaggtcatgtcgcgccccctccccgccgacgtcatccccgtcgccgacctcgcccgcctccatccatgggaccttccaggcgagggagacggcgagaggtacttcttccacctgccggcgacgagctgctggcggaggggcggcggcgggagcagggcgggcggcggcggcggcgcgtggagggcgtccgggaaggagaagctcgtcgtcgcgccgcgctgcggcaagcggcccgtcggcgccaagcggacgctcgtcttcttccgccgcggcggcgcccgcaccgactgggccatgcacgagtaccgcctcctccccgccgacgaccatccgccggaggccaacgacgtctgggtggtctgccgcgtattcaagaagaccaccacgctggctcaccgccgttcgccgccgtccatccgtggcgcgccacgccggcgagccgccgccgccgacgacgacgacatgccgtcctcgccgtcgtcctgcgtgacggacggcggcgacgcgggggaggagggagaagagagcagcagctgcagcgtcgtcgcttctaattgtccatga

SEQ ID NO: 12531 - DNA, 824 bp, Oryza sativa
  Clone ID: TFbOSC2451j.C1.o1.np
ggacttagcatccccatggtgaatggtgccacaatccacctcctccctggtttccggttccgtccaactgacgatgagctagtcatcaaatacctctacccccgtgcttttcatgtgccactgccctgtgcgatcatcaccgatgttgacatccatcatcacaacccctgggacatcgtggcggagagggagaaagggaagcacttcttcacaagaaaggaggtcaagtaccctggtagccgccgtagcaaccgtgttgctggtaatggcttctggagagcagcaggctcggaggtgcccatctattacaaaccagaaggtgctgctaacgacatgctagttgggatgaggcggactctagtgttccactacggaaagtcacgatctgcagagcgcactgaatgggccatgcatgagtttcagcttgctggtgctggtctccttcctcaccctatgatgagctcatgggtgatctgctgcatctacaagaagaggcagcaaaacacaaaaaacaaatcagaagatataactgacaaaaacaatggcagtccgtctgctgcccatactcatgcccctctggtggaaaccatggtcgaacctgataattcttggatgatatgtcgcatttacaagaagaggcagcgtgcaccgcaggtcatcatccctccgtccattggcaatgcaagggaagctgtcctcgccgttcctgccattggcaatgcaggcgatcgtcaagtcacttcattgacttcccagggcatagatgtttcgaggaggggagtgatgagtctgccaatgtcatcacaaaggacaagggcagtgat

SEQ ID NO: 12532 - DNA, 474 bp, Oryza sativa
  Clone ID: TFbOSC2465j.C1.o1.np
ggacttagcatccccatggtgaatggtgccacaatccacctcctccctggtttccggttccgtccaactgacgatgagctagtcatcaaatacctctacccccgtgcttttcatgtgccactgccctgtgcgatcatcaccgatgttgacatccatcatcacaacccctgggacatcgtggcggagagggagaaagggaagcacttcttcacaagaaaggaggtcaagtaccctggtagccgccgtagcaaccgtgttgctggtaatggcttctggagagcagcaggctcggaggtgcccatctattacaaaccagaaggtgctgctaacgacatgctagttgggatgaggcggactctagtgttccactacggaaagtcacgatctgcagagcgcactgaatgggccatgcatgagtttcagcttgctggtgctggtctccttcctcaccctatagcacaaaactggcatgca

SEQ ID NO: 12533 - DNA, 1521 bp, Oryza sativa
  Clone ID: TFbOSC401036j.C1.o17.gm
atggagcgacggtgtggcacgtcggcgccggcgatcgaagacatgtcgccgcacagccggagcacggccggaaaatacatagctggctacatagtgaaaaaaaaaatgcatcctaatggcgcgccgctggccgtgccaccgggtttccggttccatccgacggacgaggaattgctctactactacctgaggaagaaggttgcttatgaggccatagatctcgacgtcatcagggagattgacctcaacaagcttgagccttgggatctcaaagatcgatgcaggattgggacgggggcgcaggaggagtggtacttcttcagccacaaggacaagaagtacccgacggggacgaggaccaaccgcgccacggtggccggcttctggaaggccaccggccgtgacaaggccatcttcctcggcagcggcggcggcacgaggattggcctgaggaagacgctggtgttctacaccggaagggccccgcacggcaagaagaccgactggatcatgcacgagtaccgcctcgacgacgacaatgtcgacgtcccggaggaaggatgggtggtgtgtagggtattcaagaagaagagcatccatcagaggggcttcgaccagccggacatggcggcggcggccgacgaggacgagctccggtaccagctgctccacggcgcgggcatgtcgtcgtcgccggtcgaccagaagcacgtgctcctccaagagcagctcgtcgcgcacggcgcccatggcggcggcttcgtcgtcccggcgttcgaagcctccatgcacctcccgcagctcgccagcgccgacgcggcgccgtgcggcggcggcggcggcggccatgtcgcgttcgcctccatgaacccgctcgacgccgccggctgcggctcgcagaacatgatgacgatgaagatggcagcgacatccggtggcgagatgctgctgatgagcggcggcggcgtcgacggcggccgcttcggcgccgccgccgactggtcgatccttgacaagctcctggcgtcgcaccagaacctcgaccagctcttccatggcaaggtcgccggagcgcatcagcagcagcagcagatggccatggacgccgcctcgtcgttgcagaggttgccgttccaccattacctcgggttggaagctgcagatcttctcaaatccagtccactcccagtctcccaccgtccagtcccagacagagtcccacaggcgcacgattcctcacctcctcatcggccggcgccgccgtggggccaagccgtcgtcgcctcctcgctgcggggccaagccgccgccgccgccgggaccaatcgcctcctcgcccagtcgccacatcgccgccatcggagcaacccacgccggctctgccgcgccccattgcctcctcgcgccgtcacgcgccacatcgccgccgccgggccaagccaaccaacgccgccgccgcggcgccccatcgcctcctcgcctgcctcaccgtcaagccccaagatttggtatgacttgtag

SEQ ID NO: 12534 - DNA, 906 bp, Oryza sativa
  Clone ID: TFbOSC401231j.C1.o5.fg
atgtcggagtcggaggtgtcggtgatcaaccagctggaggaggaggagactcggctggagctgccgccggggttccggttccaccccaccgacgaggaggtggtgacccactacctcacccgcaaggcccaggaccggagcttctcctgcgtcgtcatcgccgacgtgaacctcaacaactgcgagccatgggacctcccaagcaaggcgaagatgggggagaaggagtggttcttcttctgccacaaggaccgcaagtacccgacggggatgaggacgaaccgggcgacggccagcgggtactggaaggccaccgggaaggacaaggagatcttccgcggccgcggcctcctcgtcggcatgaagaagacgctcgtcttctacatgggccgcgccccccgcggcgagaagaccccctgggtcatgcacgaataccgcctcgacggcaagcttccccccaacctcccccgctccgcaaaggaggaatgggcggtttgccgggtgttcaacaaagacttggcggcaaagattgcccaaatgccgccgcctcccttcccgcgcaacgactccttcgacctcgacctcgacgacttcctccacctcgacgccgacctgccgccgctcatcgacgaccccttcgcctccacctccacgctcaagacggagccacctccgccggccaacctgatgcacaaccactacggctacttctccctcccggcgtcagcgaccaattataaccacagctccggcgccatggcggaccaggcgattcggaggttctgcaaggcggaggcgtcgacggcgtgcttctccggcgccgacgctgacgtggatccggtggtggacgagctgctctccttcccggactccatcacggactactcctacatatggaaggcctga

SEQ ID NO: 12535 - DNA, 2037 bp, Oryza sativa
  Clone ID: TFbOSC32411j.C1.o2.fg
atggcggcggcggctggagatgggctcccgccggggctcaggttcgagcccaaggacgacgagctcgtcgcccgcttcctcctcgcgcgcatccagggtaagcccctccctctccacggcgtcatcctcgacgccgatcccctctgcgcgccgccatggaggcttcttgcggatcatggcaggggcgatgacgcgttcttcttcgccgaggcgcgggccaagaacggcaaggggagccggcagaagcgcacggtcgagggcggagggtactggcaggggcagaggatgtgcgtcgatggcgagaggctggtcgtccccgatggtggcggcggcggcggcgtggagatcgcgtggcgcaagtacgtcctcagctacttcgcggatggcgagaaggggagctcggggtgggtgatgcacgagtacgccatcacgtcgccggctgacctcgcctcgtcggcgatgcggctgtaccgcatccggttcagtggccacggcaagaagcgcaagagggaaccggattctcagagcgcccacgacgaacacggtcgagcgcgctgcgccccacagatcgccatgcccgagactgctctgctcgaggacagcgcgccgccgccacagcccgtccatcctcctgctgcggtggtggactgtgtctgtgacgtcaccgatcagggctcttccctggtgtttcctgatcaacccgggtcaatctatgaggatgagttgcagagctttgtgcctgagttcgccgcgcgcaatctgttcgtctctttgccagaaggaagccgtgacgtcgtggcagaggctgctctgatcgaggacttggcgctctcgccacagcctgttcctcctcctgcagaggtggtgaaccaagctgatgactccgatggcgctgatcagggctgctcgagtgtgtttgctgctcttcccgacctgatagtcttgccaccggaggaagcctgtggcagtggtggtgcagcaccggcgccgtcttgggcatcatcgctggacaaccaaaacgacgacgcaccagctttctttgagtttccagagagcatggatgacatggttggctgcttcgacttcgcctccatggacaaccagagctgcactagcgccgtgtcagagattgctgtgctcgaggagccctttcttcctccacctacaatggtgaaccatgacaataactctgtctctgacggcgccgatcagagctgcttcggcgtgggggacaactctaccctggtgttttctgatctaaccgggtcaatcgatgaggatgagcttcagagttttgtgcctgagttcgtctctctgccacaaggaagctgtgaagctgatgctgaagctgacagcggtggtggcgtagcaccggcgcagtttgctgaatttggaggtccagagagcatggatgacccgttgaactttccagcagaagccagtggcggcggcgaccgtgcagcaccggcatcatcttgggtgtcatcgcaggacaaccaaaatgatgaggcgccaatgttcttcgagcttccagagagcctggatgacatggttggctgctttgactttgccgccatggatggccagagctgcactagcgccgtgtcagagactgctctgatcgaggagctcgttcttcctcctgcagcaatggtgaaccatcacgatgactctgtctctgacatcgccgatcatggctgctccggcgccgttcctcctcctaattcagaagtggtggacctccccaatgactctgtcggcgccgatcagagctgctccggcatggtggacgattctctttccgggtactatgaggctgagctgaaggacgccagcggtggtgcagggtccatgatgtcgtcgccggacaagcagaaggagcactcctcatcgggtgtcatggacgtggaggccactggttttggagttccagacagcatggatggcctgagctgcatcgactttgccgagacgatggacgacctgagctgcatcgacttcaccattgatgatgagttgtttgatctatggagctag

SEQ ID NO: 12536 - DNA, 2121 bp, Oryza sativa
  Clone ID: TFbOSC32411j.C1.o5.fg
atggcggcggcggctggagatgggctcccgccggggctcaggttcgagcccaaggacgacgagctcgtcgcccgcttcctcctcgcgcgcatccagggtaagcccctccctctccatggcgtcatcctcgacgccgatcccctctgcgcgccgccatggaggcttcttgcggatcatggcaggggcgacgacgcgttcttcttcgccgaggcgcgggccaagaacggcaaggggagccggcagaagcgcacggtcgagggcggagggtactggcaggggcagaggatgtgcgtcgatggtgagaggctggtcgtccccgatggtggcggcggcggcggcgtggagatcgcgtggcgcaagtacgtgctcagctacttcgcggatggcgagaaggggagctcggggtgggtgatgcacgagtacgccatcacggcgccggctgacctcgcgtcgtcgacgacgcggctgtatcgcatccggttcagcggccacggcaagaagcgcaagagggaaccggaatctcagagcgacaaccaccagatcgcagtggcggagactgctatgctcgaggacagcgcgccgccgccacagccggttcatcctcctgcagcgatggtgaactgtgtctctgacgacaccgatcagggcttctccggtgccgttcctcctcctgcaccggtggtgcaccataccaatgactctgacgtcaccgatcgatactcttccctggtgttctctgatcaacccgggtcaatctatgaggatgagttgcagagctttgtgcctgagttccccgctcgcaacctgttcgtctctttgccagaaggaagccatgaagctgaaccggcgcaatctgtgtcgtcgttagctgatgttggaggtccagagaacatggatgatcagagctgctccggcgtggtgtttgctaatcttcccgagctgatcgtcttgccatcggcgccatcgctggacaatcaaaacgacgaggcgccagtgttctttgagtttccagagagcatggatgacattgttggctgctttgacttcgccgccatggacaaccagagctgcactagcgccataccagaggagccctttcttcctcctgctgcaatggtgaaccatgacgatggctatgcctctaacaacgccgatcaaggttgctccggcgcctttcctcttcctgcagcagtggtggaccttcccaatgagactgacggcgccgatcagagctgctctggcgtgggggacaactctaccctgttgttttctgatgttaccgggtcaatcgatgaggatgagctgcagagttttgtgcctgagttcgccgcgagcaacctgttcgtctctctgccacaaggaagctgtgaagctgatgctgaagctgacagcggtggtggcgtagcgccggcgcagtttgctgaatttggaggttcagagagcatggatgattcttccatgatgtacccgttgaactttccagcagaagccggtggcggcggtggccgtgcagcaccggcatcgtcttgggtgtcatcgcagcacaaccaaaatgatgaggcgccaatgttcttcgagcttccagagagcctggatgacatggttggctgctttgactttgccgccatggatggccagagctgcactagcgccgtgtcagagactgctctgatcgaggagctcgttcttcctcctgcagcaatggtgaaccatcacgatgactctgtctctgacatcgccgatcatggctgctccggctccgttcctcctccttcagcagtggtggacctccccaatgactctgatcagagctgctccgggtactatgaggctgagctgaaggttccacttgagtacgccgcgcgcaatccggtcgactctcccgcaaaaggcggcaatgaagccgaagttgacgccagcaatggtgcagggtccatgatgtcgtcgccggacaagcagaaggagcactcctcatcgggcgtcatggacgtggaggctattggttttggagttccagacagcatggatagcctgagctgcatcgacttcgccgagacaatggacgacctgagctgcatcgacttcaccattgatgatgagctgttcgatctatggagctag

SEQ ID NO: 12537 - DNA, 1491 bp, Oryza sativa
  Clone ID: TFbOSC407633j.C1.o20.fg
atgacagcggagagcaatggcggcaacagctcggcggcggcgacgacggcgagcaatggaggccggcggagacacgagctggtgccgaagctacgattgcctccaggctaccacttcgtgccctcggatgaggagctcgtcgacttctacctccgcggcaagatcgagcaacgtaggccgcccatggacttcatcaacgaggttgacattatgagcttcgatccagtcaaattgatcgagaaatacaagggttacggagagaatagatggtacttcttcacagtgaggaaaccatcgaagacgaagaaaaaggacgagccaaataggaaggtggtggtggatggggtagaggagggaagctggagcgcgacggggagcgtggcatatatctgtgggaaggatcacgagactgtcattggcaccaagagggttctcacctacaaatcagctcgctctgctgaggaggacaagtggagcatgcatgagtatgtcatgttagataaatcccagatcctggatacaactagggatacaatgtcgatggatcaatatgttctgtgtgcgatacagttgaagcagacatacgaggctgaaaagaaggcccaggaggaggaggagagaggcgtcaaacgcaagagaacggcaacgaggaagaggagaaaaggagacattgatcaaactacttcccaggagcaagaagatcagcagcaggagacaccaccacctggagatcctcatgatcaatccgttgtagatgccccttattattccacgcaaatggcgttaggaggagaagaagaagttgcgccagttccatggtgcgccgattgcatggcgcaacctgatcgaatcgaatatcctgcagtgtggtacaatcagcaggagcaacagccatcgcagttagttgatcgatcgatgatgacacaaggctacattggagatctttcttacattcagaatcaatttgatcaacagcaggcacatgatcatggtagcattaatgcatttgacgaggctctcgaccaatgccatgacaccaatttcgcatgggataatgctggtatctatcctggaaataacttgctagatggcaacttggatgatgatactcaggatcagtttggcaatcaatctactcttggtgcattaactggagaattagagtatggcacgggctaccagttccatgacgcactccaggctacgccaggttctgatgatgcatctgctcaatccatgggaattcaacctgctgctggacattccatgggagatgatgatgagacatgctgtaatgatgatttgtcgtcactccttgctgatatttcgagaatcttactagatggcaatggtgttataaacaatgaaggaaacccagagggaagtaatcagggcttgcacatctgcaaagatggacaccaatggccgttagaagagagcacaatgccaacggttgagtgtgttctgcagcatcctggagagtctgcctga

SEQ ID NO: 12538 - DNA, 858 bp, Oryza sativa
  Clone ID: TFbOSC8882j.C1.o8.fg
atggtgatgagcggcggcggcggcggcgcgaggattgtcagtgatccggcggcgacgccggggttccgattctacccgacggaggaggagctgatcggcttctacctccgccaccgcctcgccggcacgagggccgacgacgtcgcccgcgtcatccccgtcgtcgacgtctacggctaccatccttcccagctcgccgccatggccggggtggcgaccgcgggggacagggagcagtggttcttcttctgcccgagggcggagcgggagctccacggcggcaggccggcgcggaccacgccgtcgggctactggaaggccacgggctcgccgtccttcgtcttctcctcctccgccgccgccgccgccagggtcatcggcgtcaagcgcaccatggtcttctaccagggccgcgccccctccggcaccaagaccaggtggaagatgaacgagtacaaggccgtcgccgccgccgccgccgacgacgaccacaacgccgctggcgtggccgtgcagctgccaccaatggcgccgccgccgtcgtcctccgcgtgcgtgcggctgaggaacgagctgagcgtgtgccgggtccaccatcaacctcagctccagcaacaacaacgtcagctgccatcgtcggcagcggcggcggcgacgaacggcaacctcatcgccctcgccggcgggtacgagtgctcacacgacagctccggtggctcgtcggaagatgccgccatcgactggagctcgctgattaccgccgccaccgattccgctaccgccgccgttgatttcagcttcaacgacgacatcgatttcagccctgccgctgttggcccatgggcgccacagctttga

SEQ ID NO: 12539 - DNA, 924 bp, Oryza sativa
  Clone ID: TFbOSC900066j.C1.o15.fg
atggtgatgagcggcggcggcggcggcgcgaggattgtcagtgatccggcggcgacgccggggttccgattctacccgacggaggaggagctgatcggcttctacctccgccaccgcctcgccggcacgagggccgacgacgtcgcccgcgtcatccccgtcgtcgacgtctacggctaccatccttcccagctcgccgccatggccggggtggcgaccgcgggggacagggagcagtggttcttcttctgcccgagggcggagcgggagctccacggcggcaggccggcgcggaccacgccgtcgggctactggaaggccacgggctcgccgtccttcgtcttctcctcctccgccgccgccgccgccagggtcatcggcgtcaagcgcaccatggtcttctaccagggccgcgccccctccggcaccaagaccaggtggaagatgaacgagtacaaggccgtcgccgccgccgccgccgacgacgaccacaacgccgctggcgtggccgtgcagctgccaccaatggcgccgccgccgtcgtcctccgcgtgcgtgcggctgaggaacgagctgagcgtgtgccgggtgtacgtcagcaccggcacgctccgatccttcgaccgccgccccctcgacgcgcccccggtgatcagccaccatcaacctcagctccagcaacaacaacgtcagctgccatcgtcggcagcggcggcggcgacgaacggcaacctcatcgccctcgccggcgggtacgagtgctcacacgacagctccggtggctcgtcggaagatgccgccatcgactggagctcgctgattaccgccgccaccgattccgctaccgccgccgttgatttcagcttcaacgacgacatcgatttcagccctgccgctgttggcccatgggcgccacagctttga

SEQ ID NO: 12540 - DNA, 662 bp, Oryza sativa
  Clone ID: TFbOSC409911j.C1.o6.np
tgcgccctcatttcatccatggcaatgcagctgtccttgcctgtcttgccaacgggttttcgtttccatccaaccgatgaggaactagtcatcaactacctccagaggcgtgctaccgggctatcgtgccccatccccataatcgcagatgtcgaaatatacaacttcaacccgtgggagcttccatccatggctctatttggggaacatgagtggtacttttttacactacgcgaccacaggtaccccaatagtgtgcgccctagtcgctcagcggcgtcaggcttttggaaggccaccggcactgacaagcccgtccaagttgctaacatgcaaagcactcctgtagctatgaagaaggcacttgtattctatgttggccgcccgcccatggaaaccaagactacatggatcatgcatgagtaccgtctcacaaacacgggagggtccactgcctcccacccatccttgtcttcatccaccgcacacccttctgtgaagctagacgagtgggtgctatgcaagatcttcaacaagtccccagagccggacaacaccgcaccaccatcaaacgtcgtctcacggttacagtgctcgccgccgctgccgccgccggcggcaccgcccgggcacttcaatctaatataaaaaaaaacaaaaaa

SEQ ID NO: 12541 - DNA, 591 bp, Oryza sativa
  Clone ID: TFbOSC29108j.C1.o1.fg
atggcgccgaggaaggtccatggcctcagcatcgacctcgacataatcccagaagtagacctctacaaatgtgagccctgggaattggaagagaaatccttcctgcctagtaaagactccgagtggtacttctttgggccaagggatagaaagtatcccaatggatgccgcacaaaccgtgcaaccagagcaggatactggaaatcgacggggaaagatcggcggatcaactaccagaacaggtcaattggtatgaagaagacactagtctactacaaaggtcgagctcctcaggggattagaaccagttgggtgatgcatgagtaccgcatcgaggaaagcgaatgcgagaacgccatggggattcagttacaggactcctatgcgctatgtcggattttcaagaagaatgtggtgttgggtgaatttgacaagaaaggggagtgcagttcatcacaggctaaaggaaatgaagaagttacagatttcggggatgctggacaatcctcgggagcaaatgagaatgataaagacaattcatggatgcaattcatagcagaggatctatggtgcaccaacaaactaaagtga

SEQ ID NO: 12542 - DNA, 951 bp, Oryza sativa
  Clone ID: TFbOSC401108j.C1.o12.fg
atggcggcggcggttgggggcagcgggaggagggacgcggaggcggagctgaacctgccgccgggcttccgtttccacccgaccgacgaggagctcgtggtgcactacctctgccgcaaggttgcccggcagccgctccccgtcccaatcatcgccgaggtcgacctctacaagctcgacccctgggatctccctgagaaggcgttgttcgggaggaaagagtggtacttcttcacgccgagggaccggaagtacccgaacgggtcgaggccgaaccgcgcagcggggagagggtactggaaggcgacgggagccgacaagccggtggcgcccaaggggagcgcgaggacggtggggatcaagaaggcgctcgtgttctactccgggaaggcgccgaggggggtcaagacggactggatcatgcacgagtaccgcctcgccgacgccgaccgcgccccgggcggcaagaagggctcacagaagctggacgagtgggtgctgtgccggctgtacaacaagaagaacaactgggagaaggtgaagctggagcagcaggacgtggcctccgtggcggcggcggcgccgcgcaaccaccaccatcagaacggcgaggtcatggacgcggcggcggctgacaccatgtccgacagcttccagacgcacgactccgacatcgacaacgcctccgccggcctgcggcacggtggctgcggcggcggcggcttcggcgacgtggcgccgccgaggaatgggttcgtgacggtgaaggaggacaacgactggttcaccggcctcaacttcgacgagctgcagccgccgtacatgatgaacctgcagcacatgcagatgcagatggtgaatccggcggcgccagggcacgacggcggctacttgcagtccatcagctcgccgcagatgaagatgtggcagacaatcctgccaccattctga

SEQ ID NO: 12543 - DNA, 1152 bp, Oryza sativa
  Clone ID: TFbOSC400547j.C1.o10.fg
atgaggagtagtgacatagagaagcaagatgaagtcatgctacctggcttcaggtttcatccaacggatgaagagctcgtcagattctaccttagaaggaaaatccagcagaagtctcttcccattgagctcatcaggcagctggacatctacaagtatgatccatgggatctcccaaagttagcaagtactggagagaaggaatggtatttctactgcccaagggataggaagtaccggaacagcacaaggccaaacagggtgactggagcaggtttctggaaggccactggaaccgataggccaatctactcctccgatggatcaaagtgcataggcttgaagaagtcccttgtcttctacaagggcagagcagctaaaggcgtcaaaactgactggatgatgcacgagttccggctgccatcgctcactgacccttcattgccacagaagaagccactcgagaagatcattccaccaaatgattcctgggcaatctgcaggattttcaagaaaaccaattccacggcacaaagagcgctctcacactcatgggtatctcctcccttgtccagcacaaatgaagcctacactgcccctgtctcgcagaccacacagagaagtcagcatacctcagataacacatcatcagtaatgaccgatgccatctcctccaccatccagttcaccggaagtagctacttgccttcaacagttccttcatgccacaacccactcagcatgattgacagcaacagcaggccagatgcatctgtacctctaccctcaccggttgcagagcatcagaccatgggtatcctctcagcaatcccacttgatattacagctgggattgacattgcatccatggttttcaatgcatcatccttcacactcccaaacatggatagaatgactgcaaacatagagtttggccaaccacagaagtgcaacagcagcagcagcatgaccaacagatgtgtggtcgacatgcctgatgttgctaacaatatcaacagcggtccacggtccatcaacttcaacctgcaaggaacactttctgatgactggagaatgaccttgccatgggaatcactcccttgcacgacagaagtctcaacaaatttccagtcaaccaagtgctatacttag

SEQ ID NO: 12544 - DNA, 1603 bp, Oryza sativa
  Clone ID: TFbOSC400240j.C1.o17.np
atggcgcccgtgagtttgcctccaggtttcaggttccaccccaccgatgaagaactaatcatctactaccttaagcggaagatcaacggaagacagatagaactcgaaatcattccagaggttgatctttacaagtgtgagccttgggatctgcctgaaaaatcctttcttccgagtaaagatctcgaatggtacttcttcagccctagagaccgcaagtacccaaatggatcaaggacgaaccgtgcaacaaaagccggatactggaaggcaactgggaaagatcgaaaagtgaactcacagaggcgtgcagttggtatgaagaagactcttgtgtactaccgtggtcgagctccacatggttctcgcaccgattgggtcatgcacgagtaccgcctcgatgagagggaatgcgagactgacactggcttacaggatgcatatgctttatgccgggtgttcaagaagacagcgcccgggccaaagatcatagagcattatggtgtggtgcaccaccatgtcgagcaacctcaatggatgacgagcagtatcgatcgctccccaacgttggacgtgtcgtgtgatggaagaggtgatgactttgagagcagcagcttctctttcccaacagagacgccaatggactccatgcacggtgggtttggaatgcagatgagtgcacctcacgaggatggcaaatggatgcagtttctgagtgaagatgccttcaacgccaccaatccattcttgacgaacccagtttctgccaacttctcatgccttccatccaaggtggatgttgcactggaatgtgcgaggctgcagcacaggctcaccttgcctcccttggaggtggaggatttcccacaggacgtcagccttgacacgaagattggcatacttcgcagtaaccccaacgaagttgacattctccaagaattcctgtcagttgcgactgcctctcaggagctaattaatggctccaccagtagctaccctgaaatgtggttaggagctagcacaagcagtgctagctacgtcaatgaactgtcctctctagttgagatgggcggcgttggcacttctaaccaccacgaatccgcaaggctacaggtcgagatcgctgacatggaggtgttcaaggacgagaagaagcgggtggagaaccttagaggagtcaagttggtgaacacagtattccatattcgatacagactgtatacagatacagttcttgcatgcactaactcagagctagattgcaggagaagccggtcatcgcatgaccgatcccactgacgtaggcggcatcgacactgccccgatcttctcgcaatctcaacctgacgactttgctgctggtttcgacgacgtcaaccctaatgcatctttcgatctgtacgagaaggttgacgtcaaccacaggctattcgtttcaagggtcgctgcggcgaagacattcttccaccgcattgagccatcgaagaaggtcagcttccactcgaacccggcagcaaccgccgtcagtaaggcgaccgagaagttccatttccccgttacgaccaaagttagtggtaggataatgggcattgccctctctgcc

SEQ ID NO: 12545 - DNA, 2901 bp, Oryza sativa
  Clone ID: TFbOSC401213j.C1.o53.fg
atggcaaggcttgttacagttgcagctgctaaggtgaagggctcagcttccagatttcgatacgtttgtagtactcctagaacactggatcagccatggattatagctggtggaaaggtaattgctacaaaaataagaaatgcaactcagcttctgagttgtaaacttggagaattggttccagaagcatggagggaatgcccaaactgcaaatgtcacattgataatagcgatgttactttacagtggccagaattccctgacggtgttaaatttgatccatctgatcttgaagtacttgaacatttagaaagaaaaattaacctgggaaatccagggcctcagggtcttattgatcacttcatcccaactctagaaaaggtggaaggaatctgctatacacatcctgaaaatctccccggtatcaagctggacggcaccagcagccatttcttccacagaatatcaaacgcatatggttctggtcagcgcaagcgtagaaagataagccacaccggccatgctgcttctgacgagaacataagatggcacaaaactgggaaaatccaacagatttaccataacggtgtcttaaaaggatggaagaaaatactggttctttacaaaggctccaaaaagaacaagatagtacaagctaattgggttatgcatcaatataatcttggtgtggaagaaggcggggaggacggagagcttgttgtttccaaggtattctaccaattatcctccaagcaaactggcacgcctgaaatggactctgttactgaagaagcatctgatgcactgaccataagaagtgatcccattacacccataacgaaccctccgctgcctcgctgcctgatgaacagcccgtgtgacacggagcagaatggcaccatttcacatgatcaggagggggaatgcagcacatccactctccggcccatggtagaagctggaaaccgtgcagggtgttctgctggagcgtcaacagccggggacttcaacgaagatctgctgcagcgctgcgagtttccggaggaccccgtcccaactcttgatgacacgctgccttttctttacacggacgaaacggaccttttcagctgggaagattttcaattcgggtcgcaggaaagcttcggctgggtggatggggatcacactcttgttcagtttctgtacctctgcatgtgggaccgccttttggtagacgatctgctgagagaaaaatcaataccattgcccaactctgtagaaaactcacgaaaaaccctcctccgaagtccccaattccacatggcgccgcccacctccgccgccgccgccgtcgcggcggccgcccgcgcctcgccgacgtcggcggcggcgctcgcgctcttcaagtcggtgctgtccgcggacaaggcgctctcgccgctcgccgtgctcccgcacctcgacggcgcgccgtcctcgctgcccaacctcctgctcaccgcctccgccgccgtgcgcccccacgccacctccctccgcctctactcgcggatgaagtccctatccctccccatctcgaccgcctcgctccacccgctcctctccgccctcccctccgccccggccttcgccctcttcgccgacatgttccgcctccgcctcccgctctgcaccaccaccttcaacatcatgctccgccacctctgctccgccgggaagcccgcccgcgcgctcgagctcctccgccagatgccccgcccgaacgccgtcacctacaacaccgtcatcgccgggttctgctcccggggccgcgtccaggcggcgctggatattatgcgggagatgcgagaacgcggaggaatcgcgcccaaccagtacacctacggcacggtgatctctggctggtgtaaggttggccgggtcgatgaggcagtgaaggtgttcgacgaaatgctgaccaagggagaggttaaaccggaagctgtgatgtacaacgccttgattggtggatactgtgaccagggtaagctggatactgcgctcctttaccgtgatagaatggtggagagaggggtcgcaatgacagtcgcgacctacaatttactcgtgcacgccttgttcatggatgggcgtggaacagaggcatatgagttggtcgaggagatgggtggaaagggtcttgcgccggatgtgttcacgtacaatatattgataaacgggcattgcaaagagggcaacgtgaagaaagcactagagatttttgagaatatgtccaggagaggggtccgtgcgacagtagtgacctatacggcattgatatatgccttgtctaagaaggggcaagttcaggagacagataagctgtttgatgaggctgtaaggagaggcattaggcctgaccttgtcttgtacaatgctctgatcaatagtcactccacttctggcaacatcgatcgagctttcgagataatgggtgagatggagaagaaaaggatcgcaccagatgatgtgacctacaatacgctaatgagggggctgtgtctactgggacgtgttgatgaagcgcgcaagctcattgatgagatgacagagaggggaatccagccagaccttgtcacttataacacgctgatcagtggctacagcatgaagggtgatgtcaaggatgctctgaggattcggaatgagatgatgaataaggggttcaatccaacgcttttgacatataatgcgctgatacaggggctctgtaagaatggccagggagatgacgctgagaacatggtgaaggagatggtggagaatggcatcacccctgatgacagcacatacatctcactgattgagggtcttaccactgaagacgagcgtgccattgatgatgagcgactggctgcagcagatgctgcgaaagtatga

SEQ ID NO: 12546 - DNA, 702 bp, Oryza sativa
  Clone ID: TFbOSC401601j.C1.o17.np
tgatcttttcttgtgtgagatatggaggagagaaatgatgtcaacatggacaagtcagatgagatcctcctgcctggattcaggtttcatcctacagatgaagagctggttagcttctatctcaagaggaagatccagcagaagcctatctccattgagctcatcaggcagcttgacatctacaagtttgatccttgggatctcccaaagcttgcgagcacgggtgaaaaggagtggtacttctactgcccgagggaccggaaatatcgcaacagcgtgaggccgaaccgggtgacaacagctgggttctggaaagccacaggaactgacaggccaatctactccactgagggtaccaagtgcataggcctcaagaagtcccttgtcttctacaagggcagagctgcaagagggatcaagactgactggatgatgcatgagttcaggcttcctacgctcaccgatccatcgctcccgaagaagccgattgacaagaacattccgctcaacgactcctggacaatctgcaggatcttcaagaagaccagttccatggcacaaagggcactctgtcagacctggggagctcaattgcctggaacaattgatccagacatcttctctacattgcaatctgtgcaagcttcacagtttgccctggagaaaactcaaaaggtaggtctctcacatgctaaacatcat

SEQ ID NO: 12547 - DNA, 1002 bp, Oryza sativa
  Clone ID: TFbOSC900037j.C1.o9.fg
atgtcgatgatgagcttcttgagcatggtggaggcggagctgccgccggggttcaggttccacccgagggacgacgagctcatctgcgactacctggcgcccaaggtcgccggcaaggtcggcttctccggccgccgcccgcccatggtcgacgtcgacctcaacaaggtcgagccatgggacctccccgaggtggcgtcggtgggcggaaaggagtggtacttcttcagcctgagggaccgaaaatacgcgacggggcagcgtacgaaccgagccacggtttcggggtactggaaggccacggggaaggacagggtggtggcacgaagaggggcacttgtggggatgaggaagacactggtgttctaccaggggagggcacccaagggaaggaagacagagtgggtgatgcatgagtacaggatggagggtgtgcatgatcaacaagcttccagcttctcctccaaggaagactgggtcctgtgcagagtcatctgcaagaggaaatcaggagggggtgcaacctccaagtcaagaagcctcaccaccaccaccaccaccattgtccatgacacatccacaccaacctcctcaccaccattgccacccctcatggacaccaccctagctcagctccaggcctccatgaacacctcctcctcctccgccatcgccgccgtcgccgcacttgagcaagtgccctgcttctccagcttcagcaacagcattgccagtaacaacaacaacagcaacagtgctactgtcaatgcacagcaatgctacctgccaattgtcacaggtagcaacaacaatggcatgagctacctggatcatggcctgcctgaatttggcagcttcttggacacccagagctgtgacaagaagatgctcaaggcagtgctgagccagctcaactccattgggggtgaggtgttgccaggcctgcctcctccatctgaaatggctgctgctgtcagctcttcttggatgaatcacttctag

SEQ ID NO: 12548 - DNA, 495 bp, Oryza sativa
  Clone ID: TFbOSC401231j.C1.o1.fg
atggagatgacgatgtcgtcggcggcgacgtcgctgccgccggggttccggttccacccgacggacgaggagctgatcctgcactacctccgcagccgcgccaccgccgggcagtgccccgtccccatcatcgccgacgtcgacatctacaagttcgatccatgggacctgccatcgaaggcggtgtacggggagagtgagtggtatttcttcagcccgcgagaccgcaagtaccccaacggaatccggccgaaccgcgccgccgggtcggggtactggaaggcgacgggaaccgacaagcccatccacgacagcgccaccggcgagagcgtcggcgtcaagaaggccctcgtcttctaccgcggccgccctcccaagggcaccaagaccagctggatcatgcacgagtaccgcctcgccgccgaccctctcgccgccgccgcaaacacctacaagccctcctcctcctcccgattccgcaacgtctccatgagg

SEQ ID NO: 12549 - DNA, 1041 bp, Oryza sativa
  Clone ID: TFbOSC401231j.C1.o13.fg
atggagatgacgatgtcgtcggcggcgacgtcgctgccgccggggttccggttccacccgacggacgaggagctgatcctgcactacctccgcagccgcgccaccgccgggcagtgccccgtccccatcatcgccgacgtcgacatctacaagttcgatccatgggacctgccatcgaaggcggtgtacggggagagtgagtggtatttcttcagcccgcgagaccgcaagtaccccaacggaatccggccgaaccgcgccgccgggtcggggtactggaaggcgacgggaaccgacaagcccatccacgacagcgccaccggcgagagcgtcggcgtcaagaaggccctcgtcttctaccgcggccgccctcccaagggcaccaagaccagctggatcatgcacgagtaccgcctcgccgccgaccctctcgccgccgccgcaaacacctacaagccctcctcctcctcccgattccgcaacgtctccatgaggctggacgactgggtgctctgccggatctacaagaagtccggccaggcgtcgccgatgatgccgccgctcgccgccgactacgaccacgacgagccgtccggagtccttgacgacgcctacagcttctacgcgccgccgatgatcagcaccacgctcatccccaagctccccaagatcccctccatctccgagctcttcgacgagcacgcgctcgcccagatcttcgacgccgccgccgacccgccggccgaccaccatcagcatgccctcgccgtccacccctccctgaaccagctcctcggcgtcggcgacaacttcctcgcggagtgctacccgtcgacggcgtccacggccaccgttgccggcggcaagcgcaaggcgagcccggccggagactacgccggcggcggccacacgccggcgaagaggctcaacggctcatgcttcgacgtggcgccgcagtccgtggtgggcggcttgcaagcgacgccgtcgtcagtcctcgccggactcaaccaccagatgcttcctcctcagctattctga

SEQ ID NO: 12550 - DNA, 1413 bp, Oryza sativa
  Clone ID: TFbOSC900046j.C1.o19.fg
atggcgaccaacctccaccttctcctcgagctaggattccgcttcaacccctcaccggaggaggtcgtcacctactacctcccacgcctcattgccggccacccgcccaaggacaccgagtcctgcatccaccgagccaatgtctacggcgccgagcccagggagctcgcagcccagttcgcgcccgtggcgaggagctccaatggcgaccggttcttcttaaccgagtgcaagcggatcaaggggaaggtctctcgcgtcgcaggcggtggcagctgggtctctcagaccagcaaggatatcaagaacagggaggggatcaaggtcggggaagccaagaatttccgcttcaagaaagatggcacgaacacggattggttgatggaggagtaccacctctgcctccgacaagccagcgatctcgagcccgtcctctgccgggtgtacgtctctcccagggcggccaaagattcggcggcgcaccaagaatccgccgctctcacgccccaagaacctgcgccgccgctggctcatgctcccgcaccggctccgattcaagaaccagccgctctgcctcgtcaagaactcgcgcctgcgccaccacgtctcgaggccgtgatcacgcagcagcaagcgaccatgaagatgggaggttctgtcccggcaagcaaggcgacgcgccagagttgcgtgacggcgtccgcgccaccaccgcgacgtgtggctccgcaaccggcacctccgtcactgcgtactgcaccggcggctgttgcgccgccacggcaagtgcccgtgatcacgcagcagcaggcgcctcccctgaagaggcccgccccgccggtcccctcgccgccgtgcgccaagaagatcagaggacctgtctcggcaagcccggcggcgcgccagagctgcgtggcggcatccgcgccgccgccatggtgtgtgcctccgcctccgcgaccggcaccaccgtcaaggcgcgtcatggcgccactgccgccttatccgatggatccgttcgagacaccaccgtcgcctcatgcacccaggcatgatccgttcgagccaccaccgtcgcctgatccacccatccagagctatgcgatcgatccacccatccagagctatgcgatggatccattcgagcaaccgccgtcgccatacgcaccacatggcgttgatgacatggacgagtttacgagatcgctggaagctcagctagaagaagccgatggtgatgaaattgctgcagcgactgttgctcctcccatggcacaaaacgttgcgcccgatgacgacatggacgagtttacgagatcgctggaagctcagctggaagaagcagatggtgatgacaagattgatgatgatgagattgacgaggaaattttccaaattccgctgaaggactaa

SEQ ID NO: 12551 - DNA, 759 bp, Oryza sativa
  Clone ID: TFbOSC400590j.C1.o15.fg
atggcgatgacaccgcagctagcattttctcgcatgcctccagggtttcggttccagccgacggacgagcagcttgtcgtcgactacttgcagaggcgtaccgctgcgcagccatgcgttactcccgacatcaccgatatcgacgtttacaacgtcgacccgtggcagcttccagccatggcgatgtatggatcggatcatgaccggtacttcttcacgatggcggcccgagaggcgcaggccagacgaacgacaccgtcgggtttctggaagcccaccggcacaaagaagacgatcttcgtcgtcgccggtgggcatgaggtgcccaccgccgtcaagaggaggttcgtcttctacctcggccaccaccaaccatcgggcagcaacaacaacaacaaaacatcatggatcatgcatgagtaccgtctcatgaactctccaagagcggcagtgccgtcgtcttcttcggtgaatcgtcttcccactgatgatctcacggaagagatggtgctgtgtaggatctccaacaaggacctgcctaaaccacccttcatccacaacagcttgttgcagttctcttcagtggggttgaatggtgatgggtataattacttgatccttgatcaccttgagcctccagcaatggagtatcctaatgttggcattggtaatgttgatgatgctgctgctggtactgatgatccgggtgaccttgatgaggagattgatgatagcatgcaaagaaaccatggtggctag

SEQ ID NO: 12552 - DNA, 1113 bp, Oryza sativa
  Clone ID: TFbOSC400934j.C1.o72.fg
atgacatggtgcaacagcttcaacgacgtgcgcgccgtggagaacaacctggccaccgccgccgccgtggccgcggccaagaagcagcagcagcagcagcaggtctcccagcacgtcaacctcatcaagacctgcccctcctgcggccaccgcgcgcagtatgagcagagtcagttgcaggcagcggcggcggcgacgatccaggacctgccggggctgccggccggggtgaagttcgacccgacggaccaggagctgctggagcacctggaagggaaggcgaggcctgacgcgcggaagctccaccccctcatcgacgagttcatccccaccatcgagggcgagaacggcatctgctacacccatcccgagaggcttccaggcacccgtcagccgtcaggacattggaactggtcaactggatactacgattacgaagccactcttgttgtgttgctgacctgctgttgcatgcatgcacgagtcggcaaggacggcctgatccggcacttcttccaccgcccgtcgaaggcgtacacgacggggacgcggaagcggcggaaggtgcacaccgacgagcagggcggcgagacgcggtggcacaagaccggcaagacgcggccggtgttcaccggcggcaagctgaaggggtacaagaagatcctggtgctctacaccaactacggcaagcagcgcaagccggagaagaccaactgggtgatgcaccagtaccacctgggctccgacgaggaggagaaggacggcgagctcgtcgtgtccaaggtgttctaccagacgcagccgaggcagtgcggcggcggctcggcagcgacggccaaggacctctccgtcgacctcgtcgccggtaacaacatcaaggctagcaatgctgctgctgaacaccaccataacgacggcgtcggcggcggcggccacggtggcaacaacagcagcatgctgaaggaagctgcaggcattgtagatttctacaacccagcggcggcgctaatcggctacagccaggcggctcctaacaacagggcggctgcttctgctcatttgacgatgcctaactttgaggtgcacacaggaggtgcaggctttggcccctga

SEQ ID NO: 12553 - DNA, 1518 bp, Oryza sativa
  Clone ID: TFbOSC400431j.C1.o21.fg
atgtacacctctcccacactccttgctctctcgtttgctcttctactgctcatcctcctcctctactactcgtcctctttgctctattcacagctagcaacaagaaggaggcttacacatgcatgtgcacggtctctgccggacgcatatgaatcaggcatgaatagggggcacatcagcagctcggagctcatcgacgccaagctcgaggaacgccggatctccacggccaagcactgccccagctgcggcaacaagctcgactgcaaaccggattgggtggggctaccggcaggagtcaagttcgatccgacggaccaggagttgatcgagcacctcgaggccaaagtgagggaagaaggctcaagatctcatcctctcatcgatgagttcatacccacgatagaaggggaggacggcatatgctacacccaccctgagaaacttccaggtgtgacaagggacggcctgagcaagcacttcttccaccggccgtcgaaggcgtacacgacggggacgaggaagcggcggaagatccagacggagtgcgacgtgcagaagggggagacgaggtggcacaagaccggcaagacccggccggtgatggtgagcggccggcagaaggggtgcaagaagatactggtcctctacaccaacttcggcaagcaccgcaagccggagaagaccaactgggtgatgcaccagtaccacctcggcgacctcgaggaggagaaggaaggggagctcgtcgtctgcaagatcttctaccagacgcagcctcggcagtgcagctggtcctccgaccgcggcggcggcgccgccgccaccgcatccgccgtgacgacggcggcggtgcagcaggatcagcagcgcaggagggacagcggcagcggcagctgctcgtcgacgagggaccacgaggtgtcggcgacgtcctactcgacggccgggtacgccgtcgccgccgccgtcgagatgcagcatttgaagcatgccgccgaccatttcagcttcgcgcctttcaggaagagtttcgaggaggttggtataagtggtgatcaggtacactccaatcagcttgggaggtcggagcagcagcatgctggccaggaacaacagccgcaccggccgttgcttgcaaccacgacggcggtgcctgccacggccttcctgatcagccggccgacgaaccctgtatcaaatatagtgccaccagcaatgcagcatgcatctgtcgttcttgatcatgatcagttccacgtgccagcaatccttctccaccacgacaaatttcagcagcagcagcaacaaaagcttgacaggaggtctgccggcttggaggaactgataatgggctgcacgtcttcgagcacaaaaggagtagtatatacatgcacgttcaggaagcttcaattcctcactcccaagagacagaatggccttaccagccatactggactcctgacaaccaggatcatcatggatagtagcaacaaggctgcttttgatatgcattag

SEQ ID NO: 12554 - DNA, 1338 bp, Oryza sativa
  Clone ID: TFbOSC401826j.C1.o36.fg
atgaacaggtacgacaacaacgggcatgcggcagcggcggcggcggctgcggtggcgggaggaggaggaggaggaggagggaataaggcggcgggggaggtagatgggcatgaggatgacctggtgatgcccgggttcaggttccacccgacggaggaggagctgatcgagttctacctccggcggaaggtggagggcaagcgcttcaacgtcgagctcatcaccttcctcgacctctaccgctacgacccctgggagctccccggaattgagcatctaattaacaagctcgatgggggtgcagcaatggcggcgataggggagaaggagtggttcttctacgtgcctcgggacaggaagtacaggaacggggaccggccgaaccgggtgacggcgtcggggtactggaaggcgacgggggccgaccggatgatccgagccgagaacaaccgccccatcgggctcaagaagacgcttgtcttctactccggcaaggcccccaagggcgtccgcagcagctggatcatgaacgagtatcgccttccccccgccgacaccgaccgctaccacaagactgaaatctcactatgccgcgtgtacaagcgcaccggcatcgacgacggccatggccaggtatccacggcgcggtcgtcggcgcactcccgcggcggcggcgcggcaccggtacaggacaacaagcaaggctcctcgtcgacgtccacgccgacgccgcctccaactccgtccaagctccacctcctcagcagcgagtgcacgtcgccgcccgccatcgtcacggaccacgccgccatggtggcgcacaaggcaccgtcgccgcggcaccatcagcagcagcagcagctccacgctgccaagccttgcggcggctacctgcagaattcctcgatggcttccgctgccggcggcgatcagcagcagcaatttcagcaagacttcgcggcggcattgtaccagcagtactccaagaacacgagcggtgccttcgcctccacgtactcgctgctcaacctcgtcaacgcggcatccatgggcagctccgccgctgccattgatgagctgagctcgctggtgggccacggcacgccgtcctacattaaccccgcggccggcagccacaactatagtcaattccttcacctgcctacgacgccgtcgtcgcatcaaccaacgccggcgccgctcgggacgacgacggcggcagcggcggcgacgctgccgatgtcgctcgccgccttctccgacaggatctgggactggaataatccgatccccgaggccggaggtagggattacagcaccagtactggattcaagtga

SEQ ID NO: 12555 - DNA, 1098 bp, Oryza sativa
  Clone ID: TFbOSC1203j.C1.o9.fg
atggcggaagaagatgacaagaagcagaagggccccgacgtgacggtgccctcgggatacttcttcgtgccgaagccggagcagctcatccgcgactacctcaaccactggatcaccggccggccgatcgaggagctccgggacatcgtccgggaagccgacgtctacggctccgacccggcgacgctgacggaggcgcatagggcgtacggccacgacggcaagtcgtggtacttcctcaccgtcgccaagtggaagggcggcaggggcggcgccggcaccgccggccggctcaaccgctgcgtcgagggcggcggcacgtggcacaactcgcagcgccgccgcgtcatcgagggctacggcgaccgccaggctttcgagtaccgcgcccccgggaacaagaagacgaactggctcatggaggagatcgccagcaacctgccggcggcgatcaccgacgagggcatcatggtcatctgcaaggtctacctctcgccgagggccaaggaggcgacggccgacgaggaggaacgccaagaaaccaacgtggttcccgggcccaagaggctccgagaggcggaagccaccggctacgacgcgccggcgccggagacgccacagcccgacgtcggatgctcgtactccggcggcggcgagacgtctcaagcgaccgcctcgatggactactgctgctcgacgacgacacacacggcggacgacacggccaatgccgccgcctactactacggcgacgttgatgccatcaagccagatgcttacgacggcggcgactacggcatcggcatcaacgcagacggggagctggttctctgcggcaacggccacggtggcatcgggacgcagggacagatgccattggcaatgcagaacaccaacggggagatgaccttgttctcaccgatgaacggctatggtgttggcttcaatgaggaggtgagacaagaaccacaagtaggaggtgaggtggagatgaatgatttcttcaacgatttgttcgtcgacttcgacggcgccggtgatcccaatcccaatcccaacgagggtggagacagccacggccacatactatgtgaatga

SEQ ID NO: 12556 - DNA, 1031 bp, Oryza sativa
  Clone ID: TFbOSC401589j.C1.o15.np
tttggttgtcagcatgagttggtcgttgagcttgagcatggtggaggcgaggctgcctcccgggttcagattccatcctcgagacgacgaactcgtggttgactacctctcccggcggcggcgccgccggcgccggctgcccgacgccgacactgatcgacgtcgatctcaacaagtgcgagccatgggacctcccagagattgcttgcattggagggaaggaatggtacttctacaacctcaaggacaggaagtacgcaagagggcaacgaacaaacagagcgactgaatcagggtactggaaggccaccggaaaagaccgggagataacccggaaagggtccctggttggcatgcgtaagacgctcgttttctacagagggagagcccccaagggtgagaggactgattgggtcatgcatgagttccgtcaagaattagaccatgccaatcaccatcatcatctcaagtacatgcaggagggttgggtgctgtgtagggttttctacaagagcaggacagaagctgttgcagcaccaacaatggagtctactcttcctcctcgttacatcaatggcggcacatcaagatctccattgccacccctcgttgacagctcgatctccttcaatcatggaggttatgaggaagttcttccctgcttctctagctctcatcaccagcagccatcgccggcgtcgatgaacgcgtcggctgctaaagcaaccctccctcgacctctactaggaaaggaaaggaaacaaacacaaaaggggaagtatatgggcctcagcttggcccatgtaaagtttttgcataggcctcctgagcggcccaactactacacttggactctttctctctcattccactctgagcggaactcttcttgctcgccaccgccgccggcgaaggggatcgatcggatgggaacgtcggtgcaggtgactccgttgagtggggcgtacggtgagggacccctctgctacctactcgccgacctagtgttaggtcaaagatgttgggcatgc

SEQ ID NO: 12557 - DNA, 1095 bp, Oryza sativa
  Clone ID: TFbOSC401196j.C1.o76.fg
atggatggatctagtatgagcagcagcagcacgcagcagcaggcgcaggttcctcctggatttcgtttccacccgacggacgaagagctggtggattactaccttcggaagaaggtggccgcaagaaggattgatctcaatgtcatcaaggacgtcgatctctacaagattgagccatgggatctgcaagagcgttgccggatcaatggcgggtcggcggcggaggagcagaacgaatggtacttcttcagccacaaggacaagaagtacccgacggggacgaggaccaaccgtgcgacggcggccgggttctggaaggcgacggggcgagacaagcccatctacgccaccaagcagcacagcctcctcgtgggcatgaggaagacgctcgtctactaccgcggccgcgcccccaacggccacaagtccgactggatcatgcacgagtaccgcctcgagaccaccgagacggccccgccgcaggaagaagggtgggtggtatgccgggtgttcaagaagagattacccacaacaagaagagattcagaccatgacgcaccttgcggcagctggtacgttgatgaagatgcaccgggcgccttcatgtctccgatgatgatcaccagatcatcaatattgcgcccacaccaacaccacgccggcatcacgctgcaagagcaacacctccacaccacttacaagcacagagacctcactactaagattcagcagctccaagtccctgcggcaggccatcatctcctcaacaccatgccccatgacctggagagttctacttcctccttccattctcttttggtctcacctgatcaccaccaaatcaacatgcaccatgctcaggctgatcccttctttgacgacatgcatgcagtcgatcaagccactaccactgactggagagttcttgacaagtttgttgcctctcagcttagcaatgatgctacaaacaagcctgcggatcattatactgatgaaggagacattcttcaggtcagtgacaagcagcaagaggtggcagccgccgattatgcgtccacatcaacgtcaagcagccaaattgatccatggaagtga

SEQ ID NO: 12558 - DNA, 723 bp, Oryza sativa
  Clone ID: TFbOSC2467j.C1.o1.fg
atgcacctccccgctgtgggcatgtcacaccccaccgagggtgagcttgtcttccactacctctatcgtcgtgccgttaacatgccgctgccctctgaattcatttgtgatgtcaacgttcttcctcataacccatgggacatcgtcccaggctcagaaaagccagtctactacaaccagggaggtggcagcgactgcatgctggtgggaatgaggcgcaccctaacattttactttgggaattcacggaccgcagagcgcacaaaatggggtatgcaagaatttcgccttgctggcaatggtctttcgccttaccctgcgatgaagcatgccaccggggatggctcaaaaccaccctgcaactgtgccgaaacaaccatcgccaagagaaatgatggtctctctgcagttcttcgtaatgtgctcgccgtcaccccccttgtggaaaccgttgtcgaacctgatggatcatggctgatctgccgcatctacaggacaaggcagcgtgcattgcctgttatcactcctcctgccatagaaaatgcaagggaaatcattatccctcctgccaatggcaatgcaagggaggctcaagtccgctttattgacttcctgcagcagggatcgcacattgagtcatcctccccctgtagttgtatagttggcccctctttggcagagggaagtgatgaatctgctggtagtgttgaccaaaaggattga

SEQ ID NO: 12559 - DNA, 873 bp, Oryza sativa
  Clone ID: TFbOSC401137j.C1.o28.fg
atgtccccctcccgccccgacgaggcggaccccgccgccgacttcggctcccaccccaccgaccaagagctcgtcaccaaatacctacgccgccacgtcgactccggcgggaacccgtggcggtacgtccacgaggccgacgtgtacgccgccgatcccgacgacctcaccggcaagtactccccggccgtcgccagcgacgggtccagggcgtggtacttcttcaccaccgtgcggtccaagagcaccggcgggcagaggagggcgcgggccgtgggcgacggcgggtgctggcactccgaggccggcgccaaggacgtcgtcggaggcatccgcagcccccgcccgatagggcggcgccagttcttctcgttcgtcaacaaggagggcccccggcgggtgcggtcggggtggatcatggtcgagatcggcctcaaatacgcccagcagaacgcctcctccgacgagcttgttctgtgtaaggtgtaccggagcccgcgggcgccaccggctgccgccgccgccaacaaatccatggccgccccacctcccaccgccacgaaatccaagacggaggaggctacaccacctcccgatgacgtgaaaccggtggtggcggctgcgcagactcccgacaccaaaatactcagggcggcgaaggaggcggccgcgactggatgcaagaggaaggccgacgtgaagagctctggtgcaagaaggggcaagcggctctgctcccgctgccgggcggagacatcggaatcggacagcgagacggcggtacttgacaggtcgccgtccatcgaagacgaaacggcggactcttcagaaatccatggaagcagtgatggcaaattcatcaggttcttgtga

SEQ ID NO: 12560 - DNA, 528 bp, Oryza sativa
  Clone ID: TFbOSC33262j.C1.o5.np
tctaaaaggcaatgtgcagtgcacaacaagagcagcaactgctcgtcagtggccaagccatgcagatggtactgggcggcgctcgcggccgagctgggccagccttcccgctcgcgccgcgcacgcctacgggataaagaccgcgccgctgctggccttctacgcctcggccagtctggcgctcgtggcgctgagcgtcggtgtttgctcgccggagaagaagctggtggtgccggagagcgtgtgcgggcggccgaccggccgctggggctgtagttccaccacgcctccggcgacctgtacgtggctgacgcgtacctgggcctcctgagggcgccggtgcgaggcgggctagccgaggtggtgacgacggaggccgccggcgtgccgttcaacttcctaatcatgtaatcttccattgggttctaataatttacaaggtcgtagtgctgcactatgagttagctgttctcaaccctttctgaaatggatttttttctgagttctcatggactagcttacagttca

SEQ ID NO: 12561 - DNA, 1245 bp, Oryza sativa
  Clone ID: TFbOSC401927j.C1.o13.fg
atggcgtgtgcagagacgtatatcgagaacatggaggacagatgcatctacttctttagcaggaggctattcgcagcgaaggctaggaacaagaggcagccgatgagggtggcaaacggtgggacgtggaaggcatctggtgggagcaagacggtgaggagcaagaaggttggcggcatcgatgttggtcagaagctcaccatggtgttctacgagcgtaggttcgagggcgaccaaaaccctgtcaagaccaactgggccatgcacgagtacaccaagatcattcctagctccaaaaaccagtgtatttacaataaggaaggaggacacagagccggtgaacgctgccgccgcggcgtcgagcacggacaagccctccacgccggaggcactgccaccgcctacgccaccgccacggccattgctgaacatggccggatcatcgtcggcaacgtcgctactgccaccgcaattgccaggcctggctgggtcgtcgtcgacgatgccgctggcactgccactgcagctgcctggcctgcccgggtcgtcggcggcgatgtcgctctgccgggcttggctggagagatgacgtccatggcggaccaggcgaacatggcctcgacgtcacaggcgtcagcaccgtcgtcggagctcccgcaggactggtacgacgagtacgaggtcgcgtacggtgccgcggcgccgccgtctcctagcacgatcagctgcgcggcgctgccgagctcgccgacggcgtggtggccgtcatcgatcggcgggccggtgcagcacgacggctacctcgggatggcggatcctgcgtcgtgtaatacgttggaacacctgttgcccagcgcggcgatcccaccagagccaatggcgccgccgaagaactcgccggcggcgccaccaccggccgacgccggcggcaactacgaccacccggagctcgccgactacggcggcggcgtccaggcgcagcacgagcatcatcagccgcaggagctgacggatggcgcggacggcgacgcacagctagagctaggcgccgcggagtttgattccgaacgagtagccgaaatgatatcccaaataatggatggtgaattcgtgtttaaatttgaggacgacaccattgttagcttcaacgaggtggcggcggcgccgatgttgatcgacggcggtggggacggcgacggcgatggtgcagatggaggtgtcggagatgatccattcgataattag

SEQ ID NO: 12562 - DNA, 396 bp, Oryza sativa
  Clone ID: TFbOSC412891j.C1.o1.fg
atggacgacgacgagatcgctctggagccaggctacgctttccgcccttccgacgacggcctcatcaccctcttcctccgccccaagatcgccaagatccccttcgagcaccgcctcatcaaccacgccgacgtctactccgccgatccgacggagctcgtcggcgagcacagaccggcgccgggaacccatgggagcggcagcgtctggtacttcttctgctccccgcgctacaccagcaagcgcaaggcctccgggaggcggcagcgcgcggtcggcggcgagagcgtgtggaagtcggagggcggcaagaaggccgtgatcggcgccgatggccgccgcgtcgggtacctccagaagttctcctatcactacactggtcaaggtcacctgtga

SEQ ID NO: 12563 - DNA, 1008 bp, Oryza sativa
  Clone ID: TFbOSC14633j.C1.o4.gm
atggacgccgtcgagacgcggcatggcgagtcggccaggggaaaaggtggagggacggtcatctaccgttcgcaagggcgcgtggcggcggtggcgaggtacaacgggttgggtagattccgtcggcagcggcaccccggactccggcagcgcgacagcggcggaaggacgacggtggctggccgggttggctcatctcgcagctcgccaggctggcttggcgaggtgcgcctggtagtggggacgacgacaagccgctggttcggcaacggtgtgaacagattcagcaatatcgaggttgccagccggcttgccttcgccgccgccgactggtgcctcgacctacacggctggtctattatgccgctgttgatgggcgtctacgtcttcaccgcccggccgtctcgtccgctgccgactggtgtttccgcctacacggctggcctattatgccgctgttgttgggcgtccacatcctcaccaaccggcttgccttcgccgccgccgattggtgtctccgcctacacggctggcctattatgccgctgttggtgggcgtccacatattcaccaaccggcttgccttcgccgccgctgattggtgtctccgcctacatggctggcctattatgccgtcgttattgggcgtccatgacctcaccgccagcctacctccatcgccaccgactggtgtttctgcctacacggctggcctattatgccgccattgttgggcgtctacgacttcaccggcctgtctctgtcgccaccgactggtgtcctcgcctatacggttggttggtcacaccaccgttcatgggcatctacgtcttcaccaaccggtttgcctttgccgccaccgactggtgtctctgcctacatggctggtctattatgacgccgttggtgggcatcttcgctttcaccgtcgaccgccttctttcgccgccgactggtgtcttcattgatccagatccagatatgcataaaaaggattcatggctttaa

SEQ ID NO: 12564 - DNA, 963 bp, Oryza sativa
  Clone ID: TFbOSC14633j.C1.o5.gm
atggcgggcgcggatgggctccttcccggcctcaggttcgaccctagcgacgacgagctcgtctcccgctaccttctccggcgcatccagcagaagcccctcccgctcgacggcgtcatcgtggatgccgatcccctgagcgtgccgccatggacgcttctcgcggatcacacccgaggcgacgaggccttcttcttcgcggaggcacgcgccaagaatggcaagggcaagcgacagaagcgaaccgtggagggcggagggttctggcaggggcagaggatggccgtggatggcgagcggctggtcgtcccaggcgacgatggaggcggcggcggcgacgaaggcctggagatcacgtggcgcaagtatgtgttgagcttcttcgccgagggtgaacggggcagctcgggctgggttatgcacgagtacgccgtgacgtcgccggctgacctcgcctcgtcgcagctccggctgtaccgcgtcaggttcagcggccacggcaagaagcgcaagagggagccgcagtgtctggactcccacgacgacgacgacggcggggatcaagaaagcgcgactcaccggcgcgccgtggctgagaccactctgttcgacggatacgtgcctcgtcctgcagccgacggcaccgaccagggcacctatggcgtgatcgacggcgaatcttcgctggcgtcacattgtcttcccgatcagatcgttcccccagcagaagaagctgatgccactgctggtgtagagaatcctctgctcgatgaggagcgctggtcaccaccacagcccgctctggtgaagcagaactcctacgacctaatggccatttcgtcactgctgttttctgatcttcccgacagaatcgatgacgatgacctgtctgtgtcgcaaacagagggcaccgatctgttcgagcagggctcctccggcgtgatcgacgacgattattgtcgg

SEQ ID NO: 12565 - DNA, 1023 bp, Oryza sativa
  Clone ID: TFbOSC407201j.C1.o2.fg
atgggggacgcgctgtgggagatgctgggggaggagatggcggcggcggcggcggcggccggcgagcacgggctgccgccggggttcaggttccaccccaccgacgaggagctcgtcaccttctacctcgccgccaaggtgttcaacggcgcgtgctgcggcggcgtggacatcgcggaggtggacctgaaccggtgcgagccgtgggagctgccggaggcggcgaggatgggggagaaggagtggtacttcttcagcctccgcgaccgcaagtacccgacggggctgcgcaccaaccgcgccaccggcgccggctactggaaggccaccggcaaggacagggaggtggtcgccgccgccgccgccggcggcgcgctcatcggcatgaagaagacgctcgtcttctacaagggccgcgccccgcgcggcgagaagaccaagtgggtcctccacgagtaccgcctcgacggcgacttcgccgccgctcgccgctccaccaaggaggaatgggtgatctgcaggatctttcacaaggtaggagatcagtacagcaagctgatgatgatgaagagcccagccagctactacctcccagtgagccaccaccaccccagcagcatcttccatgaccttcctccggtcccattcccaaaccctagcctcgtccccttccaccatgatctccccacaagcttccatcctccattgctgcagcacagccatgcgaacagcaagaacagcagcagcaacaatggcggcttcgtcttccccaatgagccaaacaccacaaacagcagcgataaccacatttcttgcaatggcgccatggctgctgctgctgctgctgcttttccttccttcagctgtgctagtactgtcactggcaaggggggcccaccggcgcagctcggagtcaacgccggtcaacaggagccaccgccacctacctggatggacgcttacctgcagcacagtggattcatttatgagatgggcccacctgcagtgcccaggggcgcatga

SEQ ID NO: 12566 - DNA, 963 bp, Oryza sativa
  Clone ID: TFbOSC401860j.C1.o15.fg
atgggagagcagcaacagcaggtggagcggcagccggacctgcctccgggctttaggtttcacccaacggacgaggagattatcaccttttaccttgcacccaaggttgtggacagcaggggcttttgcgttgctgccattggagaggtggatctcaacaagtgcgagccatgggatttgccagggaaggcgaagatgaatggggagaaggagtggtatttctactgccagaaggatcggaagtacccgacggggatgaggacgaacagggcgacggaggctggatactggaaggcgacggggaaggacaaggagatcttccgcgaccaccacatgctcatcggcatgaagaagacgctcgtcttctacaagggcagggctcccaagggcgacaagaccaactgggtcatgcacgagtacaggctcgccgacgcctctccgccgccgccgccatcctccgcagagcccccgaggcaggacgactgggccgtctgcaggatcttccacaagagctccggcatcaagaagccggtgccggttgctcctcatcaggtgcccgccgccgccaactaccagcagcagcagcagatggccatggcctccgccggcatcatccaagtccccatgcagatgcagatgccatccatgtctgaccagctgcagatgttggacgacttctccaccaccgcttcactctcactcatggcgccgccttcctactccactctgcctgcaggcttcccgcttcagatcaacagcggcgcccatccccagcagtttgttgggaacccgtccatgtactaccaccagcagcagcagatggacatggccggcggagggttcgtggtgagcgagccgtcgtcgctggtggtgtcgccgcaggatgctgccgaccagaacaacaacgccgccgacatctcgtcgatggcatgcaacatggacgctgccatctggaagtactga

SEQ ID NO: 12567 - DNA, 1131 bp, Oryza sativa
  Clone ID: TFbOSC400524j.C1.o1.fg
atggaagtggaagcaaggatacacctcctgttgatcaagctagtcttctataggagtgcagaagagcgagaatcagcctctgttcatattaacttgctaccagttcgggagctatactttgatccgcggaagaagatggacgcattctcccatgtcccgccaggttttcgtttccaccctactgacgaggaactcgtggattactaccttaggaagaaggtagcactgaagaagatagacttggacgtcataaaagatattgatctgtacaaaattgagccttgggacctacaagaacaatgcaagattggaaacgaggagcagaacgagtggtacttcttcagccacaaggacaagaagtacccgacgggcacacgcaccaacagggcgaccactgccggcttttggaaggccaccgggagggacaagccgatctatgtcaagaactgccttgttgggatgaggaagacgttggttttctacaggggccgggctcccaacggacagaagtcggactggatcatgcacgagtatcgcttggagaccaacgaatacggagctccccaagaggaaggatgggtggtctgcagggtgttcaagaagcgagtcgcggcggtgcaaagggcggccggcgacggcggcgactcacctttctggttcaacgagcacgtcgcgttcatggcgccggcgccaggcctcgactcgccgtaccatggccaccgccagagccacccttgcaagctggaggtagagtatcaccaccacctccttcctcaggaggcggcgccgttcatgcacctcccaaggctggagagccccaagctaccggccgccgacatcattgtcgccaccgcagcgtcgtccgctctccagccgtgcggccacacgacggcgcagcagctgcagctgcagatcgagccggtctacgtgacggccgatgcgtcggcagcagattggagggatcttgacaagctggtggcgtctcagttcggccacggcgactcgactgcgaaggagcccagttactgcaatccggtgcaggtgtttcaggtcgaggggaagcaggaggatagcttggattacgtgtccacgtctgcctcctgcggaggggaggaggatttgtggaaatag

SEQ ID NO: 12568 - DNA, 1113 bp, Oryza sativa
  Clone ID: TFbOSC401780j.C1.o17.fg
atggacactttctcccatgtgccacctggtttccgctttcaccctactgacgaggagctcgtcgattactacctgaggaagaaggtggcatcgaagaaaatcgacctcgacgttataaaagacgtcgacctgtacaaaatcgagccctgggatctccaagagaagtgcaagattggcatggaagaacagaatgactggtacttcttcagccacaaagacaaaaagtacccgacgggcacccgcaccaaccgggccacgggcgccggcttctggaaggcgacggggagggacaagcccatctacgcccgcagctgcctcgtcgggatgaggaagacactcgtcttctacaagggccgtgcccccaatggccagaagtcggactggatcatgcacgagtaccgcctcgagaccaacgaaaacggcaccacacctgaggaaggatgggtggtctgccgggtgttcaagaagcgggtggcgacggtgcggagaatggccgacggatcaccgtgctggttcgatgaccacggcgccgtcggtgcgttcatgccggacctcagctcgccgaggcagctactgccgcaccaccaccaccaccacccgggctcgtcggcggcgctgtaccacggccaccaccaccagcagctgcagcagatgtacggtcactgcaagccggagctggagtaccaccacctcctgccgcaggaggccttcctgcagcatcttcctcagctggagagccccaagccgccgccgccgcctcctgcggcggcggcctacattggcggccacctcggatcgtcgtcgtccaccgcccttactactcacgacgacgaagcctccggctccgccgcgcagcagcagccgccgtcgttggaggctgtttacatggccggcgccggcgtcggcatcggcgtcgacgcgtcggtgacggactggaggctactggacaagttcgtcgcgtctcagctgctcagcaaggagtccatgtccagctacggatcccatccggctcaggtgtttcaggctgcagacggtggcaagcatgaagaggctttggactacgcttcgacgtcggccggctccggcggcggcgaggctgatctgtggaaatag

SEQ ID NO: 12569 - DNA, 679 bp, Oryza sativa
  Clone ID: TFbOSC900198j.C1.o15.np
ctcaagttgatcgccggagcagcatcagcatcagcatcagcttcaccatgcggggatcagatcatcatcaggatgtcgtcgcggcaccgcggggcggtggcggtggaggagacgacgggcaggcgcacgacatggtgatgccggggttccggttccacccgacggaggaggagctcatcgagttctacctccggcgaaaggtggaggggaagcggttcaacatcgagctcatcgccttcgtcgacctctaccgctatgacccgtgggatcttcccgctctggcctcaattggggacaaggagtggttcttctatgtgccaagggaccgcaagtaccgaaacggcgatcggcccaaccgagtgacgccatcggggtactggaaggccacaggggcggataggatggtgaaggtggagggtgaccgtcctatcggcctcaagaagacgctcgtcttctacgtcggcaaggcgcccaaggggcttcgcagcagctggatcatgaacgagtatcgtctccctcatggcgacgctgaccgctaccaaaaggtagaaatttcgctgtgtcgagtctacaaacgcccaggaatcgaagacaactgtagtgcgatcgaatctcgatctacccgtcacttggccatttgcagattaattactagttctgcactactttaattgccctg

SEQ ID NO: 12570 - DNA, 1716 bp, Oryza sativa
  Clone ID: TFbOSC414191j.C1.o15.fg
atggacgtggaccctcctcctccgctgccgccgccaccgccaccgccaccgccgccggcgacgccgcagcagaacaaggcggtggagcttcctcccggcgtatacttcaacccgacgcgtgaggaggccatgcaccactacctcaaccggtggatcgccggcaagacgataccggagatggaggccgggttcgtcgccggcgccgacgtctacggcgacggccccgacgcgctgcggcggcggcaccggccgggatactggtgcaactgcgtgtacaagtggttcttcctttgccaccgcaagcgccagagctcgcgcaggaccaccggcaacaagcgcgccgagcgcgtcgtcgccgccggtgggcggtggaaggtggagcaggggaagaaggtgctcggcggcggcggcggcggcggggagagggacagcttagggttctactccagtaactccacgaagaagacgtcatggattatggaggagtacacgagctccgccgctgatggcgccgccgccgcccgcggcgaggaggacagaatggagcccgtgctctgcaagatctacctctcgccgcgcgcccccgccggcgagaagcgggcgctgttcggggaggacggcgtggcggtcgggcccgacggacgcaagaggaacgcccgggtgacggttctggcgacactgttcgacgacgtcgcggcactccttggacagccggtcgccgcgccgccgctgccggcgccaggcgaacagcttggccatggccatggccatttcgatgatgtagcggctcgtttcggacaggtcgccgtggcggcgctgccggcgtcgggcgatcttggccacggcgatttcgatgacgacgccgcggccctccttggacaggtcgccatggcgccggcgccggcgccgggacatcaccaacagggttatgtcgtcgcggaggcgccgctgccggagtcaggttatcttggccattatcaccacgacggccatctcgcgcaggcggcggcggcgccggagcaagatcattatcttggctatcacagtcacgacgcgcatgtcgtggacgcggaggcgacgccggagcaaggctatcatgacgacgcgcatgtcgcggtggcgccggcgccggagcaaggcgatcttggccatgaccaggggcatctcgcggcggcgctgacgccggaggaatgtggcgagatagttggcgcatacgaatttcacccggaaatggtgcagatgctgtccattggcttcgccgcgcccgacgaacagttgttgccgcagctgctagaccccaccggcggcggctacgacatggctagctccgccatcgccgccgttggcgacgtgaacgcatatgccgccgcggcgcccacgccgcgaattagacccaacgcggcggaggcaatggcggcgacggcgacggcagagacaatgccaccaccgctggacgccgtggcggccgagctatccgcgccgccgcgtggcttaccgccggagctcgctttcagtgccttgccgtcggtgcagcaggagccatcctgtgacgacggcgacaacttcggcgagctcgtggcggaggcgatgccgccgttgatcggggagaacgccggcgtcgatgccggcagcgacgagcctctgccggatttggccggcatcatgacggagttggattttggacatgactttttcagcaatcagcacagagaatga

SEQ ID NO: 12571 - DNA, 1512 bp, Oryza sativa
  Clone ID: TFbOSC5990j.C1.o1.gm
atgacatggtgcaacagcttcaacgacgtgcgcgccgtggagaacaacctggccaccgccgccgccgtggccgcggccaagaagcagcagcagcagcagcaggtctcccagcacgtcaacctcatcaagacctgcccctcctgcggccaccgcgcgcagtatgagcaggcagcggcggcggcgacgatccaggacctgccggggctgccggccggggtgaagttcgacccgacggaccaggagctgctggagcacctggaagggaaggcgaggcctgacgcgcggaagctccaccccctcatcgacgagttcatccccaccatcgagggcgagaacggcatctgctacacccatcccgagaggcttccaggcacccgtcaggacattggaactggagtcggcaaggacggcctgatccggcacttcttccaccgcccgtcgaaggcgtacacgacggggacgcggaagcggcggaaggtgcacaccgacgagcagggcggcgagacgcggtggcacaagaccggcaagacgcggccggtgttcaccggcggcaagctgaaggggtacaagaagatcctggtgctctacaccaactacggcaagcagcgcaagccggagaagaccaactgggtgatgcaccagtaccacctgggctccgacgaggaggagaaggacggcgagctcgtcgtgtccaaggtgttctaccagacgcagccgaggcagtgcggcggcggctcggcagcgacggccaaggacctctccgtcgacctcgtcgccggtaacaacatcaaggctagcaatgctgctgctgaacaccaccataacgacggcgtcggcggcggcggccacggtggcaacaacagcagcatgctgaaggaagctgcaggcattgtagatttctacaacccagcggcggcgctaatcggctacagccaggcggctcctaacaacagggcggctgcttctgctcatttgacgatgcctaactttgaggctcaagatgttcaaaggtggcttgccttgctcgagatctggagcttgatcctcgaaatcctcgcactgcgggctgagctggcgccgacgtggcgcctacgtggctgccacgcgggccggcgggaggtagacgacgacccggccgcgaatggacggcgggtggcggcggcgagcagcggagcgaaccacggtgatacaggcaaaagcgagcacaccgggcggctgcacgtgacaaggggagacgagccaacggctcggattcgtcggaggttgctcgacggcggcggattgcggcggcggcaaccggcggcgggagaagagggaaacggcgacgaggtcacgagaggtcgattcccggcggtgagagcatctacgcggcgtcgggaactcgacgctagcgtcggattgggcggaactacgccgagcgaggccggcgacgagcgggtgctacggagctcgggcggcgacggcggcgagcacacggcgagcgacggcaacagtcggggcggcgccggctaa

SEQ ID NO: 12572 - DNA, 879 bp, Oryza sativa
  Clone ID: TFbOSC400621j.C1.o20.fg
atggcaggaggcggaggcggcgaccgcgcgccgtcgtcgtcgtcgacggcgatgatctcgcgactcctgccgccgggcttccggttccggccgaccgacggggagctcgtcgcccactacctcgcccggaaggcggccgacgccggcttcacctccgccgccatccgcgacgccgacctgtaccgcgccgagccctgggacctcctgccgccgccgcgttgtgatgcggcggcggaggaggaggaggaggaggaggagcggtgcggctacttcttctgcacgaggagcttcaggtggccgtcgggaacgaggacgaacagggccacggcgaccgggtactggaagtcgacggggaaggacaaggcggtgctgcacggcggcggcggcggcggcggccgccccgtgggggtgaagaagacgctcgtgttctacagggggagggcgccgaggggcgagaagacgagctgggtcatgcacgagtaccgcctcctgcacggcggcgccgccgccaccgcctcttcttccccgacgccgacgacagttgtcgcccgcagtgagtgggtgatttgcagggtgttcgtcaggaagacaccagatggtaacaacgataggggaactacagaacatcatcttccctccgacgacgctcatctccgttcgtcgccggcgccggcgaactctgtggacggcgcaggccatgcgagctgcagcttcttctccggtgctaatgagtccatggcgccaagcgaccatttcaacataggagacgacatgatcctccatggccacgacgaggaggagttgctgatgatgaactgttcttcggcttttgatctgccagagcttctcgactacgagagcttctcgctggacctttga

SEQ ID NO: 12573 - DNA, 1278 bp, Oryza sativa
  Clone ID: TFbOSC12503j.C1.o3.fg
atggagagcccggactcgtcgtccggctcggcgccaccgcgagtactacggcggcaacagcagcagccgggctcggcgccggagctgccgccggggttccggttccacccgacggacgaggagctggtggtgcactacctcaagaagaaggccgcctccgttccgctccccgtcaccatcatcgccgaggtcgatctctacaagttcgatccctgggatctccccgagaaggcgaacttcggggagcaggagtggtatttcttcagcccgagggaccgcaagtacccgaacggggcgcggccgaaccgggcggcgacgtcggggtactggaaggccaccggcaccgacaagcccatcatgtcgtcggggagcacccgcgagaaggtcggcgtgaagaaggcgctcgtgttctaccggggcaagccacccaagggcgtcaagactaactggatcatgcacgagtaccgtctcacggacacgtctagctccgccgccgccgtcgctacgaccaggcggccgccgccgcccatcaccggcggtagcaagggcgccgtctctctcaggctggatgactgggtgctgtgccgcatatacaagaagacgaacaaggccggtgcggggcagaggagcatggagtgcgaggactccgtggaggacgcggtggccgcgtacgcgccgtcgtcgcagcagcatgccacggctgctgctggcatggccggttcggacggcgccggaggagttgctgcagcgcacggcggcgactacagttcactgctccatcacgacagccacgaggacaccttcctcgtaaacggcctgctcaccgcggaggacgccgccggcctctcgaccggcgccagctctctcagccagctcgccgcggcggcgagggcggcggcgacaccgtgcgacgccaccaagcagcttcttgctccgtctccaaccccattcaactggttcgaggcattccttccacgggccaaggagtttcctagtgggctaagcaggagtagcagagacatcggcgacatgtcgctgtcatcgacggtggacaggagcctgtctgaggctggcgccgtggccattgacaccggcgacgccgccaatggcgcaaacactatgcctgcatttatcaatcctctcggcgtgcagggtgcaacctaccaacaacaccaagccatcatgggtgcctcgttgccatcggagtcagcagcagcagcagccgcctgcaatttccagcatccgttccaactctccagggtgaattgggattcctga

SEQ ID NO: 12574 - DNA, 1101 bp, Oryza sativa
  Clone ID: TFbOSC400780j.C1.o51.fg
atggaatcatgcgtccctcctgggttcaggttccaccccaccgacgaggagctcgtcggctactacctccgcaagaaggtcgcctcccagaagatcgacctcgacgtcatccgcgacatcgatctctaccgcatcgaaccctgggatctccaagaacattgtgggatcgggtacgatgagcaaagcgagtggtacttcttcagctacaaggacaggaagtacccgacggggacgaggacgaacagggcgacaatggcggggttctggaaggcgacggggagggacaaggcggtgcacgacaagagcaggctcatcggcatgaggaagacactcgtcttctataagggcagggcgcctaatggccagaagaccgactggatcatgcacgagtaccgcctcgagaccgacgagaacgcgccgccacaggaagaaggatgggtggtgtgccgagcattcaagaagaggacggcgtatccggcgaggagcatggtggagacgtgggactactccttgcacgagcgcaacatcatgagcgccgcggcggcggcggcgttcgccgatccgagcgcggcgtacgcgcagatgaggcggcagcacaggagcgggcggttcaagcaggaggcggagctggacggcgccgccacagccctcctccactactccagccacctcgccgagctgccgcagctcgagagcccctccgcggctgcggcgccgctccagcccaacccgagccagctggccaccgccggcgaggacgacgactgcaagggcgataatggcggtaggagggccaagaaagcccgcgccgccggcgacaaggtggcgacgaccacggactggagagcgctcgacaagttcgtcgcgtcgcagcttagccccggggagtgtggcagcatggaggcaacggcggaagccgcggcggcggcagtcgccggtgtgagctcgccgctggaccacggcgatgacgacatggcagcattgctgtttctcaacagcgacgagagagacgaggtcgacaggtggacggggttgctcggctccggcgccggcgcgagcggcgtcgacggcgacctcggaatctgtgtgtttgacaaatga

SEQ ID NO: 12575 - DNA, 1995 bp, Oryza sativa
  Clone ID: TFbOSC32412j.C1.o3.fg
atggcgtcggcggctggagatgggctccctccggggctcaagttcgagcccaaggacgacgagctcgtcgcccgcttcctcctcgcgcgcatccagggtaagcccctccctctccacggcgtcatcctcgacgctgatcccctctgcgcgccgccatggaggcttcttgcggatcatggcaggggcgatgaggcgttcttcttcgccgacgcgcgggccaagaatgggaaggggagccggcagaagcgcacggtcgagggcggagggtactggcaggggcagaggatgtgcgtcgatggtgagaggctggtcgtccccgatggcggcttggagatcgcgtggcgcaagtacgtcctcagctacttcgcggatggcgagaaggggagctcggggtgggtgatgcacgagtacgccatcacgacgccggctgacctcgcgtcgtcgacgatgcggctgtatcgcatccggttcagcggccacggcaagaagcgcaagagggaaccggaatctcagagcgcccaccacgacgacggtcgagcgcgctgcgccccacagatagccatgcccgagactgctctgctcgaggacagcgccccgccgccacagcccgttcttcctcctgctgcggtggtgaactctgtctctgatggcgccgttcctcctcctgcaccggtggtgaactgtgactctgacgtcaccgatgaggatgagttgcagagctttgtgcctgagttctccgcgcgcaacctgttcgtctctttgccacaaggaagccatgaagctgaagcggacgtagttggtggcgcattgccggcgcaatctatgtcgtcgtttgctgatgttggaggtccagagaacatggatgaccagagctgctccggcgtggtgtttgctaatctttccgacctgatcgtcttaccaccggtggaagccagtggcgcagcacccgcgccatcttgggcgtcatcgctggacaatcaaaacgacgaggcgcctgtgttctttgagtttccagagagcatggatgacattattggctgctttgacttcgccaccatggacgacccgagctgcactagcgccatatcagaggagccctttcttcctcctgcagcaatggtgaaccatgacgatggctatgcctctgacaacgccgatcaaggttgctccggcgccgttcctcttccttcagcagtggtggaccttcccaatgagactgacggcgccgatcaaagctgctccggcgtggtggacgattcatccatggtgtttgctaatattcacccgttggactctccagcagaaggtggccatgaagccgaagccggtgccgggggtggccgtgcagcaccagcgccgtcttgggtgtcatcgctggacaaccaaaacgacgaggcgccaatgttcttcgagcttccagagagcctggatgacatggttagctgctttgactttgccgccatggatggccagagctgcactagcgccgtgtcagagactgctctgatcgaggagctcgttcttcctcctgcagcaatggtgaaccatcacgatgactctgtctctgacatcgccgatcatggctgctccggcgccgctcctcctccttcagcagtggtggacctccccgatgactctgacggcgccgatcagagctgctccggcatggtggatgattcccttcccgggtactatgaggctgagctgaaggttccgcttgagtacgccgcgcgcaatccggtcgactctccctcaaaaggcggccatgaccatgaagccgaagtcgacgccagtggtggtgcagggtccatgatgtcatcgccggacaaggagaaggagcactcctcatcgggcgtcatggacgtggaggccactggttttggagttccagacagcatggatggcctgagctgcatcgacttcgccgagacgatggacgacctgagctgcatcgacttcaccattgatgatgagctgttcgatctatggagctag

SEQ ID NO: 12576 - DNA, 912 bp, Oryza sativa
  Clone ID: TFbOSC400909j.C1.o25.fg
atgagcggcggtcaggacctgcagctgccgccggggttccggttccacccgacggacgaggagctggtgatgcactacctctgccgccgctgcgccggcctccccatcgccgtccccatcatcgccgagatcgacctctacaagttcgatccatggcagcttccccggatggcgctgtacggagagaaggagtggtacttcttctccccgcgagaccgcaagtacccgaacgggtcgcggccgaaccgcgccgccgggtcggggtactggaaggcgaccggcgccgacaagccggtgggctcgccgaagccggtggcgatcaagaaggccctcgtcttctacgccggcaaggcgcccaagggcgagaagaccaactggatcatgcacgagtaccgcctcgccgacgtcgaccgctccgcccgcaagaagaacagcctcaggttggatgattgggtgctgtgccggatttacaacaagaagggcgggctggagaagccgccggccgcggcggtggcggcggcggggatggtgagcagcggcggcggcgtccagaggaagccgatggtgggggtgaacgcggcggtgagctccccgccggagcagaagccggtggtggcggggccggcgttcccggacctggcggcgtactacgaccggccgtcggactcgatgccgcggctgcacgccgactcgagctgctcggagcaggtgctgtcgccggagttcgcgtgcgaggtgcagagccagcccaagatcagcgagtgggagcgcaccttcgccaccgtcgggcccatcaaccccgccgcctccatcctcgaccccgccggctccggcggcctcggcggcctcggcggcggcggcagcgaccccctcctccaggacatcctcatgtactggggcaagccattctag

SEQ ID NO: 12577 - DNA, 945 bp, Oryza sativa
  Clone ID: TFbOSC401024j.C1.o4.fg
atgacgtggtgcaacagcttcagcgacgtccgcaccgccgtggacagcagcttgtcgccggccgccgccgtggccgccgccgcggggaagaaggcggcggcgtcgctcgccgtcctcgtcaagatgtgcccctcctgcggccaccgcgcgcggtatgaacaggagacgacgacgatccaggacctgccggggctgccggccggagtgaagttcgatccgacggaccaggagcttcttgagcatttggaagggaaggcgaggccggactcgaggaagctccaccctctcgtcgacgagttcatccccaccatcgagggcgagaatggcatctgctacacccatcccgagaggcttcccggtgtgagcaaggacgggctggtgaggcacttcttccaccggccgtcgaaggcgtacacgacggggacgaggaagcggcggaaggtgcacagcgacgaggtcgacggcggcgagacgcggtggcacaagaccggcaagacgagaccggtgatggccaacggccggcccaggggctacaagaagatcctcgtcctctacaccaactacggcaagcagcgcaagccggagaagaccaactgggtgatgcaccagtaccacctcggctccgacgaggaggagcgggacggcgagctcgtcgtctccaaggtcttcttccagacgcagcccaggcagtgcggctccaccgccgccgccgccgccgccaaggaggcctccgccgccgtcgccgccgccgtggtgaacagcaactactccatcgtccatggccatcaaggtggtggtggtggtagctttctcaaggaggcaaacgttgtgcacgagttctacgacccggcagcaacgatgggttaccggccacctgctcctgctgcgcacttcgcgccaaacttcgcggtgcacgcggcaaggaacagctttggtggcccttga

SEQ ID NO: 12578 - DNA, 1149 bp, Oryza sativa
  Clone ID: TFbOSC413292j.C1.o1.gm
atggccatgggaggcagtagcccggcggcgggcggcggattgggcgggcggcgaggcggcggcggcgccgtcgaagccgcggggttgggagcgggcggtggcccgctggcgaggccgggtggcggcacggtggggcggcagcggcgacggtggcgatgcaggaggcgcgcggtgctgagaggagcgctcgagcgttgtgcggcggcaggaaggaaaaaggaaaagtgcgacgtccgcaccgccgtggacagcagcttgtcgccggccgccgccgtggccgccgccgcggggaagaaggcggcggcgtcgctcgccgtcctcgtcaagatgtgcccctcctgcggccaccgcgcgcggtatgaacaggagacgacgacgatccaggacctgccggggctgccggccggagtgaagttcgatccgacggaccaggagcttcttgagcatttggaagggaaggcgaggccggactcgaggaagctccaccctctcgtcgacgagttcatccccaccatcgagggcgagaatggcatctgctacacccatcccgagaggcttcccggtgtgagcaaggacgggctggtgaggcacttcttccaccggccgtcgaaggcgtacacgacggggacgaggaagcggcggaaggtgcacagcgacgaggtcgacggcggcgagacgcggtggcacaagaccggcaagacgagaccggtgatggccaacggccggcccaggggctacaagaagatcctcgtcctctacaccaactacggcaagcagcgcaagccggagaagaccaactgggtgatgcaccagtaccacctcggctccgacgaggaggagcgggacggcgagctcgtcgtctccaaggtcttcttccagacgcagcccaggcagtgcggctccaccgccgccgccgccgccgccaaggaggcctccgccgccgtcgccgccgccgtggtgaacagcaactactccatcgtccatggccatcaaggtggtggtggtggtagctttctcaaggaggcaaacgttgtgcacgagttctacgacccggcagcaacgatgggttaccggccacctgctcctgctgcgcacttcgcgccaaacttcgcggtgcacgcggcaaggaacagctttggtggcccttga

SEQ ID NO: 12579 - DNA, 519 bp, Oryza sativa
  Clone ID: TFbOSC401927j.C1.o10.fg
atgggaagtggaaggggaaggagaaggtggtgcccaagcacggcaagaaccggcacggcatgcttgtcggctgctacttcgtccccaaggaccctggagctcttcgccatcctcaggtgcaagctcgtatgcggccagctccccggtgccctcaacaacgtcttcgagcatatcaggatcctcgaattccaccccgccctcctccatgagacgtacatcgggaaagaggaggatgggtacatctacttcttcaacaggtggcagttcgcgacgaaggcagggaacaagaggcggccgacacaggtggcgaagggcgggacgtggaaggcgtctagtgggagcaagacggtgaggagcaagaaggtcggcggcatcgacatcggccagaagctcaccatgatgttctacgagcgcaggttcgagggtgaccggaaccccatcaagaccaattggggcatgcacgagttcaccaagatcattgatgactccaaaaaccaaaaaccaggtagtccttgttaa

SEQ ID NO: 12580 - DNA, 1704 bp, Oryza sativa
  Clone ID: TFbOSC900009j.C1.o21.fg
atggcggcggcggatgggctcctcccgggcctcaagttcgatcccagcgaccacgacctcgtcggaaggtacctgctccggcgcctccagggccagcccctcccgctcgacggcgtcatcctcgaggcggatcccctgagcgcgccgccgtggaagcttctcgcggatcacggccgcggcgacgaggccttcttcttcgcggaggcgcatgccaagaatgggaaggggaagcggcagaagcgcaccgttgagggcggcggattctggcaggggcagaacacgtgcgtcgacggcgagaggctttgcgtccccgacgacggcgacggcagcggcggcggcggcggcggcttggagatcgcgtggcgcaagtacgtgctcagcttcttcgcgaacggagagaggggcagttcgggatgggtgatgcacgagtacgcggtgacggcgccggatggcctcgcctcgtcccaattgcggctgtatcgcgtccgattcagcggctacggcaagaagcgcaagagggagccccaatgtccgggagcccacggcgacgacgacggcgagctacaatgcgcgccgcccccgcgctccatggcggagacggctctgctcgaggagcgtgggccactgccccatcccgttcttggccctgcatcggtggtggatcagtgcaccgatcagggctcatccggcgtgatcgacgattcttcgctggtgtttcgtgatcttcccgacctgattgacctgccagttgcggaggaagcagatgccagccatggtgcagagactgctctgctcaacgagcacctgccgctgccgccgccacagttgttcgttccccctactgcagtgccgctggacctcgccgatgactctaatggcgccgatcagaactcctatggcatgatgggcgacgatcagctgctgcttcctgaccttcccgggacaatcaatgacgacatgccagacctgttcgtctcccaagcagaggaagccagtgcagtgcccgcgatcagctaccactcgtcgggcttcatgggcaacgaggttgcggcattgtctgattttgagttgccggagagctattcctcatctgatgccatggacggcgaggcgctggcattgtcgaattacgagtttccagagagcttcgaggaggatctgagctgcatcgacttcgccactgccaacgcgagcagcctcggcttcccaatggacggataccccatggacgagctgttcgatgatatgcctgaccagggctcttccggcgcgatggacgattcatcggtggtgttccgtgatcttcccggcctgatcaacctgccagccgcagaggaagcagatgccatcggcgatgcagagactgctctgctcagggatctcgccgatgactctaatggcaccgatcgaaactcctatggcgtgatgggcgacgatcaggatcggctgctgcttcctgaaattcctcggagaatcgacatgcccgacttgttcgtctctcaagcagaggaagccggtctcggtggcggtgcagcgctggactcctcatcgggcgccatggacggcgaggcgctggcattgtccgactttgagtttcccgagagcgtcgaggaggtgctgagctgcatggacttcagcacggtcgacatgagcttcttggacgtccccattgacgagctgctagatgatctgcccgcagactga

SEQ ID NO: 12581 - DNA, 1206 bp, Oryza sativa
  Clone ID: TFbOSC401001j.C1.o48.fg
atggctgaatcctccgaatctgcgtggccgcagcagagtcagcagctgcagattagcagcacaatgccggccggttctgcatggccggaggaggagaatctcgagaatctcgagcagccgcttcccctgctgatgccatcgtcggaggatcatcgcgagcagcagcttgttcccgttccatggctgcagcaggatcaggatcaggagtggcatgagcaggagcagtttcttcccctcaaaaatcagaatcaggagcagcttcaggatcagcaacctctgcaggatcaggaggagacgcgtagatatttgggcgtgcccggaatccggttcgtgccgtcggatatagaacttatccttgacttcctccggccgaaactacgcggcgagcagctgcccagctacagctacatgcatgtctgcgacgtctactccgaccatcctaaagaacttacgagtaagctgggtcccagccgcgaaggaaactggtacatgttttcacctagaaaccggaaatacaacaaaggcaaaaggcctagccgaagcaccggtcaattgggtttttggaagtcgactaccaagaacgaggccgtccttgacgccctcagcgataacatgttgattggatacaaggcatgcctcacctatcacgaatacgatgagagcatgccgacgccaaagttgaagaaagagaacgcgatcaagacgccgtggaagatgtgggagttcgtgtgttccaactccaaccggccgttcgacgcggaggaggagcccatgcggctcaacgactgggtgttgtgcaaagttaccaacaaggacaacaaagttaccaccaagaagttcaaaccacaacgcagcaagaagccgaagaagccgaagaagctacagcaggaggaacagccacaaaaccaaggcattgtgatcaggcagccgtcagaatccggctcggcctcctcgtcgcaccaagaaatccctggctcttctcttcccggagccggaggagacgccgcggccgcggcggcgacggcggcggcggtggtggatcctatgccattgcatatgattcctccttcttcatggaattatttcagcacgggagttactgcagatggtattgttatggatgacagtacgggagtcgattcatatggttgtgtagatggtgctggtgctcttaatttccagaggaacatcttctaccaccgttaa

SEQ ID NO: 12582 - DNA, 1470 bp, Oryza sativa
  Clone ID: TFbOSC418099j.C1.o5.gm
atggaggaggagaagaggttggaaaggattattaaggagattgacagtccaattagcccaggaggaggagcagctttattagcagaagatgatgatctggtgtttccagggtttcgatttcatccgacggatcaagagctcgtggggttttatctgacaaggaaggtggagaagaagcctttcagtattgacatcatcaaggagatcgatatctacaagcatgatccctgggatcttccaaaggtgagccatggcgcggtggcgctgcagggctcgtcgtcgtcgtcgtcgttgtcgacggcggcggcggcggagaaggagtgcggctatttcttctgccttcgagggaggaagtacaggaacagcatccgccccaaccgcgtcaccggctccggcttctggaaggccaccggcatcgacaagccaatctactcttcctcactcgccgccgccgccgccgccgccggtgccggcgactgcattggcctcaagaagtctctcgtctactaccgcggcagcgccggtaaaggcaccaagacagattggatgatgcacgagttccgactcccctcctccatctccgactccgatcacctccaagacgcatcagagacatggacgatttgccggatcttcaagaggagcatgacctacaccaagggcagggcggcggcggcagcagcatccatgaacaagcgaattagccatgagcttcagcacattcatcatcatcagcagcagcaattctactaccacgaggtagtccatgacggccatggccaccaccatcgtcgccacctgcagcactacgccggcagcgcttccatggcagcggcggcggccaacatcgtcgacgtcatcgatcactcgtcggacgccgagacgacgacgaggtctcactctcactctcagtctcacctcgtcgctgacattcgtcatcgtcagtcgccgttcatgctcgacttccatgctgggacggcgtcgtcgtcgtcgtcgacggcggcggggtggagcgaggtgatgagcttcagtagggatggcgggagcagcagcggcagtagctgggacgagctggggaggatcatggatatctctaccaattctgctaataataattactacttcgcgccgccgccttctcccgccggagccgctcgactcctcctagagcgcgccagcccgctgccgccgcctcccgccggagctgctcgcctcctcctcgcgcgcacccgccggagccgcctcaccctacccgccgctgcctgcttccctgctcgcgccgcgccgcgccgcgatggagaggaaagagaggcgggaggagagggggccattggaggagggctggaggtcgctgcgcatggcccgtcagcatcggcgaggttggctgggcaagaggcgagcgccaacagaggtgccggggaggagcaggccgccggcgcggtcgtaggagagggtgccgactggaggtag

SEQ ID NO: 12583 - DNA, 1080 bp, Oryza sativa
  Clone ID: TFbOSC410931j.C1.o1.fg
atggagcatgacgtgcaccaccaccggcagatgatgcagcagcagcagcagcaggagatggacctgccgccgggcttccggttccaccccaccgacgaggagctcatcacgcactacctcctccgcaaggccgccgaccccgccgggttcgccgcgcgcgccgtcggagaggccgacctcaacaagtgcgagccatgggacctgccatcgagggcgacgatgggggagaaggagtggtacttcttctgcgtgaaggaccggaagtacccgacggggctgaggacgaacagggcgacggagtccgggtactggaaggcgacggggaaggaccgggagatcttcagggggaaggccctcgtcggcatgaagaagacgctcgtcttctacaccgggagggccccccgcggcggcaagaccggatgggtcatgcacgagtaccgcatccacggcaagcacgccgccgccaattccaagcaggatcaggagtgggtgctgtgcagggtgttcaagaagagcctcgagctggcgccggcggcggcggcggcggtcggcaggagaggcgcgggcgcggggacggacgttgggccgtcgtcgatgcccatggcggacgacgtcgtcggcctcgccccgtgcgcgctcccgccgctgatggacgtgtctggcggcggcggtggcgccggcacaacctcgctgtcagcgaccgcgggcgcggcggcggcgccgccgccagcgcacgtgacctgcttctccaacgcgctggagggccagttcctggacacaccgtacctcctccccgccgccgatcccgcggatcacctcgccatgtcctccgcctcgccgttcttggaggccctgcagatgcagtacgtccaggacgccgccgccgccggaggagcgggcatggtgcacgagctgctcatgggcggcggctggtattgcaacaagggcgagagggagaggctgagcggcgcctcgcaggacaccggcctcacgtcgtcggaggtgaaccccggcgagatctcgtcgtcgtcgcggcagcaacgcatggatcatcacgacgcgtccctctgggcctattga

SEQ ID NO: 12584 - DNA, 2262 bp, Oryza sativa
  Clone ID: TFbOSC401138j.C1.o3.fg
atgacggtgatggagctcaagaagctgccgctcgggttcaggttccaccccaccgacgaggagctcgtcaggcactacctcaaggggaagatcacggggcagatcaggagcgaggccgatgtcatccccgagatcgatgtctgcaagtgcgagccgtgggatctccctgataagtctctgatccgctccgatgatccggagtggttcttcttcgcgccgaaggataggaagtatcccaatgggagcaggtcgaacagggcgacggaggccgggtactggaaggccaccgggaaggacagggtgatcaggtccaagggtgacaagaagaagcagcaagtaattggcatgaagaagacgctcgtgttccaccgggggcgtgcgccgaagggtgagcggactgggtggatcatgcatgagtaccgcaccaccgagccggagtttgagtccggtgagcagggaggttacgttctctaccggctgttccgaaagcaagaggagaaaattgagcgacccagtccggatgaagtggatagaagtggatactcacccactccttctcgttcaactcctgataacatggaaccaattgaagacggaaatacaccattaaacagggaatctccagaatctgctctgcatgaaagcccaattgatttgcctgctctaactgaggctcaagctgcgccaattacaaggtggcttgcagacagaactgataacgcgacaacaaatgaagtaaacatctctcacatgcctcatcatgggcttgatggaggagctaaggctagcccttcagctggtgctttccctcagctgattggttcacaacagaatatccatgataataatgaattagccacagtttctgcacccatgctaccacatgaagacttcaataatttccctctaggagccattggtaattttgatggcaatatgaatcctcgagatccagtggaggagttcttgaatcaaaccattgctgatccagatgagcattcatcaacaacatcaaaggctcagtatgattcggacactggaatcataccaactgagtttgagaaccatggggtgatgcagggtgaattcatggatgatctgagtgggttggaaaatttagatttctggccagatgaccgaaatccccagttgagtgcactgtatgaggacacaccattgctgccttatgatagcaccgaccaggatgtgctctccatggactctggtgctgaatccttgcaagatctattcaacagcatggacgattcaaacgcgaggaataatgtatggggcaacgaaccattcctccaggggactggatttcccatgtcttggccgttacagccgaactccgcatttccaaaccagggcactgcaaataggaggctcatgctacagctatcagaatcattatctcctgattttgatgtgagcatgactagagatgagtgtgaagatgaggaaccaggtattgttgtaacttcgaagtatgtgaatgaagctcctgaggagtcaactgcagaaaaggatatgccttctgatggagatgatgctgagccaacgggtattactatcctgaggcgacgccatgctccaactgcaagttcgttttctgatggagatgatgctgagtcaacgggtattaccatcctaagacagcaccaagctccaaatgcaagcttgctttctgatggagatgatgctgagtcaacgggtatcactatcctaagacgacgccaagctccaactgctagctcagctagttcatttactcaacagggtgctgcagtgcaaagggtgcggctacaatcaaaccttgatgcagcaccgtgttctagcgttgatggttcatcaagttgcatcataaatgaaggtgaaagtgaacgcaccatggagaaacctgagattgaagagaatgcaggaagtaccttggctgaaggtgggacttgccatgaggatgaccagaaggagcatgatgcttcagcagcaaatgctaaatctgttctgaggctgcggaagacagcagagggaagcgacaaggagaacaagcaggaggaagaggagggtgttcttgcttcacatatgttagtagccacataccctagttgttcagcagttgatactttgaaagagagagttgagcgaaagttgaaaaaagcttcatgcaaacgtgaggatggtcacctgctgcctagtggattatgggccaaagctgattttgatcttttagaaaatgattttaagggctggtttgggttgtga

SEQ ID NO: 12585 - DNA, 1632 bp, Oryza sativa
  Clone ID: TFbOSC400138j.C1.o85.fg
atggcggcaccggaggatggggaggacaagaatttcgggaagaacaagcacgggctcccgatcggcttctacttcgcgcccacggaccaggagctcctcgccatcctcgaggccaagcgcctcggccgcccgctctcccgcgcgcacgacgccttcttccacgacatccgcatcctcgacttccaccccgccgagctctacgagaagtacgccaaggacgaggagaagggctacttctacttcttcagcaagagggagttcccgacgagcagcaagaagcggccgctgcgggtggcggagggcggcgcgtggaacagctccggcgccgtttacaaggtggtgaagagcagcaagtccggcggcggctacgacgtcggccataagaaaaccctcgtgttccaccagcgtttccccggcgacaaggaggccgtcaaaaccaactgggccattcaggagttcaccaggatcatcgggccccagaacgaggttccggatcttgccgtgtaccgcctgtacaagatgaggaaggaaggcagggagacgcctgcagacctcgccgccgacgaggccgcggccgcggcggccatgaacaaccgtggacaacaagcgtcggctgcggccatggcgctgccaccgccggcgacgggcctgcctgggggaaggatgatgtccatggcggacaaggcgaacatggcctcgacatcaaaggcgtacgggccgtcaaagtcaagctcatcgcaactccagcaggatgcggcggcggcggcggcgccaccgaacgcagcaggggctagcaactgggcgccgaggccttgcaactgccgggagtgcgcgccggcggcgggacactatggctacttcgcggccgcggcggccatgaacaaccgtggcggacaagcgtcggctgcggccaaggcgctgccactgccggcgccgggcctgcctggggtaaggaggatgtccatggcggacaaagcgaacatggcctcgacatcaaaggcgtacgcgacgtcgcagtcaagctcatcgcaactccagcagggtgcggctgcggtggcggcgccgccgaacgcagcagggcctagcaactgggcgccgaggccttgcaactgccgggagtgcgcgccggcggcgggacagtatggttacttcgcgtccatggttccacggccgtcgctggaccggaagggcaagggcaaggcgccgatggactgtgccgagcaggccggcggcggcggcggctgtcacgcggagtcaacgagcactccggcgccgccgaagggcgccgagtactacggatgcagcgtcgccgtcgaggatgatgacgaagaattgctgaagtttctgcaggcgatggtgaggggcgaggaggtggagggtgatggcgaccacgccatggccgacgagcgcggcccgcagcagggctcctccccggtggcggcggcggcggcctccggctccgcgcctgcaggtcatgacggtcgccgtggctcgctgcagggtggccaccatggatcctcctcccccacctcattggcggccgccgccgccaccggcgacgacgtcacatctgccgccagtgcaggtgacgacgtcagtggcagtcagcaggaagaccaccctgcgcgttga

SEQ ID NO: 12586 - DNA, 1032 bp, Oryza sativa
  Clone ID: TFbOSC418457j.C1.o11.fg
atgaagaggggttgtgaagatgaacttggagctggtgatgtgattctacgaggggtggaggaggtagaagaggaagatgatgatgacctggttctccccggattccggttccatcctaccgacgaggagctagtgacgttctaccttcgccggaagatcgccgagaagcggctgagcatcgagatcatcaaggagatggacatctacaagcatgatccctccgacttcctcaagacgagcacggtgggcagcgagaaggaatggtacttcttctgccttcgagggaggaagtacaggaacagcatccgacccaaccgggtcaccggctccggcttctggaaggccaccggaatcgaccgcccaatctgctctgccgccggcggcggcggcggcgactgcatcggcctcaagaagtcgctcgtctactaccgcggcagcgccggcaagggcaccaagaccgactggatgatgcacgagttccgcctccctccgccgcccgccgacgacctcgccgccggccgctcctcccctcctccgagcctccaagaagcggaagtttggaccatctgccgaatcttccagaggaacatcacccacaagaagcagccgcagccgcagctcgccgtcgccgccgccgcggtgccggcgccggtgccggacgcgacgagctcgatcaccggcagcctcgagtccgacagcgccggcgacgacgtcgtcgagtacatgaacaccctccagccgccgccggcgagcaacgtgaacggtggctacagcaaccagcgctacttccaggagcaatggaacagtagcagcaatgataataccacagtgtttcatcagcatgcggcggcggcgccaccgccggagccttcgccggcgacggcgatggccggattcggccatgatcagagcgttctcagctcgccggcgccgagcgatttttactacaaggatggatgcaacgatgacatttacaggatggtgatggagctcgccgatccgagcttgttctatgatcatatatatgcttaa

SEQ ID NO: 12587 - DNA, 588 bp, Oryza sativa
  Clone ID: TFbOSC401435j.C1.o9.fg
atggagggagtagatcgtattggctggaacttgggcttgggcttccttaggaaagaacggccgccggtgcatggggacagcggcggcagcggtggaagcaacagcaacgatgggaagtggaaggggaaggagaaggtggtgccggagtacggcaagaaccggcacggcatgcctgtcggcttctacttcgtccccaaggacctggagctcctcgccatcctcatgtgcaagctcgtccgaggcaaggtccccggcgccctcaacaacgtcttcaagcatatcaggatattgaattccaccccgccctcctccatgacgtatatcgagactatggaggacgggtacatctatttctttagcaagaggcaattcgcaacgaaggctaggaacaagaggcggccgatgagggtggcagacggcgggacgtggaaggcgtccggtgggagcaagaaggtcggtggcatcgatgtcagtcagaagttcaccatggtgttctacgagcgtaggtttgagggcgaccgaaatcccgtcaagaccaactggggcatgcacgagttcaccaagatcattcctggcaccaaaaactag

SEQ ID NO: 12588 - DNA, 1971 bp, Oryza sativa
  Clone ID: TFbOSC900369j.C1.o22.fg
atgagccacccctcgtcgtcgtcctcctccgctcccccggcggcggccgaggccacctccctcgcaccgggattccggttccacccgacggatgaggagctggtgtcctactacctgaagcggaaggtccatgggcggccgctcaaggtggacgccatcgcggaggtggacctgtacaaggtggagccatgggacctccccgcccgctcccgcctccgcagccgcgactcccagtggtacttcttcagccgcctcgaccgcaagcacgccaaccgcgcccgcaccaaccgcgccaccgccggcggctactggaagaccaccggcaaggacagggaggtccgcaacggccccaccaccgtcggcatgaagaagaccctcgtcttccacgccggccgcgcccccaagggcgagcgcaccaactgggtcatgcacgagtaccgcctcgacggccaaaccaccatcccaccacaggattcattcgtcgtgtgccgtatcttccagaaagccggcccaggtccacagaacggggctcagtacggagctccttttgttgaggaggagtgggaggaggatgacgaggatgttggtttgctaccggtggaggagaaggacaactctgatgaccaggaaaaggaaatttctggtgctatggagaagggctatctccagatgagtgacctcgttcagaacttggttgatcaaaatgagaatggtaccattgccttgccagtttctgacaattcaaacaacagcaaccattctgaagacgtggatggaaattcaggggacattttaagtgaccaaaaccttgggtctaactttcttcaccatgttgagcctgtggagcaaaatggcctagtgcttaatgaaaatatgttttctagtgccaatgctggagacctttttaatatatctagccccaatgatggattcctagaactgaaggattttgcagatattgcagatttggagaatcctttagccaatgaatccaccatctggccttctgatggttggccctggaaatcaactgattccatggaggctgtgaatggggctagcaatgaattttctcccttagctggtgaacagatattccagccagaagaattggaacagttgttacagtcactgcaagaagactctcatatgggttcaactatctctgatcccccacattcatctataacaaatttagctaagccagaggaagattgtctaatgttctatgatgcaccctttgattcttcaatgtgtgatgatggttttagacagctcaatggatttcttggctccccatcgaccaatctatctggtattgacatggtggacgatggtatgccgtactatgatgcgatggatgataacttgtttaatgatcttctgagctcagtacagccatcagctggtagcagttcccatgcttttagtgggccagtccttactcaagaggtcaacaattcaacctatacatatagtccaactcaaaaggttttagaacctaattttgtagttggtgccccatcatctgctaggttacctgaagcgggtagtcagttaaattatgttgttttaccagattcccagaccaagagtagtctgatcgggaagcgttttgtaaagatactggattcaatctctgctccccctgcttttgcagcagcagagttcccagctagccttcgcaaatccttggctcctatttctggagctcatcacaacactatccgtgtctctgctgaagtaatcagcataggaagtttaactcctgattctcaagataagtggtcccttgagaaggatgaaggcatggagctgctcttctcggcaggttttgagcctgatacccgtgtacactttggctgcaacacaataaccgcagtactgcgtggtggcttctgcctcttcttcttttcagcaataatgctcttggtgagctacgaggtgggcatgtgcatctatggcaagtag

SEQ ID NO: 12589 - DNA, 495 bp, Oryza sativa
  Clone ID: TFbOSC414158j.C1.o9.fg
atggagtcatgtgtgcctcctgggtttaggttccaccccaccgacgaggagctcgtcggctactacctccggaagaaggtggcctcgcagaagatcgacctcgacgtcatccgcgacgtcgacctctaccgcatcgagccatgggatctccaagagcattgcaggatagggtacgaggagcagagcgagtggtacttcttcagctacaaggacaggaagtacccgacggggacgaggacgaacagggcgacgatgacggggttctggaaggcgacggggagggacaaggcggtgcgtgagaggagcaggctcatcgggatgaggaagacgctcgtcttctacaagggcagggcacccaacggccacaagaccgactggatcgtccacgagtaccgcctcgagtccgacgagaacgccccgcctcaggcaagatctccatttatctctctctcaatcaacaagatcgatctacagtttctagaaaagattaattag

SEQ ID NO: 12590 - DNA, 2661 bp, Oryza sativa
  Clone ID: TFbOSC400167j.C1.o22.fg
atggccaaggacaaggaggtcggcccgcctcctcccccctgcgtcgactccgaccacgaggacctcccgctcgccgagcgacggcggcggctgctccgcccgccggcggagtcaaagcctcccgctccggagaggcgggaggctagcgccgcggcggcggcggcggaggattccggcggagcggcgcagcagggttggccaggtcttcccagaggtgtagagtttaatcctaccgatagcgatctactctggcatctggctgcagaagttggaaatggtcaggctcgtcgtcatccttttatcaacgagtttattaaatctgttgatgaaaccataggatttggttatactcaccctcaagatataccaggtattaggcaggatggatgtgcatcatatttctttcacaaaaacttcaaggagtgcgccaatgagaacagtaaatgtatcagatggcaaaaaagtggaaatcctatatcaataactttggatgggaatcttcaaggttgcaaggaagtatttgtattgtatgcctacgagacagatggtaacaatcctcagatcactgactggagattacatcaatatcatatcgaaagcacagagaaagatgagggagaattggtggtgtcaaagatattctacgagttagaaaaaaatcaatttaaatgggctgagaaatctcacgctcagtcagcacagggtgcttctgcaatcgatgatgattccaaagaggaattacagttggacaatcattcttttaatatgattactgaaaatagttctgttcaaggcaatgaaaacaagcaaaagcagacgcaaacagggacatgtcctaatctggacaaactaagttatttcaatgtggtaagcaacatgcatattgggaaccaaattaatgatcatgatgaaatcgaggagcttgatcatatgtctctgcaagagcgctacagaattcttatggcagaaaatcattcttcctctgctgtagtatcttctgaacaatgtgcaattgatggtttggagaattcatgcaagcctggaactaatgggatgattcctaaaagaattcatgaagggactgccttcagggatggtatgtatagcatgttgcaggaaatttcttctgcaccggccattataggtagtatcgacaatgataacaacaggaggttgctaactgaaggtctttcaaacaaccagcaaagtcatgaggctggatgtgaatcaggtttcttgagtacatcatcttctgctgctccaccacaatgtcaagttgtgtgctctcatgatctattggtaaacggcaagactcttatttatagtcgcgacccttcttcaagttcaacaccaacttttggggataaaaacattcagttggaagggacagatgataggacccttttggttgacataaaattggaacctgcattggaaggggatttcacagagaaaattacatcttctgtacagagaacagatccaaatcatggcactgagggctctaatctagttgggtctataaactctgtttcttcagcgatctccaaaagaatatcagaagcagcaagatctaacccagagaattctcatgttgaaggcctactgccatcatcacgaataaaaagcgaagttaccgggagtgagttacctctagttgtgtgtggtctcacttctatcagtatcgcagagctcactgccaaaaaaaccaatactctaaaccatgacggggtccttgcttactgttctcgaaaaaggaaaaggaggaagactctgagggatccaagtgaaaagacgcttgaagaagattccctcagaaatgatgagggtactgcttacttttctcgtcaaaggcgaaggagaaaaacagcaacggattcaattgaaacggcacttgaagaagatgccccaggactactgcagattcttctggacaaaggaatactggttaaagagattaaactctacggtgttgaagaagaagatgatatggtcccagactgcacagaaagtgactttcaagatcttgaaaatgttattacaaaattgtttccgcaaagaacatccctgttgaaatctgcacttaggcatgagaagggggaaaaggctatatactgcttgacctgtttaatttctctcatcgagcagtcccgctatcttcagtttcgtgattgtcctgttgaatggggatggtgtagagacctgcaatcatttatttttatttttaaaagccataacaggattgttcttgagcgaccggaatatgggtatgcgacatacttctttgagattgtgaaatcactgccaatacaatggcagatccaaaggatggttactgcaatgaagcttagtggttgtggcaggacagctctgattgaaaataggccattattgattggtgaagatttgacggaaggagaggcgcgggttttggaagaatatggttgggtaccaaattctgggcttggcacaatgctcaattaccgtgaccgggtagttcatgacaggtggaacgagagatctggcacagattggaagacaaagataggaaagctcctgatgaatgggtattccgaggggcatttggtcctatctcactttccaactaaagttgggaaaatagaagatgacaccgaaatcaaacaggaggatcctctctga

SEQ ID NO: 12591 - DNA, 1281 bp, Oryza sativa
  Clone ID: TFbOSC417910j.C1.o16.fg
atgaacccgacaatagaaaacggcggcagcggcggcgatggatcggcggcggcggcagcggcggagggaagtgcgatctggaagagtgagctggtgccgcagctacagctacctccgggctaccacttcgtaccaacggacgaggagctcgtggacttctacctccgcggcaagatcgagggacgcgacccgcctcgccacttcatcagtgaggagaatatcatgcgttatgatccccaaaagctgattgagaaatacaagggctatggggaagacaggtggtactttttcatggtgagggagccgtcgaagacgaagaagaaggacgagccgaacaggaaggtggtggtggatggggtggaagagggaagctggagcgcgacggggagcgtggtgcagattcacagcaccaaggagacgaaccggaaggctatcattggcagcaagagggttctcacttataaatctgctcgttccgctgagaacgacatgtggagcatgcatgagtatgtcttggcaggcaaatcccagatgggtcagtatgtattgtgcgcgatacagctgaagcagacctacgagagagaagagaaggcccgggaggagcagaagaatgacaacaaacgcaataaaaaggccgcaaggaggaagaacatgcagcagcagcctactgcttgccaggcacaagacgagcagcaggaaacagcaccaacacctggagaagaaaccattgtggatcctgaccagttcatggatattgcccattccatgcatatgatgtttggaggagtagatcaagatgcaccaccattcatgccaagcttaattgctccttgcaacaacgatgatggcatgctgcaacttcaaccactccaattgcagaacccaaaccctgcaatgctgtacagtaaccagctggaaccatcgtacattggtgatcagtcgatgttcaccccatgctgctgcgatagaaactgtatttcttgtcgtcagctacaattttaccagcaacagcaagcagaggatggcagtgttgcatttgaaaaggctgatctatacaacaacatgatagggctttgggaaatattggtgtataccctgacaatgtttgggtggatggtaacatggcagattatgctcagcgtcagatttacaatgatcaagataatggtggttcttttcagggcaacatactggcttcggtcttgggctcaactactaaagtgtgatgaagaaatcaagtcggtgaaagctgcatgtcgtaatcttgagtcaatggtgtga

SEQ ID NO: 12592 - DNA, 1254 bp, Oryza sativa
  Clone ID: TFbOSC400477j.C1.o49.fg
atggagaaaggcaagctcgatttcctcctcgagctagggtttcgcttcaacccgtcgccggagcaggtcgtcacctactacctgccatgcctcgtcgccggccagcagcccaaggacaccgaggggtgcatccacagcgccgacgtctacggcgccgacgagcccagggacctcgccggcaagtacgcgcccgtggccaggagctccaacggcgaccggttcttcttcaccggttgcaagcggatgaaagggaagttctcccgctccgccgggggtggcacctgggtctctcagtccagcaaggatctcaagaacagggaggggatcaagatcggcgaggtcaagaacttccgcttcaagaaagatggcaagaacacggattggttgatggaggagtatcacctctgcgggcaagaatccggtgatgttgtcgagcccgtcgtctgccggatttacgtctcccctagggctgctcctgattcggtggcgcaccaagaatcagctgtcctgcagcctcaagaacccgcgccgctgccggttcctgcagcaccagcgccgccacgacaagtgcccgtggtcacgcagcaagcgccgccgccgccgccaccacttgttccggtgatcacgcaggacgcgccgcccctgaagaggcccgcgccggtcgccgcgccgccgtgcgccaagaagatgagaggcgatgtctcggcattccctgtggtgcgccagagctgcgtggcggcgccgcgatgtgcgccacgcgtcgtggcaccaccgccgcgtcatccacccatccagacctatccgacggatccgttcgagtcagcgccgctggatccgttcgagccgccgccagcagctgcctcggtgaccggcggacaccacacgcctcagccgtctgtccctgtccctgcgacgccagagcaagggttttcactggcagcttccaatagtccagaactcgatccggctaacatcggcattgacatggacgagcttatgagatatctgggcaatacaccattggacggcgttctcccttcccagctatttgttctgcccaccaacgacgatgaagacgtcgagctcgccaaagtactagaggacgggctacaaggaggaggaggacggcaatggcaatccaccgctgtgtgtgactcctcctcctccgcgaccggcatcttggcccgtcatggcgccaccgccgcctcatccacccatcctgacctgtcccaaggatccgttcgagcccaatga

SEQ ID NO: 12593 - DNA, 1704 bp, Oryza sativa
  Clone ID: TFbOSC401688j.C1.o13.fg
atggatggtgtggtagcagaagatcaagcaggcggcagcggcagcggtcaccgccgcctcatcggatcgaggatcgaggagcaccgcaagtacatgtcggaggagagctgctgcccgaggtgcggccacaagatcgaccggaagctggactgggtggggctaccggccggtgtgaagttcgatccgacggatcaggagctgattgagcatctcgaggcgaaagtccggcccggcggcgaggcggcggcacacccgctcatcgacgagttcatacccaccattgaaggggaggatggaatctgctacacccaccctgagaaattgccaggtgtcagcaaggacggcctgagcaggcacttcttccaccgcccatccaaggcctacaccaccggcacccgcaagcgccgcaagatccagccgccggcggccgccgcctcgtcgggcggcggcggtggcaacgcgtcgtcgtcgtcgtcggcgtcggcggctgcggcggtggcgcgccatggccatcagcagcagcagcagcagcagaggagcgagacgcggtggcacaagaccgggaagacgcgggcggtggtgggcggcgggcgtcagcgcgggtgcaagaagatcctggtgctctacaccaacttcgggaagcaccgcaagccggagaagaccaactgggtgatgcaccagtaccacctcggcgaggccgaggaggagcgcgacggcgagctcgtcgtctccaagatcttctaccagacgcagcccaggcagtgcgccgccgctgacgccgccgccaccgcctccgcctcggctgtagataggaggacaacgtcgttgagggaccgtgcggcggcggctgccgccgcagctgcagcggcggcgccaatggcttccgctaacgtcagcgtggccgcgttccacggcggcgccgccggcattgatgaattcagcttcgcgcagttcaggagtagcttcgaggaggcgggaatgggagcgtcgtcgtcggatcaccaaagtgctatggttgatcagcggcggcggcagcagcagcacgacgacgacgagcacgaccaccggcgcggcggcggcggccaccactacgtcgggcagcagcagagcgtcgcggcgacgttccacgtcgtcagctcgccggcggaccccatagccaggctgatgtcgccgccgccggctcaccagggcaccgtcatgctccggcagccggagccgccgtatatttaccatcaccaggaggatgaacggccacaccaaccgcgaaagtttgatgggaggtcgacctctggttctggactggaggaggtgatcatgggctgcacctcacggaggtccaaaggaggggaaacatcaggtggtaaggatggcacagaatggcagtacccatccttctggccatctgacagccaggatcatcatggagacaaagatgatattgaagcaaagcaaaagggagagacagaaaaagaaaaaggagaggaaaaacaaagtttctcaagatacacatttgccaagaaatattccatgaacaaggaaactctaaagatttctagtattttgcattctggcatcttgtcagaatcgaagttgccggagaatttcccagtgtgtgtagtggagggagaatatgatgagcatggcaatgcatggatgaacctgatactgcccttttcagattcctccaaactgagattaatgtga

SEQ ID NO: 12594 - DNA, 804 bp, Oryza sativa
  Clone ID: TFbOSC900391j.C1.o8.fg
atggcttccacgtcgaggaaacgttcggcgcgtagcctgcaagaagatgagcagacctcatcggcggcagaggcgccggcggcggtgcgagaggacgaggagcgggttgcggtggcgggcatggaggcgtggaggttcgggttctcgagattctcctggtttcccgcgttcaagttcgaccccaccgacgccgacatcgtcgcctcctacctcctcccgcgcgcgctctacggccgcggccacgccgccgttatccaggacgacgtgtcgaggtgcgagccgtggacgctgatgcgggagcacggccacgccaccagcgcgcacgccttcttcgtccacgaccacgagagcgtcggcggcggcggcggcggcggcaggcgcaaggtgcagcgcgcagtcaagaacggcggcggcgtgtggcggatccagaagggcgaggtggcgatcctcaccatcgtccgcggcggcggcggaggcggaggcgagctcgacgtggtgtacaagcggcgcaacctgagcttccaccgccgcggcgagagctcctcctccggatgggtcatgcacgagtacgagatcacctcgccgccgctccccgccaccgtgctctcccggatcagggccacccccagggccaaggacaagaagctgtgcatcaaggaggagccctcctgctccacctccgccgccggcgagcgctctggccctaacccagaccacaccgccgccggcgccggtgacagcgccactgccaaccacaacaatacaacgtcggcggcgacaacaactatggcagcggcggtgtag

SEQ ID NO: 12595 - DNA, 951 bp, Oryza sativa
  Clone ID: TFbOSC416913j.C1.o16.fg
atggcggcggcagtggctgtggctgggccgtccatggaggtggagcaggacctcccgggcttccgtttccaccccacggaggaggagctcctcgacttctacctctcccgcgtcgtcctaggcaagaagctccacttcaacatcatcggcaccctcaacatctaccgccatgatccctgggacctcccaggcatggcgaagatcggggagagggagtggtacttcttcgtgccgcgggacaggaaggccgggaacggcgggcggccgaaccggacgacggagcgcgggttctggaaggcgacggggtcggacagggcgatccggagctccggcgacccgaagcgggtgatcgggctcaagaagacgctcgtcttctaccagggtcgcgccccgcgcggcaccaagacggactgggtcatgaacgagtaccgcctccccgactacggcgccgcccgcgccgccgcgccgcctcccaaggaggacatggtgctctgcaagatataccggaaggcgacgccactgaaggagctggagcagagagcctcggcaatggaagagatgcagagaggatcaagtcacggagactacacggcgacgagagcatccctcgtccacgacgcctccgcctccaccggcgacgactacttctcgtcggacgacgtccacgacagcggcttcctgatccagtcctcatcctcgtcggcggcgccgtccggcagcagcagcaagaacggcggcgctggcgcaccaagggaagccaagaaggaagaagcagacgtcacggtcacggtggcgtcggcgacgagcctacagctcccggcggtgagccagctgccgagcctgcagcttccggcgatggactggctgcaggacccgttcctgacgcagctgcgcagcccgtggcaggaccagcactgcctgtctccctacgcccatctgctctactactaa

SEQ ID NO: 12596 - DNA, 1215 bp, Oryza sativa
  Clone ID: TFbOSC400477j.C1.o36.fg
atggccagcctcgatcttctcctcaagctagggtttcgcttcaacccgtctcaggaggaggtcatcacctactacctgccacggctcatcgccggccacccgcccaaggacaccgaggggtacatccaccgcgctgacgtctacggcgccgacgagcccagggacctcgccggcaagtacgcgcccgtggcgaggagccccaatggcgaccggttcttcttcaccggttgcaagcgggtcaaagggaagttctcccgctccgccgggggtggcacctgggtctcgcagtccagcaaggatctcaagaacagggagggcatcaagatcggcgaggtcaagaacttccgcttcaagaaaggtggcaacaacacggattggttgatggaggagtatcacctctgcgggaaagaagccggtggtgtcgtcgagcccgtcgtctgccggatttacgtctccccgagggcggctcctgattcggtggcgcaccaagaatcagccgccctgccgccgcctcaagaactcgtgccgccgccccaagaactcgcgccgccgccgtatcctgcagcacaggcggcgccgcaagctcctgcgccgccacgacaagtgcccgtgatcacgcagcagcaggcgccgccccagaagaggcccgccgcgccggtcgccgagccgccgtgcgccaccaagaagatgaaaggcgctgtctcggcaaaaccaatggcgccgcagagcagcgtgacggcgtccgcggcgccaccccggtgtgccgtggcgccatcgcagcatcatccaccattccagacctacccgacggacccgttcgagccaccggcgccagctgcctcggtgactcagccgtctgtccctgcgacgccagagcaaggccctgcttatgtacccgatccggctgacatcggcatggaaatggacgagcttatgagcttcctggacagtataccagtcgacggcatcctcccttcccagctatatgaatacgacgagctcgccaaagaactggaggacgcgctacaaggaggaggagaagaggacggcaatgacaatccaccgcgtcgtcgcggaagaggtggatgtgacaagcagtcgcaggggggctaccgtgtgcttctgaaggacatgggcgacgatcaaattgaccaacagtggctgaaggtgtctctgaaagactaccaccatctgatgaagagctgtaaattgtag

SEQ ID NO: 12597 - DNA, 1557 bp, Oryza sativa
  Clone ID: TFbOSC404859j.C1.o32.gm
atggcggcggcgaagatggcggggctgacgccggggttcaagttcgagccgagcgacgagcagctcgtgcagttcttcctcctgccctacctgcgcgagctgccggtgcccctgggcggcctcgtcatccgggacgacccgaggagcgtgccgccatggaagctcttcgcgcgcaacggccggggcgacgaggaggacgcctacttcctcgcgccagccgacggcgagggccggcaggcgcgcacctgcgacggcggccgcggcaggtggatcacccagcggctggagcgcacgggcaacctgcggctcgccggcggcggcggcagcggcgaggccgtcgtgttcgagaagcacaggctcaactaccacgccggcgaggggcggtgcggcagcacggggtgggtgatgcacgagtacgccgtcgtcaagcccgcggcgctcggcgcccgccacagggcgtgccacatcgccttcaccggccacggccagaagcggaagcgcgtgcccgacggctacgtcgacgtcgaggacgacggcagcaaggccagcaccaacgcggccgccgccgtccctccttcctcgacggcggcgatgtcggcgtgcccatcgaatgtcacctataaccaagggtgccatatctcgccggagcagagcatcgaacagcacttccccgcggagcataataatatccaaatccaacagcaagcttactaccaatcacaagaccacgagcagtgccagtacagcgacgaagaaaaatacctgttgcagcagatcaagcaagaacaatactactacaaccagcaaaactgcttcttgccaggccaaggcaaccaagaactgtactacaacgacgagcagcagcaaatattctcgttgccggagcatcagtgcagccaagaacagtactggcatcacgacgaccagcaagactgcgtcttgccggagcaacacagccaagaactacacgggtacaacaacgaagaccaaggatccctcttgccgccggagccgatcgaccaggaggaacaagccctcttcgtcggcggcgagccgcagcatgaacaacaacccttgacgtcaaccccgcggcaggctcttcttgattatgatgatgggaagctcctgccgccggtcggcgtcaacggcgccatcgcgatcccgccgcaggacgccgccgtggcgtccaacgacgacgacggtgggcaggctacggaagcgccggctgcgaagatgacggcggaggagaagaagtggttcatggaagagttattgaccgagggctgttggtctggacctcttctcttcgaccaaccgtactacgccgccgcgccgaccggccgctaccgcgccaccctccgcgtcgcgctggctgcctccgccacccccgcgccgcgccaggccgctgctgcgcgggctgccgctgccgcccccgcgccgcttcgctactgcctcttcgctaccactgccgtctctgcgaggaaagagtggataagagcaagaaaagaggagaggataagagcgaggagggagataaggagaaagactttgcgatag

SEQ ID NO: 12598 - DNA, 1557 bp, Oryza sativa
  Clone ID: TFbOSC418655j.C1.o1.gm
atggcggcggcgaagatggcggggctgacgccggggttcaagttcgagccgagcgacgagcagctcgtgcagttcttcctcctgccctacctgcgcgagctgccggtgcccctgggcggcctcgtcatccgggacgacccgaggagcgtgccgccatggaagctcttcgcgcgcaacggccggggcgacgaggaggacgcctacttcctcgcgccagccgacggcgagggccggcaggcgcgcacctgcgacggcggccgcggcaggtggatcacccagcggctggagcgcacgggcaacctgcggctcgccggcggcggcggcagcggcgaggccgtcgtgttcgagaagcacaggctcaactaccacgccggcgaggggcggtgcggcagcacggggtgggtgatgcacgagtacgccgtcgtcaagcccgcggcgctcggcgcccgccacagggcgtgccacatcgccttcaccggccacggccagaagcggaagcgcgtgcccgacggctacgtcgacgtcgaggacgacggcagcaaggccagcaccaacgcggccgccgccgtccctccttcctcgacggcggcgatgtcggcgtgcccatcgaatgtcacctataaccaagggtgccatatctcgccggagcagagcatcgaacagcacttccccgcggagcataataatatccaaatccaacagcaagcttactaccaatcacaagaccacgagcagtgccagtacagcgacgaagaaaaatacctgttgcagcagatcaagcaagaacaatactactacaaccagcaaaactgcttcttgccaggccaaggcaaccaagaactgtactacaacgacgagcagcagcaaatattctcgttgccggagcatcagtgcagccaagaacagtactgccatcacgacgaccagcaagactgcgtcttgccggagcaacacagccaagaactacacgggtacaacaacgaagaacaaggatacctcttgccgccggagccgatcgaccaggaggaacaagccctcttcgtcggcggcgagccgcagcatgaacaacaacccttgacgtcaaccccgcggcaggctcttcttgattatgatgatgggaagctcctgccgccggtcggcgtcaacggcgccatcgcgatcccgccgcaggacgccgccgtggcgtccaacgacgacgacggtgggcaggctacggaagcgccggctgcgaagatgacggcggaggagaagaagtggttcatggaagagttattgaccgagggctgttggtctggacctcttctcttcgaccaaccgtactacgccgccgcgccgaccggccgctaccgcgccaccctccgcgtcgcgctggctgcctccgccacccccgcgccgcgccaggccgctgctgcgcgggctgccgctgccgcccccgcgccgcttcgctactgcctcttcgctaccactgccgtctctgcgaggaaagagtggataagagcaagaaaagaggagaggataagagcgaggagggagataaggagaaagactttgcgatag

SEQ ID NO: 12599 - DNA, 1053 bp, Oryza sativa
  Clone ID: TFbOSC400138j.C1.o84.fg
atggcggcaccggaaggccagaacaagttcgcgggcgtccgcttcttgcccaaggacctggagctcctcgccatcctcgacgccaagctccgcggaagcccgttaggccccgtggaagccatcttccacgacacgcagatcctcgacttccacccgtacaagctctacgagatgtatgctgaggacgaggaggaggaaggctacatctacttcttcagcacgatgcagttcagatgcaggaagattgtggagcgcgcggcgcagggcggccggtggaaggtgaacaactgcgagactctggaggttggcggcgtcgccgttggccggaagttcaccatgaatttctacgagcatatcggcggcgacaacgacctcatctggaccaactggggcatgcaagagttcgccaggatcatcggcccaaacaaggagctcgcggatcttgccttgtaccgcctatacaagaagaaaataacaagggggacaggcgaggagaagccggaagacatcgccgcggctagcgatggcgataccgagagcagcatgaacaagcgtagacgtgtagaagcgtcggcggcggccatggcgctgccaccgccaccgccatcgccaggcctgcctggaacaatgatgttcatggcggcggaccaggcgaacgtggcctcgacctcgcaggaatggcacggccagttcgccaacggcgctgcggcggcgccgagtcctagcggctgctggccctgggcgccaccgccgacaccgagcgcagtggagcctttcagcttctgggccagcgcgtcggcggcgactcctcctgccgccgcgaactaccacccgtcgccgcagccgcagccgctgccgccgcagggcggcgagtactactccagacacggcgccttctcggtggcgcccgtgcccgcgtccgcctgctcgacgccgtccccggaggcggcgaccagctgcctcttggctacgacgtcacctctgccggcggcaggtactgagggcagtgacagtcagcagcaagaacccccctgcgaattgatggaattttga

SEQ ID NO: 12600 - DNA, 582 bp, Oryza sativa
  Clone ID: TFbOSC400773j.C1.o103.fg
atggcagaacaaccactaggaggaggcggcggcggcggcggcgatggcaacaacaatgggaagtggaaggggaaggagaaggtggtgcccgagtacggcaagaaccggcacggcatgcctgtcggctgctacttcgtccccaaggacctggagctcttcgccatcctcaggtgcaagctcgtccgcagccagctccccggcgccctcaacaacgtcttcgagcatatcaggatcctcgaattccaccctgccctcctccatgagacgtacatcgggaatgaggaggatgggtacatctacttctttagcaggaggcagttcacgacaaaggcaaggaacaagaggcggccgacacgggtggcgaagggcgggacgtggaaggcgtctggtgggagcaagacgttgaggagcaagaaggttggcggtatcgacgtcggccagaagctcaccatggtgttctacgagcgtaggttcgagggtgaccagaaccccatcaagaccaattggggcatgcacgagtttaccaagatcattgatggctcaaaaaaccaagtagtccttgttgatctaattcgaatttaa

SEQ ID NO: 12601 - DNA, 750 bp, Oryza sativa
  Clone ID: TFbOSC403854j.C1.o1.fg
atgggaggagctacaaacttacctccaggtttccacttcttcccctcggatgaagagctcgtcgtccatttcctccgtcgcaaggtctccctcctcccatgccaccctgacatcatcccgacgctgcttccgcatcggtacaatccatgggagctgaatggcaaagcactgcaagctgggaaccagtggtacttcttctgccatctaacacaaagtaggacctcatccaatgggcactggagccccattggagttgatgaaacagtaagaagcggcggccgcaatgttggcttgaagaaaacgctgctattctccattggagagccctctgaaggcatcagaaccaactggatcatgcatgagtaccatctgctagacggggattgcgtcgctggcggtagcagcaacttgactagctcgagctctaacaggaggtctcataggaagagaggccactcaagcatggagtccaacaactgggtgctgtgccgagtgttcgaatcgagctgcggttcacaagtgagcttccacggtgagggcaccgagctttcatgcttagatgaggtgtttttgtcactagatgactacgatgaattgcttgctacatcaaactatcttcgcatctgtatggacattgtgttctatcaccacaaagaaaaaaggaaggtgggtggagcttacgcgatcatatggccatctatgctgtcaatggaaatcatgcatgcttgtgtggaaatcgcgctcagatga

SEQ ID NO: 12602 - DNA, 657 bp, Oryza sativa
  Clone ID: TFbOSC900350j.C1.o4.fg
atggcgccggttggtctccctccaggctttagatttcatccaactgatgaggagcttgtgaactactacctcaagaggaaggtccatggcctcagcatcgacctcgacataatcccagaagtagacctctacaaatgtgagccctgggaattggaagagaaatccttcctgcctagtaaagactccgagtggtacttctttgggccaagggatagaaagtatcccaatggatgccgcacaaaccgtgcaaccagagcaggatactggaaatcgacggggaaagatcggcggatcaactaccagaacaggtcaattggtatgaagaagacactagtctactacaaaggtcgagctcctcaggggattagaaccagttgggtgatgcatgagtaccgcatcgaggaaagcgaatgcgagaacgccatggggattcagttacaggactcctatgcgctatgtcggattttcaagaagaatgtggtgttgggtgaatttgacaagaaaggggagtgcagttcatcacaggctaaaggaaatgaagaagttacagatttcggggatgctggacaatcctcgggagcaaatgagaatgataaagacaattcatggatgcaattcatagcagaggatctatggtgcaccaacaaactaaagtga

SEQ ID NO: 12603 - DNA, 1842 bp, Oryza sativa
  Clone ID: TFbOSC411286j.C1.o19.fg
atggacgcggtccagccaagcaatgccagcataaaccgcgtgcacctggtttatgtgctggtgcgccgcctcgccctcgtcggatccctagtagggaggggaggtctccgtctgccggcgggaggcgcgggcgccgccatgaccggatgcattgtcttgtttatgaggcccggtgttcggaccgcgtcatacattcgtggaacagtgtgctcatgccttcggacatcctggataattgacagccatagaattgcttcaaaaataaaaaatgcatctggatcggtggatgccagtaagcacaaatgggttagcaacccaactaaggcttgtccaaggtgcaaccacatcattgataacagtgatgttgttcatcaatggcctggtttgccaagaggtgtaaagtttgatccaactgaccaagaattgctttggcatttgcttgcaaagcatggcaaagttggtgcaaaagctcatccgttcattgatgaatttattccaacagtcgaggaagatgatggtatctgctatacccatccacagaaacttccaggtgtcaagcaagatggaagcgtatcacactttttccatagaacatttaaggcctataatactggaataagaaagcgccggaagataaacactggtgatcttgctgatgtccgctggcacaagactggtaagacaaggccagtagtagttgatggaaaacaccttggttgtaagaaattcatggtgctatatatgagcaccatgaaaggtggtaaacctgaaaagaccaattgggtgatgcatcagtaccacctaggaactggggaagatgaggtagaagggcagtatgttgtctctaaattattgtttcagcaacagtttaaacctggggagaagaacgcacaggacttaacctctgcagatgctttagaatctatagttgctgaagatcttccaaatattcctccacttcccctggaagaacatgtttttaccaaccaagaactagaagttcttgagaaatctgaaactatcactgaccagggaaaagagactagcgaaataaacaacgaagataacgctgtagaagatgttgcgcatatggctactgagaaacctgaggatggagataacccctcatcgcaagatccgaaatggtgggaaggtgaatcccagttcctgttagactctcagcaactggcagagaaccttgcgatttgcgatgagttccttcagagtcagagccagacctcatgcggcggtggagatgatgaaaccgataagataaagccccgtcttgctgtttatgcccagttgccagtagaggacttgaagaaggatctggaagaatgccagaggttggacccctcagatggcacaaatcttgagcttgaaaatgcgtctgaatttcgactgagccaaattgagttttcgcaggatagctttacgacggcatgggctggtggcaaggccctgttcccggtaagaaatctaccccgcgcattggctgagcgtcactgggttggtcccacagcccggccacgtgagactgagggcagcaacaagtaccgcgccgtgggtcggtcccatagcaccgggtctacaggccccatcgtttggccaagtaagtgtggtgtgtggataaaggtgggcccaagcccatggcgacgggcccaccacccagcggaggctgagagggacaccgtgggtctcggaaaaaaccgtaacggcgtctctctccgttacaacggagaatccttcgcaaacacgataaacacccctgggaatatttttcctttggcaaatcttatctgcaaggaattgagtgcaaggaaagccttagaaatgacatag

SEQ ID NO: 12604 - DNA, 1587 bp, Oryza sativa
  Clone ID: TFbOSC8412j.C1.o1.fg
atgcggagctcgcaccagcctctctgcacgagggcccaccaagcggccgccctcctcctcgtcgccgccaccttcttcctcacccgcctgctcgaccggtccccactctccgctccgccgcccccctgcgccgcaccatacagtccctggccgcaccgcgacctccgcatctacgtctacgccgaggacgaggtcgacggcctgcgcgcgctgctccgcggccgcaacgacgacgtcaccgctgcaacctgcatcaagggccagtggggaactcaggtgaagatccaccagctcctcctcagctcgagatttcgaacatttgacaaggacgaagcggatctcttcttcgttcccacctatgtcaaatgcgttcggatgacgggaaaacttaacgacaaggagatcaaccagacatacgtcaaggtggttctcagtcagatgccttatttccgcagatccggaggacgcgaccacatttttgtcttcccaagtggtgctggagctcacctgtttcgctcatgggcaaccttcctgaataggtctatcatccttactcctgagggtgaccgcactgataaacgaggtataagcgcttttaacacatggaaagatattattatacctgggaatgtggatgattctatggtgaagtctgacaggcttgctgtcaaaccgatcccattaacaaaaaggaagtatttagcaaacttccttgggcgtgctcagggaaaagtaggccgtctccaactggtgaagcttgcaaagcagtatcctgacaagctggagtctccggagctgaagctctctggaccagacaaattgggaaggatagattacttcaagcacttgaggaatgcaaaattttgcctagctcctcgtggcgagtcttcatggacacttcgcttctatgaatccttctttgtggaatgcgtgccggtaattttatcagatgaagttgagcttcctttccagaatgtgattgactacactgaagtatcgataaaatggcctgcgtccaagattggcccggggctccttgaatatctcgagtcaataccagatggaagagttgaggaaatgattggtcgcgggcgggagataagatgcctatgggtgtatgcggcggatacagagcggtgctcggctatgagcgctatcatgtgggaactgcagaggaagttcttaggccaagatgttgagttgactgtctattacctgaagagaaaattattgggcaaacacttacggtgcaatgctgtttcagagcttgatctatacaaatttgccccttgggatcttccagagaaatcttcgttgcagagtaaggatcgagaatggtatttcttttgcccacgtgataggaaatattctagtgggtcaagaacgaaccgatcaactgaagctgggtattggaaagctactggaaaagacagaccagtaatatataattctcagactgttgggatgaagcgaactttggtgtttcatcttggcaagccacctcggggtgatagaactgattgggtaatgtatgaatacaggctggaggacaaggaactgtctgcttctggtgttaaactggtatga

SEQ ID NO: 12605 - DNA, 711 bp, Oryza sativa
  Clone ID: TFbOSC414184j.C1.o4.fg
atggagagggcggctgcggcggcgccggtggtggtgaggcatggaggagtggtgttgccgccggggttcaggttccacccgacggacgaggagctcgtggtgcagtacctccgccgcaaggcgttcggcctgccgctccccgccgccgtcatccccgacctccacaacctcttcaagctcgatccctgggacattcctggtgcgagcagcgacggggacaagtacttcttcgccgtgcggccacctgcggcgagggggaggaggcagcatgtgacggcgagcggtgggtgctggaagccggcgggcgggcgggacaagccggtggtggtggcccggtgcggcgggagccacctcgtcggcgtcaagaagggcatggtgttcgtcccacggcaagggaggaaggcaccggcggcggcggcggcggccgccggcggtggctgctgggtcatgcacgagtacagcctcgccctgccgatgcacaagaagggttgcttggctgaggctgaagaatgggtagtgtgccggatatttcagaggagcagcagcggcagccggtcgccgaggaggcctgacaacgacgtgaggcgaacgatgccggccgtcgccgagctcggccggtcgccgtcgccatcgtcgtcgtcgtcgcaatccagctgcgtcacaagcagctccgaccaggaagagtgtaatgtaacgggaaggaagcactga

SEQ ID NO: 12606 - DNA, 1914 bp, Oryza sativa
  Clone ID: TFbOSC900216j.C1.o14.fg
atggcggcggcggcggatgggcttccgccgggcgtcaggttcgaccccgccgacgacgagctcgtctcccgctacctgctccggcgcctccggaagcagcccatcccgctccacggcgtcatccacgaggcggatcccctcggcgcgccgccatggatgctcctcgccgatcacggccggggcggcgacgaggccttcttcttcgccgaggcgcgcgccaagaacgtcaaggggaagcggcagaagcgtaccgtcgagggtggggggttctggcaggggcagcgggtttgcgtcgacggtgagaggctgagcgtcccaggcggcgacggcggcggcgaagtcggcggcgggttggagatcgagtggcggaagtacatgctgagcttcttcgccgagggggagaggggcagctcggggtgggtgatgcacgagtacgccatcacggcgcccgatgatctcgcctcgtggccgatccggctttaccgcgtccgtttcagcggccacggcaagaagcgcaagcgggagccggaacgcctgggcgcccgcgtccatgacgacgacgtcgacggtggacaacgcgccgcgccccggcgcgccgtgacagagaccgccctgttcgtgcagccgagcgccgtggattgcgccgaatccgctggtcagagcttctccggcgcgatcgagcctgtgttccacgatctccccgacatgatgccggagcaagctgatgccggagacactacagagactaccgcagcggtggtgaacctcacggacgccatgtccgagcagcccgttcttccgctagcagcagatggcgacgatcagagctcctacggtgtcatcgatccggcgttccgcgatcttgctgacctgatcgtcttgccacctgagccagatgacggtggcatggaacgcgccacgccctgcactcccatgtcagagaccgccctgttcgagcagcaagggcctcctggcaatgctgattgcgccgatcatcagagctcctacggtgtcatcgatccggcgttctgtgagcaagccgacgccggagaggcagagaccaccgtatccgcagcagtggtgaaccagaactactccatggcgttgtgtgatttcaattttccggaggtactcagctacgtcgacttcaccgccggcatggagccctcctggcaacagcgctggcctcccatgtcagagagcgccccgttcgagcagcaggagcctccgctcgcgcccgtggcaatggtggatctccctcctggcaatgccgattgcgccgatcatcagagctgctctggcgtgatcgacccggcgttccgtgatctccccgacatgaccgtcctgccaccagagcaagctgacaccggaggcggagcagagactaccacagcaatggtgagcctcacggacaagctgaaatactcctcctccatggacggcgaggcagcgcaggcgtggtgtgatttcgattttccagagagcactgatgaggcgctcagctacatcgacttcactgccggcgcccacactgacaacgacggtggcgtgtcagagaccgccatgttcgagcagctggggtctccgccacagcacgatcctctgccgatggatgctgatggcgccgatcagagctcctccggcccgttgatcgacacggtgttccgtgatcacgccgaaccgatcgtcctgccactagagcaagctgacaccggaggtggtgcagcagcggcggtgaacctcatggacaagcagaagtattcctcctccatggacggcgaggcggtgccggcgtggtgtgattcggatttcccggagagcattgacgaggtgctcagctacatcgacgtcagcaccgatgacacgagctgcatcgacttctccatggacgacctcttcgatcttgcagactag

SEQ ID NO: 12607 - DNA, 1818 bp, Oryza sativa
  Clone ID: TFbOSC416548j.C1.o4.fg
atggcggcgggtggtggtggcgctgatgggctccctccgggcctcaggttcgatccgaccgacggcgagctcgtctcccgattcctgctccggcgcctccagggtaagcccctcccgctcaatggcgtcatcctcgaggccgaccccctcagcgtgccgccatggaagctgctggcggagcacggccggggcgacgagggcttcttcttcgccgaggctcgggccaagaacggcaaggggagccgccagaagcgcaccgtcgagggtagtgggctctggcaggggcaaagggtctgcgccgacggcgagaagctgctcgtccccgatggcggcggcgtggaggtggagatcgtgtggcgcaagtacttgctgagcttcttcgccgagggcgagagggggagctccggctgggtgatgcatgagtacgccgtcacgtcccccgccgagctcgccgcgtcgccgatccggctctaccgcgtccggttcagcggccacggcaagaagcgcaagagagagccacaatccggcgaggacggtgtcggtcgagcacgcgcggcgccacagagcgctggaacagagactgctctgctcgaggagcgcgtcatgccgccacagccggcgccccagagcgtcggaacagaggatgccctggtcgaggagcgcatcccgccgccacagcccgttcccatccctcctatcgccggaacagaggatgccctggacgtcggcactgaggacgttcgaggacgagccgcgccacagagcgctggaacagagtctgctctactcgaggagtgcgtcctgccgccacagaccgcgccccagatcaccggaacaggggttgctctgctcgacgaggtcgttccaccgccacagaccgtgtcgatttcccctcccgcagcgctggtggacgctgtcgatgatgctgactgtgccaatcagggatgctccggcgtgatggacgattccacaatggtgttcagtcatcttccggacatgatcaccctgcccgcagaagaaggtgatgccgccggtggtgcagcgctggcgtcgatggactactcctgggctgattttgagttcccagagatcaacatggatgagttgcctaactgcatcgacttcaccacaactgaccccagctgcttggacattgagctctccatgggcgacctccatgagccccagagcactggaatagagtctgatctgctcgaggagttcgttccgcagccacagccagtgcttgttcctcctctggctgctctggttgaagttgccgatagctctgaaggccctgatcagggatgctccgttgtgatgcatgattcttctgcggtgtttactcatctgtcagacccgatcgtcctgccagaagaagaagaagctgatcgtcctgatgcgccggctgggactatgtcactagactatcagaactactccttgtctgatttcgagttcccagagtaccctctgctcgatgttgccggtgatgctgacggcgcagatcagtgctcttccaacgtgatggatgattcttccatggtgtttagtcaccttgaagacctgattaccctaccagcagaggaagcagaagccgatgcttgtagtgcagcgcctgcgccgtcgctggacaaccaaaaatactcctcacagggcatcatcgacagtgaggcgccggcattgtctgatttcgagttcccagagaccattgatgaggttctaaacagcatcaacttcacaatggccgacccgagctgcttggatatggagttctccatggacgacctcttagactttgatccgccggctgattag

SEQ ID NO: 12608 - DNA, 1155 bp, Oryza sativa
  Clone ID: TFbOSC400651j.C1.o2.fg
atgcctgcccttccaccaggcttccgcttccaccccaccgacgaggagctcatcgttcactacctcatgaaccaggccgcctccgtcaagtgccccgtgccaatcatcgccgaggtcaacatctacaagtgcaacccatgggaccttcctggtaaggctttgttcggcgagaacgaatggtacttcttcagcccgagggaccgcaagtaccccaacggcgctcgccccaaccgcgccgccggctcggggtactggaaggccaccggcaccgacaagtccatcctctccactccgaccagcgacaacatcggcgtcaagaaggccctcgtcttctacaagggcaagcctcccaagggcgtcaagaccgactggatcatgcacgagtaccgtctcaccggcacatcagctaacagcaccaccaccacaaagcagcgtagagcgtcatccatgaccatgaggctggacgactgggtgctgtgcagaatccacaagaagagcaacgacttcaattcctctgaccaacacgaccaagaacccgaggaatcaaccgtcgaacagcttgaagacatccatgacaacaactcctctgaacaacctccagctccagctgacatgaacaaccaacagtcagatttccagcccatgacggcgatgagcatgagcaagtcatgctccctcaccgatctcctcaacaccatcgactgcgccgcgctctcgcagtttctcctcgacggctcatccgacgccatcgctgagcctcctgctcctcccagccccctaatatacacaacacctcatccaaattaccaaacactaaactataacattaacagcaacagcagcatgccacacgccttcgagtcacgcctagatcatcacgatggttacgttaacaattataatgttaatggcctgaggaggaagagaatgatggcgtgtagtgcaacttcctttgatgatggcagcagcagcaatgactttgtgcatgccgttgtcaagaaaccgcagctgctgccaagtgattcgaggggtagtggttttggaggaggttactgcaaccagcagctttcagagactgcgactggctttcagtttcagaacggcaatctgctgagccatccatttcctctgaacaatcatctgcagatgcagtag

SEQ ID NO: 12609 - DNA, 1512 bp, Oryza sativa
  Clone ID: TFbOSC401083j.C1.o2.fg
atggcggcggcggcgaggtcgcagggtctctcgccggggttcaagttcaatccgagcgaccagatgctcgtggagctcttcctcctgccgtacctgatcgacggcgagctccccgtccgcggcctcgtcttcgtggaggacgaccacctggggggcctgccgctgccgccgtggatcctcctcgaccgccacggccgcggcgacgaggacgaggcctacttcgtcgccccgatgggtgccggcgatggggcccggcaggtgcgctccgtcgccggcggcggcaagtgggtgaagcagaggtcggaggggaaaggtgaggtggtggtggcccccggcggcgaggcgttcctgtgggagaatttcagcctcaacttccaccgcgacgatcgccggagcggcagcaccgggtgggtgatgcacgagtacatcgtctccccacccgccggctccgccgtcgccgcctcccaccgggccacccacatcgccttcaccggccacggccagaaccgcaagcgcgtccccgacggctacgtcctcgtcctcgacgacgccgtcccccccgccgccgccgctgcagcacctcctccggaatccgagcagagcaatcaagaggagcaagaatacgctgcttacaccgaccaaatccagcagcagtgcttcgtcccggagcagcagatgagcaaccaggaatacttcccggaggcggcggcggagcagagcaaccaacagttcttcgtgccggcggaggagcagagcagccatcagttattcttgccggcagaggagcagagcaaccaacagttcttcatgccggcggaggagcagagcagccatcagttcttgccggcggaggagcagagcagccatcagttcttgccggcggaggagcagagcaactaccaacagttcttgccggcgttggagcagatgacgcagagcaaccaagaatttgcttacggcgagcaaagccagtgctacattgtgccggagcagcagcagctgagcaaccaagaatacgcttacagcgaacaaagccagtgctacatcttgccggagcagcagcagctgagcgaccaagaatacgcttacagcgagcaaagccagtgctacatcttgccggagcagcaggagctgagcaaccaagaagcagaatatgctttcgtctgctacgacgagcagcagcagcagcagcaacagagcaatcaagaagcagaatacgctttcgcctgctacgacgagcagcagcagcagcagcagcagcaatacttacatggagatctcacatcgtggcaagaaccctttgtgacgtcgtcgtcctcgtcatcacagcagtttcttggtcaggaacagctgctgcctgatggcctcctcctcgacggctttggcgagatctcacagcagcagggcgaccaagaatacgcgtactgcgaggaaagccagtgctacatcatgcctgaacagcagcagcagagcaaccaagaagcagaattcgctttcgcctgctacgactag

SEQ ID NO: 12610 - DNA, 915 bp, Oryza sativa
  Clone ID: TFbOSC414142j.C1.o2.fg
atgagcgggatgaattcgctgagcatggtggaggcgaggctgccgccggggttcaggttccacccgcgagacgacgagctcgtgctggactacctggaaaggaagctcctcgacggcggcgtgggcggcgccgcggcggcggcggcggcggtcaccatctacggctgcccggtgatggtcgacgtcgatctcaacaagtgcgagccatgggaccttcctgagatcgcttgcgttggtggcaaggagtggtacttctatagccttagggataggaagtatgcaactggccaacgaacaaatagagcaaccgaatcgggctactggaaggccacaggaaaagatcgcccaataagccggaaaggattgctcgtcggtatgcgaaaaaccctggtgttctacaaaggtagagcccctaaggggaagaagaccgagtgggtcatgcatgaattccgcaaagaaggacaaggggatccgatgaagttgcctctcaaggaggactgggtcttgtgtagagtcttctacaagagtaggacaaccattgccaagctgccaacggagggtagctacaacaatattgacagtgtggccacaacttcactgcctcccctcactgacaactacattgcatttgatcagcctggttcaatgcaaaacctagagggttatgagcaagtgccctgcttctccaataatccctctcaacagccatcgtcgtcgatgaatgttccgttgacatcggccatggttgatcaagagcaaaacaatatgggtagggcgatcaaggatgtgctgagccaattcaccaagtttgaaggcaatgtgaagagggaggcccttcaaagtaatttttcccaggatggatttgattacttggctgagagtggcttcacacaaatgtggaactcactcagttga

SEQ ID NO: 12611 - DNA, 2331 bp, Oryza sativa
  Clone ID: TFbOSC900216j.C1.o13.fg
atggcggcggccgcggatgggcttccgccgggcgtcaggttcgaccccgccgacgacgagctcgtctcccgctacctgctccggcgcctccggaagcagcccatcccgctccacggcgtcatccacgaggcggatcccctcggcgcgccgccatggatgctcctcgccgctcacggccggggcggcgacgaggccttcttcttcgccgaggcgcgcgccaagaacgtcagggggaagcggcagaagcgtaccgtcgagggtggggggttctggcaggggcagcgggtgtgcatcgacggcgagaggctgcgcgtccccggcgacggcggcggcggcgaagtcggcggggaattggagatcgagtggcggaagtacatgctgagcttcttcgccgagggggagaggggcagctcggggtgggtgatgcacgagtacgccatcacggcgcccgctgacctcgcctcgtcgccgatccggctttaccgcgtccggttcagcggccacggcaagaagcgcaagcgggagccggaacgcctgggcgcccgcgtccacgacgacgacgtcgacggtggagaacgcgccgcgccccggcgcgccgtggcagagaccgccctgttcgtgcagcagtcgagcgccgtggattgcgccgaatccgccgatcagagcttctccggcgtgatcgagcctgtgttccacgatctccccgacatgatgccagagcaagctgatgccggagacactgcagagactacagcagcggtggtgaacctcacggacgccatgaccgagcagcccgttcttccgctagcagcagatggcgacgatcagagctcctacggtgtcatcgatccggcgttccgcgatcttgctgacctgatggtcctgccacctgtgctcgcgcagcaggagcctccgctcgcgcccgtggcaatggtggatctccctcctggcaatgctgattgcgccgatcatcagagctgctctggcgtgatcgacccggcgttccgtgatctccccgacatgaccgtgctgccaccagagcaagctgacaccggaggcggagcagagactaccacagcaatggtgagcctcacggacaagctgaaatactcctcctccatggacggcgaggcagcgccggcgtggtgtgatttcgattttccagagagcactgatgaggtgctcagctacatgaacttcaccgccggtgcccacgacaacaatgacggcagtgtgggacgcgccgcgccatggcgtcccgtgtcagagatcgccatgttcgagcagccgagcgccgtggatctccctcctggcgatgctgattgcactgaatccgccgatcagagcttctccggcgtgatcgagccggtgttccatgatctccccgacatgatccgtgagcaagctgatgccggagacaccgcagagactactgcagcggtggtgaaccagaactactccatggcgttgtgtgatttcgacagcggcattgacttcaccgccggcgcccacgacagcggcatggaacgcgccacgccctggactcccatgtcagaggccgccctgttcgagcagcaagggcctccgctcgctcccgcggcagtggtggatctccctcctggcaatgctgattgtgccgatcatcagagctcctacggtgacatgatcgtcctgccatcagagcaagctggcgccggaggcggagcagagactaccgaggccctgttcgaccagcccgttccgccgcttgcagcagattgcgccaatcagggctcctacggcgtgatcgacccggtgttccgcgatctcgccgacttgatcgttctgccaccagagcaggccgacgccatggacggcgaggcggcgccggcgtggtgtgatttcgattttccggagaacattgatgaggcgctcagctacgtcgacttcaccgccggcgcccacgctgacaacgacggtggcgtgtcagagaccgccatgttcgagcagccggggtctccgccacagcacgatcctctgctgatggatgctgatggcgccgatcagagctcctcctccggcgcgctgatcgacacggtgttcggtgatcacgccgaaccgatcgtcctgccactggagcaagctgacaccggaggtggtgcagcagcggcggtgaaactcatggacaagcagaagtactcctcctcctccatggatggcgaggaggcgccggcgtggtgtgattcggatttcccggagagcattgacgaggtgctcagctatgtcgacttcagcaccgatggcgcgagctgcgacttctccatggacgagctcttcgatcttgcagattag

SEQ ID NO: 12612 - DNA, 4806 bp, Oryza sativa
  Clone ID: TFbOSC101853j.C1.o5.fg
atgcggagacggaggtggaggcggcggctggctcccgtgttccgcttctacccgacggaggaggagctgatatgcttatacctccgcaacaagctcgacggtttccgcgacgacatcgagcgcgtcatccccgtcttcgacatctactccgtcgacccgttgcagctctcaggtaccagcacacgcgtgtacctacttttgcccgcggcgaggagggggagcggatggttctacttctgcccgcggcaggagcgggaggtgcggggcgggcgaccgagccagaccacgccgtcggggtactggaaggcggcgggcacgacgggggtcgtctactccgcggagccgtggccgcgcgccgttgggaacaaagaccgcgtggaagatgatgagagagagagagaggggggaagatggaagatgaggtcttacaggtgggtattccctattgcaaaaaggcagattacagttttggcagagaagtgtctgcccagggacacagatgaagatctaggtggggggcatgtcgatgacatgaccaaactgacttatcttaatgaaccaggtgttctatacaatttgaagagaagatatgcattgaatgagatatatacatacactggaagcatcttgattgctgttaatccattcacgaggcttcctcacctgtacaatgagtacatgatggagcaatacaagggtgtccgactaggggagttgagtccacatgtttttgcagtagctgatgcatcatacagggctatggtgaatgattcccggagccagtcaatcctggttagtggtgaaagtggcgctggcaagactgagacaacaaagtttatcatgcaatatcttacgtatgttggtggtagagctgctattgacgatcgaactgttgaacagcaggttcttgaatctaaccctcttctggaggcatttggcaatgcaaaaacagttagaaatgacaactcaagccggtttggcaaatttgtggagatgcaatttgatgcaaatggtagaatatctggggctgctattaggacctatcttttggaaaggtcccgtgttgtgcagattaatgatcctgaaagaaattttcattgcttttatcagttatgtgcgtctggaaaggatgcagaactgtacaagcttggtcacccagggagtttccattacttgaataaaagtaagacatatgaattggaaggaacaaataatgaagacgagtactggaagacaaaaagggcaatggatattgtcggaattagcagaaatgatcaggatgctatatttcggatactggcagccattcttcatcttggcaacattgagttttctcctggaaaggaaattgattcttcaaaaattaaggatccaacatcaaattttcaccttcaaatggcagccaaactattcatgtgtgatccagatctgttggtctcaactctatgtacacgcgccattaacactctcgaaggagcaattataaaagcattagactgttctgcagcagcagctaatcgtgatgctctagcaaagactgtatatgcaagactatttgactggcttgttgagaatattaacaaatctattggtcaagatgttgattccaaagtacaaattggtatcttggatatttatggttttgagagcttcaaaaataacagttttgagcaattctgcatcaacttcgccaatgaaaagcttcagcaacatttcaatgagaaaccgattggaattattgcactgctggatgaagcttgcatgttcccaaaatctactcatgagacctttgcaacaaagatgttcaggaatttctcttcgcatcataggcttgagaagacaaaattctcggagacagattttactatctcccattatgctgggaaggtgacgtatcaaacagaatcatttttggagaagaatagagattatattgttgcagagcactgcaatcttttatcttcgtcaagatgccctttagtttctggactttttggtacattaccagaagaatctttgagatcgtcgtacaagttctcatcagttgcttcaagatttaagcaacaacttcaagccctcatggaaaccctcaactcgacagagcctcactacgtacgctgcgtgaagcctaactctgttaatcagcctcagatttttgaaaatcagagtgtcctgcatcaactacgctgcggaggtgttttagaggctgttcgcatcagtcttgctggctatcctaccagaaggacttatgctgaatttgttgaccggtttggtgttctggttcccgagttgatgcttggaagttatgatgagagggcattgacaaagggaattcttgaaaagatgaagcttgataattttcaacttggtagcactaaggttttccttagagctggtcaaatcgcaattttagatatgcgtcgtgctgaagttttggagaacgctgcacgccacattcaaggtcgtttcagaacattcattacacgcaaagagtttgtgaaaacaagggaggcttcaatttctatacaagcatattgcagaggctgtttggcaaggaagaagtatatggttaaaagagaaacagcggctgctataattgttcaaaaatatgtcaggagatggcggcttcatcggacttaccagcaatctcattcagcagctcttcttattcaatcctgtattcgaggatttatcgctcgccattatttctcagttatcaaagagcagaaagctgctttggtgatacagtccttgtggagaaaacggaaggttatcattcttttccaacaatacaggcaagccactgtggcaattcagtgtgcttggagacagaaagttgcaagaagagaactaaggagactcaaaatggctgcaaatgaagcaggtgcactgcgtgaggcgaagaataaacttgagaaaaagttggatgatcttactctgagactaactctggaaaggagactgcgggctgctggtgaggaagcgaagtcagtagaaatattaaagcgcgacaaactgatagaatcattaagtgccaaatgtgctgctgccaagtcggctgctcaaagcgaacacgacaaaaatctgctactccagaggcagttggatgattcattgagagagataactatgttgcggagtagcaagattatgacagcagaagcagaaagggagaactccaatctgaagaacttagttgaatcattgtcaaagaataattcatcacttgaatatgaactcacctcagctcgtaaaggtagtgatgctacgatgaagaaattgaaagacgtagagggaaaatgcaaccatctccagcaaaatttggacaaattgcaggaaaaacttacaaacatggaaaatgaaaatcatgttcttaggcaaaaggcattaaacatgtctccgttgaacaatatgcccatgactacaaaggcttttcctcagaaattcgctacaccgattgggcttccaaatggcgagcagaagcacggatatgaaacaccaccaccagcaaaatatctcgcttcacttccacagagtttaactagatcaaggagaaccaggatgcctgttgaaaggcaggaggaaaatcatgaaatcttattacgatgcataaaggaaaatctaggattcaaggatggtaaaccagtcaccgcatgcattatctacagttgccttttacactggcgtgcttttgaatctgagaggactgctatttttgatcatgtcattgaagccataaataatgttctcaagggggaagaggctgacggtagattaccttattggttgtccaatacctcttcattgctatgccttctgcagaagaatttacggtcaaatggattatttgctacaccatcccgcaggtctggtggaactctagggattggtgacaagatagtgcaaacactcagatctccttcaaagcttatgggacgcagtgataatcttggacaagtggatgctcggtatccagccatattattcaaacagcaactaactgcgtgtgttgaaaagatttttgggcaacttagggataatctgaaaaaggaaatatcaccacttcttagtgtctgcattcaggctccaaaatcatcacgtgcacagcctggaaaagcaaccaaatcacctgggattggtgctcaaccaccatcaaactcccattgggacaatattgtcaaatttcttgacctgcttatggacactttacatgaaaattatgtgccatcattctttatacgtaaacttatcactcagctattctcttttatcaatatacagctttttaacagccttcttcttcggcgtgaatgctgtactttctccaatggggaatatgtcaaagccggtctgtcattgctggagaaatggattactgatgccacggatgagtttgcaggaacatctatgcatgagctaaattatatcagacaagctgtcggatttttggtcatacatcaaaaaaggaagaagaagcttgaggagattaggaacgaactttgcccgaacttgagtgtacgccaaatatacaggatatgctcaatgtactgggacgacaaatacaatacccaaggaatatcaaatgaggttgtttctgcaatgagggaggaagtaaacaaagatactcagaatctcgtatcaaattcctttttattagatgacgacttatgtataccgttttctacagaggatttgtcaattgccatccctgcaatagattatgtagatatagaacttccagaatctcttcatcactatgcatcagtacagctcctactcaagcatcatgatccacagcctgtctaa

SEQ ID NO: 12613 - DNA, 981 bp, Oryza sativa
  Clone ID: TFbOSC401648j.C1.o39.fg
atggaggcgaacctgccgccggggttccggttccaccccagggacgaggagctcgtcgtggactacctctaccacaagctctccggcggcggcgagttctacggcggcgtggccatggtcgacgtcgacctcaacaagtgcgagccgtgggagcttccagcatatttcttgcacaatctgatcatcttccctgcacgcgcacgcgcacgcgccgccggtcgccggcgacgagaagacgccgcgcgggtgggcgccacggagtggtacttcttcagcctgcacgaccgcaagtacgccacggggcagcgcaccaaccgcgccacccgctccggctactggaaggccaccggcaaggaccgcgccatcgtcacccgccgccgcgccgccgccggagaggccgtcgccggcggcgaggtggtcgggatgaggaagacgctggtgttctaccaagggagagccccccggggcagcaagacggagtgggtcatgcacgagttccgcgtggacggacatgccgttgccgaccacccctcctcgtccacctcctcctcctcatctaatcttctcaaggaggactgggtgctgtgcagggtgttctacaagagcagaacggctacaccaagggcagtagtctccggtgaggctgccgtgtcactgtccggtgagctcagcttgccgccgccgctgccgccgcccgttgcccccgccgtcgtcgacggctacaccggcggcggctattacgagcaagacagctcagctgggtaccaccaccaccaccaccaccggccgccgccgtcggcagcattgccgttcaaggacctgacggacttcagggacctgctgagcaacatggcacaaggcggcggcggcggcgctgccgccgccaagacggaggggttccatcttggctggagcgaggaggagtcctccggctacgtgcagcagagcgccatggcgtcgcaggcgtggaacccgttctag

SEQ ID NO: 12614 - DNA, 1266 bp, Oryza sativa
  Clone ID: TFbOSC400138j.C1.o82.fg
atggcggcaccgggagatggggaagagaagaaggccgggagcgggaggaacaagcacgggttcccgcgcggcttccgcttcgtgccccgggaccaggagctcctcgacatcctcgacgacaagctccgcggcgccccgctcgaccgcgcgctcgacgccgtcttccacgacacgcggatcctcgacttccaccccgccaagctctacgggatgtacgcggaggacgaggagaacggctacatctacttcttcagcacgatagagttcaaggcagccaagcccaagcagaagaagtggccgcggcgcgcggcgcagggcggacggtggaaggccgtcctcggctccagccagatggtggaggttggcggcgtccccgtcggccggaagctctccatggagttctacgtcaagggggtcaggaccaactggggcatgcacgagttcgtcaggatcatcggccccaacatcgaggttgcggatcttgccgtgtaccgcctacacaagctatggacgaacggcgaggagaagccgggagacctcgccgcggacgttgccaagagcacgaaccagagtggacaagcgtcggcggcggactactaccagacttaccagaacgcggtctctcaggcgtatgcgtatgcgccgccgtacgtcctccagccaggatggagccaagggtacccctacgatgtcgcggcggcgccaccgaccgcgccctggcctgtctgttgggcgccgccgtccgcgccgggatcctatgactgctgctacgcgtccacgttttcaaggccgccgccgccaccaccaattgctgcgagcacgctggacaaggcgccgataaccagtaccgaccacggcgcatcaacgaacacttcggcggcgacacccgtggcgaacaacaagccgccgccgccaccagttgctgcgacagcgaccacgctgggcaagaagggggagggcaagggcaaggcgccgacgaccaccagtaccgatcacgccggatcaacgaacacctcggcgccacccgccgcgaactaccagccgccgccgacgacgactacgccgccgctgcagggcacgcagcacgtcttcgcacccggcgtcgtcgtcgggcatgaggacgaggagggctacctcatcgtcgacgaggtcaacacgtggcgcaacacgcagcagctcgtgctcgaggatgacgacgacgacgacgacggccgtgccgccggcgccggtgcaggtgagggtggcgcttcagcctcagggcggtga

SEQ ID NO: 12615 - DNA, 783 bp, Oryza sativa
  Clone ID: TFbOSC400221j.C1.o12.fg
atggagacgacggcggcgaagaagctgccgccggggttcaggttcaggcccaccgacgaggagcttgtggtgcactacctccgccgccgcgcgctcggctcccctctcccgcccgccgtcgacatccccgatgtccgcctcctcgcgcatgacccctccgacctgcttcctccagggtggagtgagcaggagaggtacttcttcacgtgcaaggaggccaagtatgtcaaggggcgccgcgccaaccgcgccacgggcgccgggtactggaaggcgacggggaaggagaagccggtggcggtgtccgtggcggcggcgccgaggagccaggccgccgccgtcgtcgtcggcatgaagcgctccctcgtgttctaccgcgggaagccgccgaccggcaagaagacggactgggtcatgcacgagtaccgcctcgccggcgccggcctcgccccgtgccgccgcgccgccaccgccgaccacccggcgcgccccgccgagggctgggtgctctgccgcgtgttccggaagaaaggctccgcggccgcgtcgacagccagccccaccgccgacgccgacgacgacgacgccaccacggagcgcgccgacgacgccgcggcgggcgtccggttcatcgacttcttcgcccgcgccgacgcgcggcggcgccgcgcggcgtcgccggtgtcgtcgagctgcgtgacggatgcgtcggcggagcattgcagggagcaggagacgacgagccggaacggcggcgccgccgccggcgacgcctccgactaa

SEQ ID NO: 12616 - DNA, 1014 bp, Oryza sativa
  Clone ID: TFbOSC404770j.C1.o8.fg
atgggagagcagcagcagcaggtggagcggcagcctgacctgcctccgggctttaggtttcacccaacggacgaggagatcatcaccttttaccttgcacccaaggttgtggacagcaggggcttttgcgtggctgccattggagaggtggatctcaacaagtgcgagccatgggacttgccagggaaggcgaagatgaacggggagaaggagtggtatttctactgccagaaggatcggaagtatccgacggggatgaggacgaacagggcgacggaggcgggatactggaaggcgacggggaaggacaaggagatcttccgcaaccaccacatgctcatcggcatgaagaagacgctcgtcttctacaagggcagggctcccaagggcgacaagaccaactgggtcatgcacgagtacaggctcgccgacgcctctccgccacagccgccgccgccgccatcctccgcagagcccccgaggcaggacgactgggccgtgtgcaggatcttccacaagagctccggcatcaagaagccggtgcaggtgcccatgcagatgccgatgcagatgcagatgccggttgctcatcaggtgcccgccgccaactaccagcagcagatggccatggcctccgccagcatcatccaagtccccatgcagatgcagatgccctccatgtctgaccagctgcagatgttggacgacttctccaccggttcactcatggcgccgcctccgcctccgccttcctactccactctacctggcttcccgcttcagatcaacggcggcgccccagcagtttgttgggaacccgtcgatgtactaccagcagcagcagcagcagcagcagcagcagatggacatggccgccggaggcttcgtggtgagcgagccgtcgtcgctggtggtgtcgccgcaggatgctgccgaccagaacaacgccgccgacatctcgtcggtggcatgcaacatggacgctaccatctggaacaatatgtatgtgtgtga

SEQ ID NO: 12617 - DNA, 996 bp, Oryza sativa
  Clone ID: TFbOSC400095j.C1.o9.fg
atggggttgagggacatcgagctgacgctgcctccggggttccggttctacccgagcgacgaggagcttgtctgccactaccttcataacaaggtggtgaaccagcatcgcttcgccggagttggaggagccgccgccgccggcggcggcaccatggtcgaggtggacctccacacccacgagccgtgggagctaccagatgtggcgaagctgagcacgaacgagtggtacttcttcagcttccgcgaccgcaagtacgcgacggggctccgcacgaaccgcgccaccaagtccggctactggaaggccaccggcaaggaccgcgtcatccacaaccccaagctgcacgccgccgcccaccgccgcgcctccatcgtcggcatgcgcaagacccttgtcttctaccgcggccgcgcccccaacggcgtcaaaaccaactgggtcatgcacgaatttcgcatggaaaaccctcacacccctcccaaggaggattgggtgttgtgcagagtgttctacaagaagaaggcggagacggagacggagtcgtcgtacagcatggagaacgagcaggaggcggtgatcgccatggcacggagcgccgcggccatcaaggcgggtggatgctactccaactcctcctcgtctcacgacccagccgccgccggccatcactcgcccccgccattcccggcgtcgctcgccgcctgcagcagcagccaccactacagcagccacccaccgccgcctcccgatcaccaccaccaccaccacatgcccgtcaccggcggcggcggcggctccctcaacgagttcatccccaccaccagcatggcgctgtacagcagcatcttcgacttcagccagcatctcgacggcggcgccgtggcggcgtcggcgtcggcggcgggatcgagggtcgacggcggcgagcagtgcggtctgatggagctagggctcgaggagcactacaattacaacggcctgatgccgatgtga

SEQ ID NO: 12618 - DNA, 1080 bp, Oryza sativa
  Clone ID: TFbOSC400651j.C1.o8.fg
atggtggagactagtacatcccttgtgaaattagagcaagatggcagcttgttcttgcctccaggcttcagattccatcccacagatgcggaggtaatcttgagctacctcctgcagaaattcctcaaccctagcttcacctccttgccaatcggcgaggtcgacctcaacaagtgcgagccatgggatctcccaagcaaggcgaagatgggggagaaagaatggtacttcttcagccacaaggacatgaaatacccgacggggatgcgaaccaaccgagccaccaaggagggatactggaaggccaccggcaaggacagggagatcttcaacctgcagcctaccagctatggaggcagcagcaacaacaagaataataagcagctggttgggatgaagaagacgcttgtgttctacatggggagagctcccaagggcaccaagaccaactgggtgatgcacgagttccgtctccacgccaacctccacaacgacaacccgaaccttcgtctcaacctcaaggatgagtgggttgtgtgcaaggtattccacaagaagggagacgatcgcgaagccatcaacaagcagcaggcacaggctgcagctgttgatcagtactctgccggaacacccaacaacggcagctccgtcgaagccggcgacgacgacgacgacttgttccagctcgactccatcatcgaccccagcatctacttcagcaactcatcagctgccaacatcttgtcggcgccgcccaacatgtccaattccgtcgtcgctgccaactacggtgcaagtacgacgacgactggtactgctagtgctggtagcttccagcagcagccaaactactgcagcttgatcaacaaaagcatcagcagcagcaatgtctcctcttggaataatatgcctccacctcctcctgtagctgaaggaggagtccatggaattggaagcagctacagcttgcagcaccaggcagcaatggtgaaagccctacgagatgtcattcgtctcccaaatcctcttggcatgccgcagtacaagttagatgatgcttatctatgggactcatcgtaa

SEQ ID NO: 12619 - DNA, 657 bp, Oryza sativa
  Clone ID: TFbOSC29117j.C1.o1.fg
atggaaaaggttcaagcttcttgtgagggtgatcagggaatctgcaaaagaggagccaaaggtggccatccgatcgaccaaaatcttgtgggagggatgactatgtcgaccggtgtccctactactgtgcctcctaccccagcattagctgccttgaaaaacctacttataagggtggtggcagcagcagctgggaaaggcctcagcagcagcgcagaagaagcaaggtgtctttgggcaaagctgccggcgccggaggaggaggaggaggccggccagcagccggagaggccgccgtcgtcatatcggcggccaccgacatcgacgttgatggcgccggtggggctccctccggggttccggttccacccgacggacgaggagttggtgaactactacctcaagaggaagatccacggtctcaagatcgagctcgacatcatccctgaagtcgacctctacaagtgcgagccatgggagctcgctgagaaatcgttcttgccgagtagggatccggagtggtatttcttcgggcctcgggatcggaagtatccgaacgggttcaggacgaacagggcgacgagggcggggtactggaagtcgacggggaaagacggcgggtggtgcaccagcacggggggcgcgccatcgggatga

SEQ ID NO: 12620 - DNA, 1089 bp, Oryza sativa
  Clone ID: TFbOSC400510j.C1.o28.fg
atggtgaccagcaaggagtttgcaagggatcaggcggccatggatcagaagatcaagagcgacgtcggcgaggtggtgctcgccggagacgaggaagaagacggggacgtggtgctcccggggttcaggttccacccgaccgacgaggagctcgtcacgttctacctccggcggaaggtggcgaggaagtctctcagtatagagatcatcaaggagatggacatctacaagcacgatccatgggatctccccaatgcgagcacggtaggtggagagaaggagtggtacttcttctgcctgagagggaggaagtacaggaacagcatcaggcccaacagggtgacgggatccgggttctggaaggcgacggggatcgaccggccgatctactccgccgccgtcaacagcaactccggcgagtcgatcgggctgaagaagtcgctcgtctactaccgcggcagcgccggcaagggcaccaagaccgactggatgatgcacgagttccgcctcccgccggcgatcgccgccgccgacgcctccccgtgcatgcaagaagctgaggtctggaccatctgcagaatcttcaagagaagcatcacctacaggaagcagcagcagcagcaggcctggaggccgccggcgacggtgaccgtcaaggccccaccgccgggggactcgagctccaacaccggcagcttcgagtcggacggcggcggcgacgagttcatgaactgcggcctgactccggccatctcccagcagcagcagcacggcggccgtcatcagatgatgagcacgatgagctgcaacggcggctacttcttcaacgacggcatccatcacagccacagccaccacaagcttcatagtcaatggggctccctacaaatggcgccgccggagccgaagccggagccggagcagaagcctctgagctcgccggcgatgacgatcgccttccatcaaaacgaccatggcttccccgccgccgccgcggatttctacaaggatgggtacttggaagagattgcgaggatgatggaggtggctgatccaagtccaacaggattctatgactgtagatattga

SEQ ID NO: 12621 - DNA, 744 bp, Oryza sativa
  Clone ID: TFbOSC900128j.C1.o13.fg
atggcgacgccggggcagcagctgccgccggggttcaggttccacccgacggacgaggagctggtggtgcagtacctccggcggagggcgctgtgccggccgctccccgccgccgtcatcccggacgtccacgacgccaccgtgctcgacccctgggacctccccggcgccggcgatggtgaggcctacttcttcagcttccggcagctcgcggcggcgagcggcggcggcgggtggcggaggaggagggcggggagtgggtactggaaggcgacgggggcggagaagccggtgttcctgcgtggcttcgggtgcggcggcggcggcggcggcggcggccagcacctcgtcggcgtcaagacgacgctgctcttcctccgcgcgaagccgccgtcgcgcacccactgggtcatgcacgagtaccgcctcgccgccgccggcgctgtcgccgtcgccgccgccggacagacaaagcgcgggaaccatagttgcatggctcagccaggagaatgggtggtgtgccggatttttctgaagaacaacaggtcatcaagaaggcgagccggcgacgccgacggcgaaacgccggtcaccggtgtccacggtcaccgtcggcggcagccgtcgccgtcgccgtcgtcgtcgagctgtgtcacggctgaggtttcagacggagaaggagaagaagaagtcagcagtggcagcatcaatggtgctccatctgcctctcaaagagaggcctag

SEQ ID NO: 12622 - DNA, 1101 bp, Oryza sativa
  Clone ID: TFbOSC900350j.C1.o5.fg
atggaaaaggttcaagcttcttgtgagggtgatcagggaatctgcaaaagaggagccaaaggtggccatccgatcgaccaaaatcttgtgggagggatgactatgtcgaccggtgtccctactactgtgcctcctaccccagcattagctgccttgaaaaacctacttataagggtggtggcagcagcagctgggaaaggcctcagcagcagcgcagaagaagcaaggtgtctttgggcaaagctgccggcgccggaggaggaggaggaggccggccagcagccggagaggccgccgtcgtcatatcggcggccaccgacatcgacgttgatggcgccggtggggctccctccggggttccggttccacccgacggacgaggagttggtgaactactacctcaagaggaagatccacggtctcaagatcgagctcgacatcatccctgaagtcgacctctacaagtgcgagccatgggagctcgctgagaaatcgttcttgccgagtagggatccggagtggtatttcttcgggcctcgggatcggaagtatccgaacgggttcaggacgaacagggcgacgagggcggggtactggaagtcgacggggaaagaccggcgggtggtgcaccagcacggggggcgcgccatcgggatgaagaagacgctggtctactaccgcggccgcgcgccgcagggcgtccgcaccgactgggtcatgcacgagtaccgcctcgacgacaaggactgcgaggacaccatgcccatcaaggacacttacgcgttatgccgggtcttcaagaagaacgcgatctgcaccgaggtggaggagctgcaggggcagtgcagcatggcgctgctggagggcgcctgccagcagctgctcgccagcggcggcggcggcagccaggagcagtacgagacgccgtcgccgccggacgtccccgtcggatcaaccttcggtggggccgacgccgacgccgaggacgaccccgacaaggacgactcctggatgcagttcatctccgacgacgcctggtgctccagcaccgccgacggcggcgccgaggagagcacctcctgcgtggccctcgccggctga

SEQ ID NO: 12623 - DNA, 602 bp, Oryza sativa
  Clone ID: TFbOSC418825j.C1.o1.np
gacccatttgcgacgccggggttccgcttctacccgacggaggaggagcttctcggcttctacctccgccaccgcctcgccggcacgaggcccgacgtcgagcgcgtcatccccgtcgtcgacgtctacggctaccacccgtcccagctcgccgccctggccggggaggcgagcgcgcgcgacacggagcagtggttcttcttctgcccgcgcgccgagcgggagctccacggcggccggccggcgcgcaccacgccgtcggggtactggaaggccacgggatccccgtcctgcgtcatctcctccgccacaaacagggtcatcggcgtcaagcgcaccatggtgttctaccagggccgcgcccccaccggcaccaagacccgctggaagatgaacgagtacaaggccgtcgccgacgacgccgacgccgccgccgccgccatgctccaccagctgaggaacgagctgggagtgtgccgggtgtacatcagcacgggcacgctgagatcgttcgaccgccggccgctcgataatcaacgctgggacacgaacaaggccaagaaccagatcatcagcagcggccgcctcacgccggcgtcgtc

SEQ ID NO: 12624 - DNA, 1632 bp, Oryza sativa
  Clone ID: TFbOSC1203j.C1.o2.fg
atggcaacattgccacaaatggccgcgaccaaggagcgtcaagaggcggctaacccgaccacgacgaccaggacgctggtcgagtccgtcaccaactggatccgcgtctactccgacggctccgtcgaccgcctcggcccgccggaagccgccgcgttcatggtcctcgtcccgccgtacgacgacccacgggacggggtcaccgtccacgacgtcgccacggaccatggcgtcgacgtccgcctgtacctgacgacgacgacgccggccgggcgccgccctgttctcgtccatttccacggcggcggcttctgcttgtcccacgccgcgtggtcgctctaccaccgcttctacgcccgcctcgccgtggagctcgacgtcgcgggcatcgtctccgtcgtcctcccgctcgcgccggagcaccgcctccccgccgccatcgacgccggacacgccgcgctgctctggctccgtgacgtcgcgtgcggcaccagcgacaccatcgcgcaccatgcggtcgaacgccttcgcgacgccgccgacttctcccgcgtgttcctcatcggcgacagcgcgggcggcgtcctcgtgcacaacgtggcggcacgcgccggcgaggctggggccgaggctctcgacccgatacgcctcgccggcggtgtcctcctccacccgggcttcatcttgccggagaagagcccgtcggagctggagaaccctcccacgccgttcatgacgcaggagacggtggacaagttcgtcatgctcgcgttgccggtgggaaccaccagcagggaccacccgtacacgtctccggcggcggcggtgacggcggcggagggagcccagctgccgccgatgctggtgatggtcgcggaggaggacatgctccgcgacgcgcaggtggagtacggcgaggccatggcgcgcgcgggcaaggcagtggaaacggtgttaaacaagtttcccgcgcaatgcatacgtgttttcgtttctccgatccgcttacgaaatttcgatttgatggagaaacacgtcgagaagatgctcagtttaggctttcgtttcaacccgtctgcagaggatctcatcaccttctacctgccacggctgatcgccggcaagccaatgaaagacaccgagaaattcatctgccgcgctgatgtttacggcagcgagcccagtgacctcgccggaaagttcgcgccggtgcccaggtgcgagaaaggcggcaggttcttcttcactagctgcaagcggcacaaggggagtagcaccaagaaagagcgaacggcgggggctggcacctgggtgaggcagaacagcaaggaggtgaagaacaaggcgggggtcaaggtcggcgagacgcagaacttccgtttcaagaaggacgggagctacaccgactggctgatggaggagcaccactgctgccggcagcaagccgtcgccggcgacgaggagcccgtcatctgccggatgtacgtgtccccgcgggcgcctccggattccgcggcgcgccaggaatccgctgctttcgtgcagcagcagccggcgccgcaggtttccgagccgccgtgcgacaagaagaagagagatgatgtggcagaagaagcccctgccgcggcttag

SEQ ID NO: 12625 - DNA, 450 bp, Oryza sativa
  Clone ID: TFbOSC11898j.C1.o1.fg
atgcatccgagcggcggcgcgctgtcggtgccaccggggtttcggttccacccgacggacgaggagctcctctactactacctgaggaagaaggtggcctacgaggccatagatctcgacgtcataagggagatcgacctcaacaagctcgagccctgggatctcaaagatcggtgcaggatagggacggggcctcagaacgagtggtacttcttcagccacaaggacaagaagtacccgacggggacgaggacgaaccgggcgacgacggcggggttctggaaggcgacggggagggacaaggccatcttcctcgccaacgcctgccgcatcggcatgaggaagaccctcgtcttctacgtcggcagggcgccccacggcaagaagaccgactggatcatgcacgagtaccgcctcgaccaagacaacgtcgatgtccagttatgctag

SEQ ID NO: 12626 - DNA, 1131 bp, Oryza sativa
  Clone ID: TFbOSC406028j.C1.o19.fg
atgcatccgagcggcggcgcgctgtcggtgccaccggggtttcggttccacccgacggacgaggagctcctctactactacctgaggaagaaggtggcctacgaggccatagatctcgacgtcataagggagatcgacctcaacaagctcgagccctgggatctcaaagatcggtgcaggatagggacggggcctcagaacgagtggtacttcttcagccacaaggacaagaagtacccgacggggacgaggacgaaccgggcgacgacggcggggttctggaaggcgacggggagggacaaggccatcttcctcgccaacgcctgccgcatcggcatgaggaagaccctcgtcttctacgtcggcagggcgccccacggcaagaagaccgactggatcatgcacgagtaccgcctcgaccaagacaacgtcgatgtccaggaagatggttgggtggtgtgtagggtattcatgaagaagagctaccagcgaggcctcaacccggcggacatggcggcggtcgacgacgacgacctcctccaccaccaccaccaccccttcccaccggcccagctccacggcggcgccgccgaccacaagcacgacggcgccggcggccaccaccaccaccacctcatgcagccgcaccaccactacgacgacttcccttccttcgacccctccatgcagctcccccagctcatgagcgccgaccagccgccgccgccaccgccgtccctcctccccggcgtcccaccctccgccgccgctgccttgagctccctcgacgtcgagtgcccccagaacctcatgaagctaacgtcggccgccgccggaggcggtgccaccgggctgctccacgccggcggcgaccaccgcttcgccaccgccgccacggactggtccatcctggacaagctcctcgcctcgcaccagaacctggaccagctcttccagggcagggtcatcgccggagcgtcgtcgccggctgccatggctgctcctagccaccaccagcatctcatggatcagctcgccggcggcggcggcggcaccgcctcgtcgttgcagaggcttccactgcagtatctggggtgcgaggcagccgacctgctcaggttctccaagtag

SEQ ID NO: 12627 - DNA, 1191 bp, Oryza sativa
  Clone ID: TFbOSC1060j.C1.o1.fg
atggtggagtctactacatcccttgtgaaattagagcaagatggaggcttgttcttgcctccaggcttcaggtttcacccgacggacgctgaggtaatcttaagctacctcctgcagaagttgctcaaccctagcttcacctccttgcccatcggcgaggtcgacctcaacaagtgcgagccatgggatcttccaagcaaggcgaagatgggggaaaaagaatggtacttcttcagccacaaggacatgaaatacccaactggcatgcgaaccaaccgggccaccaaggagggctactggaaggccaccggcaaggacagggagatcttcaggcagcctgcagctgttaatacaagcagctatggaggcagcagcaacaagaagaagcagctggttgggatgaagaagacgctggtgttctacatggggagggctcccaagggcaccaagaccaactgggtgatgcacgagttccgtctccacgccaacctccacaaccaccacccaaaccttcgtctgaatcccaaggacgaatgggttgtgtgcaaggtcttccacaagaagcagggagacgaagccatcaacaaccagcagcagcaaccacagtatgcagccgtggatcagtactctgccgaaacccccaacagcggcagctccgtcgttcaagccggcgacatcgacggcggcgatgacttctttcagctagacgacatcattgaccccagcatctacttcgtcagcaactcttccaacatcttgtcggcgccgcccaacaacaacaacgcggtttattccgtttctgcaagtacgacgacgactaatactactgccgttagcttccagcagcagccaaactactacagcttgatcaacaaaagcagcagcagcagcagcagcaactatagtgctcctctgcagcagcacgtctcttcttggaatattacgcctggagctggaggagcccatggaattggaagcagctactacaacttgcagcagcagcaggcagcaatggtgaaagccctagaaaatgtcattgctgtcccgaattttggtactctactgccgagcagcaacaagctgaagggtttatcgaagtcggcgatggctgggcttacgcagcagaatccccttggcgtgccgcagtacaagatagagaattatggggatcattacatatcacgacagtaa

SEQ ID NO: 12628 - DNA, 1059 bp, Oryza sativa
  Clone ID: TFbOSC33262j.C1.o4.fg
atggctatgggaatggaaggatcgggaggaggagggtcggcgaaaaagaaagaggagagcttgccgccggggttcaggttccacccgacggacgaggagctcatcacctactacctgcggcagaagatcgccgacggcggcttcacggcgagggccatcgccgaggtcgatctcaacaagtgcgagccatgggatctcccagagaaggcaaaaatgggagagaaggaatggtacttctttagcctaagggatcgaaagtacccaactggcgtgcgcacaaaccgagcaactaatgctggttattggaaaacaacgggaaaggataaggaaatcttcactggacaaccaccagcaacaccggagttagttggaatgaagaaaaccctagtgttctacaaaggaagggctccaagaggtgagaaaaccaattgggtcatgcatgagtaccgactccactccaaatcaatccccaaatcaaacaaggatgagtgggtcgtctgtcgcatatttgccaagactgccggcgtcaagaaatacccctccaacaatgctcattcccgatcccaccacccatacacactagacatggtcccacctctcctcccagctctattgcaacaagacccatttggtcgtggacaccacccttacatgaaccccgttgacatggcggaactctcccggtttgctagaggtacgccggggttgcacccacacatccaaccacaccccggttacatcaacccggctgcgccttttacactatcaggccttaacctcaaccttggatcctcgccagccatgcctccaccaccaccaccgccaccacaatccatcctccaagcgatgtcgatgccgatgaaccaaccaagaagtactacaaaccaggttatggtaacagagcaaatgattccaggactagccaatggtgtcatcccacagggaacagatggaggttttaccacggatgttgttgttggaggcactggcatcagataccagaatttggatgtagagcagctggtggagaggtactggcctggtagttaccaaatgtag

SEQ ID NO: 12629 - DNA, 1161 bp, Oryza sativa
  Clone ID: TFbOSC1062j.C1.o1.fg
atgcctgcccttccaccaggcttccgcttccaccccaccgacgaggagctcatcgttcactacctcatgaaccaggccgcctccatcaagtgccccgtgccaatcatcgccgaggtcaacatctacaagtgcaacccatgggaccttcctggtaaggcgctgttcggcgagaacgaatggtacttcttcagcccgagggaccgcaagtaccccaacggcgcacgccccaaccgcgccgccggctcggggtactggaaggccaccggcaccgacaagtccatcttgtcaactccgacgagcgacaacatcggcgtcaagaaggccctagtcttctacaagggcaagccccccaagggcgtcaagaccgactggatcatgcacgagtatcgcctcacaggcacatcagctaacaacaccaccaccacaaagcagcgtagagcatcatccatgaccatgaggctggacgactgggtgctgtgcagaatccacaagaagagcaacgacttcaattcctctgaccaacacgaccaagaacccgagggatcaaccgtcgatgaacagcttgaagacatccatgacaacaactcttcctctcaacaacctcctgctccacctgacatgaacaaccaacagtcagatttccagcccatgacggcgatgagcatgagcaagtcatgctccctcaccgatctcctcaacaacctcgactgcgccgcgctctcgcagtttctcctcgacggctcatccgacgccatcgctgagcttcctgctcctcccagccctctaatatatccaaaccaaacactaaactataacatcaacaacaacatgccacacgccttcgagtcacgcctagatcatcacgatggttacgttaacaattataatgttaatggcctaaggaggaagagaatgatggcgtgtagtgcaacttcttttgatgatggcagcagcagcagcagcagtgactttttgcatgttgccaagaaaccgctgctgctgccaagtgattcaaggggcagtggttttggaggaggttactgcaaccagcagctttcagagactgcgactggttttcagtttcagaacggcaatatgttgagccatccatttcctctgaaccagcagctactgctgaacaatcatctgcagatgcagtag

SEQ ID NO: 12630 - DNA, 981 bp, Oryza sativa
  Clone ID: TFbOSC422386j.C1.o8.fg
atgactctgcccccgggtttccggttccacccgaccgacgatgaattggtcggctactacctcaagaggaaagtcgacagcctcaagatcgagcttgaggtcatccctgtcattgatctctacaagttcgagccatgggagctaccagagaagtcgttcttgccgaagcgtgacctggagtggttcttcttctgcccacgagaccggaagtatccgaacgggtcgcggacgaacagggcgacgagcaccgggtactggaaggccaccggcaaggatcgcaagatcgcctgcgccggcgaggtcttcggcctccgcaagacgctcgtcttctacaagggtcgcgctcccggcggcgagcgcaccgactgggtcatgcacgagtaccgcctctgccaggacctcgcccatggcgtctccaacttcatcggggcgtacgcgctgtgccgcgtgatcaagaggcacgaggcgggcctccatggcgagccgccggcggcgaaggcgaaaggaatgatcagcaaggtgtcgagcagctcgtcccttgtcaccgtcgaacaccagctcagcagccggggcaacgcctcgccgtcgttcacgcccaccaacaatggcagcccgctcgtcgacgagatgttcgtcggcggcggcggcggcgacccgttccagctgcttccgagctgcgtcccgtaccatggcggcgacgcgtgcgggttcgacttgccgccgctgtgcatgcctcagactcaggacccgttcttctccgacgccggcttcacgcaggcagcgcctcctctctacggcgacgtcatgggaagcgtgtcggagcacgagctcaagtgggacaccctgggcggctactccggcggcggcggtggggagctctggaacgcggcggcggcgccgctgctgtgcaggcaggccagcgacggcgacgacctcacggcgtggttcacggccgccgacgacaacatgtccgtcttctga

SEQ ID NO: 12631 - DNA, 318 bp, Oryza sativa
  Clone ID: TFbOSC21481j.C1.o1.fg
atggcgtgtgcagagacgtatatcgagaacatggaggacagatgcatctacttctttagcaggaggctattcgcagcgaaggctaggaacaagaggcagccgatgagggtggcaaacggtgggacgtggaaggcatctggtgggagcaagacggtgaggagcaagaaggttggcggcatcgatgttggtcagaagctcccatggtgttctacgagcgtaggttcgagggcgaccaaaaccctgtcaagaccaactgggccatgcacgagtacaccaagatcattcctagctccaaaaaccagtgtatttacaatgtaa

SEQ ID NO: 12632 - DNA, 1026 bp, Oryza sativa
  Clone ID: TFbOSC401316j.C1.o17.fg
atggagcagcatcagggccaggcaggcatggacttgccccctggcttccgcttccacccgaccgacgaggagctgatcacgcactacctcgccaagaaggtcgccgacgcccgcttcgccgccctcgccgtcgccgaggccgacctcaacaagtgcgagccctgggacctgccatctctggcgaagatgggggagaaggagtggtacttcttctgcctcaaggacaggaagtacccgacggggctgaggacgaacagggcgacggagtccgggtactggaaggccacggggaaggacaaggacatcttcagacggaaggccctcgtcggcatgaagaagacgctcgttttctacacggggcgcgctcccaagggggagaagtctggctgggtcatgcacgagtaccgcctccacggcaagctccacgccgccgccctcggcttcctccacggcaagcccgcgtcgtccaaggtacacgaacgcacggtgttcaagaagagcctcgtggaggtgggcgcggcgggagggaagaaggcggccgtggtgacgatggagatggcgaggggagggtcgacgtcgtcgtccgtggcggacgagatcgccatgtcgtccgtcgtcctccctccgctgatggacatgtccggagccggcgccggcgccgtcgacccggcgacgacggcgcacgtgacctgcttctccaacgcgctggagggccagttctttaacccgacggcagtacacgggcacggcggcggcgactcctcgccgttcatggcgagcttcacgcagtacgggcagctgcaccacggcgtgagcctggtgcaactcctggagagctgcaacggctacggcggcctcgtcgacatggcagcgtccggcagccagctgcagccggcggcgtgcggcggcgagcgggagaggcttagcgcgtcgcaggacaccggcctcacctccgacgtgaacccggagatctcgtcatcctccggccaaaaattcgaccacgaggccgcgctatggggctactaa

SEQ ID NO: 12633 - DNA, 603 bp, Oryza sativa
  Clone ID: TFbOSC101556j.C1.o16.gm
atgagccaatcgccgccggactcctcctccgcggcggcggtgcccctggcgccggggtttcgcttccaccccaccgacgaggagctcgtctcctactacctccgccgccgcatcctcggccgccgcctccggatcgacgccatcgccgaggtcgacctctaccgcctcgagccgtgggacctcccctccctctcccgcatccggagccgcgacgcgcagtggtacttcttcgcccgcctcgaccgcaaggtcaccggcgccggggccggcggccgcggcggccccgggaacaggaccaaccgcgccacgccgcgcggctactggaagaccaccgggaaggaccgcgatgtccaccaccgcggcaagctcgtcgggatgaagaagacgctcgtcttccactccggtagggcgcccaagggccagaggaccaactgggtcatgcacgagtaccgcctcctcgacgccgacggcacccagcaacaagccaagtctgaagaagaagaactagtcatcgcttgccaggtccacctcaaacgccgcgtctcactggcaagtgggccccaggacatcaccggccccacagacagtgacactgatgtttaa

SEQ ID NO: 12634 - DNA, 603 bp, Oryza sativa
  Clone ID: TFbOSC101918j.C1.o4.fg
atgagccaatcgccgccggactcctcctccgcggcggcggtgcccctggcgccggggtttcgcttccaccccaccgacgaggagctcgtctcttactacctccgccgccgcatcctcggccgccgcctccggatcgacgccatcgccgaggtcgacctctaccgcctcgagccgtgggacctcccctccctctcccgcatccggagccgcgacgcgcagtggtacttcttcgcccgcctcgaccgcaaggtcaccggcgccggggccggcggccgcggcggccccgggaacaggaccaaccgcgccacgccgcgcggctactggaagaccaccgggaaggaccgcgatgtccaccaccgcggcaagctcgtcgggatgaagaagacgctcgtcttccactccggtagggcgcccaagggccagaggaccaactgggtcatgcacgagtaccgcctcctcgacgccgacggcacccaggtacctgtgaaatcatttgatccatctcaaatttcgcaggatctaccgtaccacgagatcacgagattagcggtagcaccaaaaaaattctgttcttttagcttgtctcctgctaggcttgtgtga

SEQ ID NO: 12635 - DNA, 1899 bp, Oryza sativa
  Clone ID: TFbOSC402917j.C1.o4.fg
atgagccaatcgccgccggactcctcctccgcggcggcggtgcccctggcgccggggtttcgcttccaccccaccgacgaggagctcgtctcctactacctccgccgccgcatcctcggccgccgcctccggatcgacgccatcgccgaggtcgacctctaccgcctcgagccgtgggacctcccctccctctcccgcatccggagccgcgacgcgcagtggtacttcttcgcccgcctcgaccgcaaggtcaccggcgccggggccggcggccgcggcggccccgggaacaggaccaaccgcgccacgccgcgcggctactggaagaccaccgggaaggaccgcgatgtccaccaccgcggcaagctcgtcgggatgaagaagacgctcgtcttccactccggtagggcgcccaagggccagaggaccaactgggtcatgcacgagtaccgcctcctcgacgccgacggcacccaggatctgcatgtggtgtgtagaatcttccagaaaaatggatctgggccacaaaatggtgcacagtacggtgcgccatacttggaggaagattgggaagaggaggatgatgcaattgagaacatgcctgccagtggcgctttcgctgaaatggctgcagtcacagatactgcagatgagtcgactgaggaagatgggaatttctcccttaaaactaatgatgagcctttacaaacccaagaataccagccagagataactcctgtgaaagctcaaggttcaaatgaggagaccaatggcggtggttacagttgtgatgttttttctctggatgagattttgcaggaacctgaaaatgtctgcaaaaatgaagagcagaatgccattgatgacaagttcactatcgcagagttatctggatacccaaggcaagatgatggctatgtaggcgagaatggtcctgtgaattggattgacccttcaaatggtgataatacaaactggcctttgagagcatatagtactcagaaccatgtcaatggaacacttagcgctgatggtttctttgacacggtgaatggtaccaactcatattcaggtccttcagataaccagaacctgtatttgcaagatgatggcttgacttcttctcatcaagtgggcgataacatgccattttatgacgcatcatctaatcacaaatgggtagatggaaaggatgattatttgaatttgaatgacctcctctacccgccagcagaaaatcaacccctgtttgatgctggggatgacctgatggcttacttcgatgccacggaggatgatttcaaatttgatattatgggcacagaagattctaattctcaacttccagacatgtcgaactttgtccaaaaggatgataacaacaataagtttacattagatgggatctctaataccgctttgtatggtgcttcttcatctggatcccatggcaatatgtatccagacactgcagtaccagatatgccgatggatgacactgttgacaaaagtttcggaaagcgccttgccagcatgctgggttcaattccagctccacccgcaatggcttcagagttcccgccgagcacaggaaaatctgttgtcccacttagtgctgtcaacccgagtagctctatccgtgtcactgcaggcattatccaactcggtggtatcacttttactggtagcaccgagcacctgcagaagaatggagatttcaatttgctcctctctttcactgtcgagggcgacgtctcaaccaaatccattggttttgaaccggatacgcagatgagcaccacgccaatggtgttgcgcagcggcatgtatcttttcttcgtatcggcgatgattctcatgttgagctacaaagttgggctgtgtatctacagcaggtaa

SEQ ID NO: 12636 - DNA, 975 bp, Oryza sativa
  Clone ID: TFbOSC400500j.C1.o36.fg
atggccgggctgagggagatggagtcgacgctgccgccggggttcagattctgccccagcgacgaggagctcatctgcttctacctccgcaacaaggtcgccaaccaccgcgtcgcctccggcaccctcgtcgacgtcgaccttcacgcccgcgagccatgggagcttcccgaggtggctaagctcactgcagaggagtggtacttcttcagcttcagagaccggaaatatgcgacagggtcacggacgaaccgtgcgaccaagacaggttactggaaggccacggggaaggaccggattgtccatgagggtacaacacgagcggtggtcgggatgaggaagacgctggttttttacctcggccgtgcccctaatgggcaaaagacgacatgggtcatgcatgagttccgccttgaaacacctaactcccaacctaaggaggattgggtgctatgtagggtgtttgacaagaagaagccatcgacaatagaagccgagggtggcggaagcagtggcagcgaccttttcattcccggtgccaccgatggctctactgacccctcctcgccgacgacgatggcacctctccttggctcatcgcccgatccgacagtggtggacaggttcgaccaccggtcagcggcggtgccaccattaatggtactcatgcaaggtggtggggaccaaatgatcagtggtagcggtgtccactgcagcaacaacgacaactccggtagtagcagcgcactgcttaacctgacgatgctgcaatacagcttcctagaacatcggccaactggtgacgacatggcggtgggggcccactttggaacatgccagggtggcaacaacgatgccacgatggcacttgggatggggtttgaggagcatggcatgggagagatcatagagatggaaccagcatggcgccaaggtggtagcaactgcgtgtacagggacgagctctacttctag

SEQ ID NO: 12637 - DNA, 1056 bp, Oryza sativa
  Clone ID: TFbOSC101628j.C1.o7.fg
atggcgggcgcggatgggctccctcccggcctcaggttcgaccccagcgacgacgagctcgtctcccgctacctcctccgtcgcatccagcagaagcccctcccgctcgacggcgtcatcgtggatgccgatcccctgagcgtgccgccatggacgcctcttgcggatcacacccgaggcgacgaggccttcttcttcgcgggggcacgcgccaagaatggcaagggaaagcgacagaagcgaaccgtggagggcggagggttctggcaggggcagcggatggccgtggatggcgagcggctggtcgtcccaggcgacggtggaggcggcgtcgacggcagcggcggcggcggcctggagatcacgtggcgcaagtatgtgctgagcttcttcgccgagggtgaacagggcagctcgggctgggttatgcacgagtacgccgtcacgtcgtcggctgacctcgcctcgtcgccgctccggctgtaccgcgtcagaatcgatgacgatgacctgtctgtgtcgcaaacagagggcaccgagctgtccgagcagggctcctccggcgtgatcgacgacgattattggcgggaagccgatgccaccggtggtgcagagagagaagagatcgctctgctcgacgaggagcgctgcccgcaaccacagcccgctcctcctactgatgctctagtgccaccactgcagggccagaactcctacgacgtgatggccgattcgtcactgctatttgctgatcttcccgggagaatcgatgacgatgagctacagcgatctctgcgtgtgtcggacatgcctgacctgttcttgtcgcagacagaggaagccggtgccggtggtggtggtggcgcagctccagtgctgaacaagcagagtaactcctcacctttgggcgtcatggacagcgaggtgccgattgtgttgtctgatctagagttcccagagagcattgatgaagtgcttagctacattgacttcgccacggatgactgcctcgatttcgacatggacgagctgttttccgatatgccagcagactag

SEQ ID NO: 12638 - DNA, 867 bp, Oryza sativa
  Clone ID: TFbOSC419079j.C1.o12.fg
atggtggaggcgagaatgccgccggggttcaggttccacccgagggacgacgagctggtgctggactacctcctgcacaagctcgccgccggcggccggggaggaggggtgtacggcggcggcggcggcgtcgccatcgtcgacgtcgacctcaacaagtgcgagccatgggaccttccagacgcggcgtgcgtgggaggcaaggagtggtacttcttcagcctccgcgaccgcaagtacgccaccggccaccgcaccaaccgcgccacccgctccggctactggaaggccaccggcaaggaccgctccatcacccgccgctcctccatctcctccggcgagccctcctcctccgccgccgccgccgccgtcggcatgcgcaagacgctcgtcttctaccgcggccgcgcccccaagggccgcaagaccgagtgggtcatgcacgagttccggctcgaaccgcagcctctccacctcaaggaggactgggtgctatgcagggtgttctacaagaccagacaaacaattccaagcccatcatctgaagaggccgtcacactgcccaatgagctagacctgcctgccacgccttcgctcccgcccctcatcgatgcctacatcgccttcgatagcgcaccgacgacgacgccatcgatggtcgggagctacgagcaagtgtcctgcttctccggcctgccggcattgccaatgaagggctccatcagctttggggacctgctggccatggacacctctgcagagaagaaggccatcagggtactgcacaacagcaacactgcaaagctggagctctccccagattggggacaggagagtggcctgtcacagatgtggaacccccaataa

SEQ ID NO: 12639 - DNA, 1479 bp, Oryza sativa
  Clone ID: TFbOSC401860j.C1.o13.gm
atggcagttgagggttttgaggaagcaattaaatgccttgagaatttgaagctggaatctggagaggccagtcttgagcagcggcttccggcggcggcgtgcggtgatcatcacacagcagcaggggcagggctgccgccgggattccggttccacccgacggacgaggagctcctcctccactacctcggcaagcgcgccgcggcggcgccctgcccggcaccggtgatcgccgaggtggacatttacaagtacaacccgtgggagctgccggccatggcggtgttcggggagtcggatggcgagtggtacttcttcagcccacgcgaccgcaagtaccccaacggcgtccgtcccaaccgcgccgccggctccggctactggaaggccaccggaaccgacaagcccatctccatctcggagacgcagcagacggtactgctgggcgtgaagaaggccctcgtcttctaccgcggtcgcccgcccaagggcaccaagaccagctggatcatgcacgagtaccgcctcgccaacgccgccgcctcctcctcctcctcctatactagtaacatgaagcagctggcctcatcatcatcgtccagctccagcagcgccagcatgaggctggacgagtgggtgctgtgcagaatctacaagaagaaggaggccaaccagcagctgcagcactacatcgacatgatgatggacgacgacaacgatgacgaacacaacctgcaggtgcagcagcagcagcagcagcaggctcaaagccaccggatgccaaggcctccatccatctcagactaccttctcgactactccgacgacctcccgccgtccaccgatcagacgccatctctgcaccttggattcacggcggtgaacgagggcaacaacaagaggcacaaaactatggaggaatattattctatttccatttccactgcagatatgctgcatgcgtcgtcgtccacgtccaacaacaagtcgacgcaaatcaacttctcctccatatttgagccgcagacgcctgcagctgcgggccatcagctgatcgatgaagggcggtggccgggtggggcttggagaagtggccctcaagtgcaaacgagcgacggcaggaagagcagcggttgggctctcagcgtggaggcggtggaactttggatttggggatttggggcggcggtggtggccagatttggggaaaacaatggtggtggtcattgggcgccggcgaggagtgaaatggggtcatggagagacaaggagcttggtgatttcgtcatagaaatgcttctatccatgataaaggtgctcgtcacagaattgctttccagctggctagtgacaagcatcgtccaagccacgtggctgccatacgtggaatccacattggatgtgacatggcagatgacggcggttgatgtagagcatggtggcagcgacatggagtgcgcgcgcgtgctggctttatag

SEQ ID NO: 12640 - DNA, 1095 bp, Oryza sativa
  Clone ID: TFbOSC401559j.C1.o11.fg
atgagcgacggcaaggactccctcgacctctccggcctcggcgccgccgtccccaacgccaaagagctcagcgcggaggacaaggccaacctcgtggagtcgattaagaacacgctgcagggattggcggcgcggcacacggacgtgctcgagagcctcgagcccaaggtcaggaagcgcgtggaggtgcttagggagatccagagccaacacgatgatctagaggcgaagttctttgaggagagagctgcacttgaagctaaatatcagaagatgtatgaaccactttactccaagcgttatgaaatcgtgaatggtgtggttgaggtagatggtgtcaccaaagaagctgcagatgaaacccctgcagagcagaaagaggagaagggtgtaccagagttctggcttaatgccatgaagaaccatgaaattctgtctgaggagatccaggagagggatgaggaagctcttaagtacctcaaggacatcaaatggtacagaattagtgagccaaagggtttcaagcttgaattttacttcgatactaatccattcttcaagaactcggtgcttaccaaaacataccacatgattgatgaagatgaaccaattctggagaaagccattggtactgaaattgaatggttccctgggaagtgtttgacacaaaaggttctcaagaagaaaccaaagaagggctcaaagaacactaaacctatcacaaaaactgaaaactgtgagagcttctttaacttcttcagcccacctcaagttcctgatgatgatgaggaaattgatgaggatacagctgaacagttgcagaaccaaatggagcaagattatgacattggatctaccatcagagacaagatcattccacatgctgtttcatggtttactggagaggctgctcaagatgaggacttcgaaggcattatggatgatgaagatgatgacgatgaagatgacgacgatgatgaagatgaggatgacgagggtgatgatgaagacgacgaggatgaaaagaagggcggacgagttcctgcaggggaagggcagcagggagagcgacctgcagaatgcaagcaacagtaa

SEQ ID NO: 12641 - DNA, 1227 bp, Oryza sativa
  Clone ID: TFbOSC400419j.C1.o15.fg
atggtgagagaacctcaggatcttcggctaggggagcgggacctccttgaagagatgtcgatgaacgaagaggttgaagatggcgaagtcaagccgctgggtagggtcgaatccatggacgaaactcctggagaggtggccaagctccggtgtcgacacggggctcggggagcggcggtggtggccagcgcgtggagagggagcaacaccggttcgtttgttcttgttcgatcctacattaccatcaccttccgcggcttccgtcctccccgtcttgctcgcctaatccgaagcccaagttctccttgctcgaaaacttgccgcctcatcacgccggagagtatcatcgccaccatctcccaccgcagcaccatgaacgggatcgagctctcatcggaggacaaggctatcctcgtggagacgctcaagaacaagctgcaggcgttggcggagcaacatgttgacgtgctcgagagcctggcaccctcggtcaggaagcgcgtcgatgtgctcatggagattcagagccaacatgatgaactagaagtgaagttcttcgaggaaaaagctgctctagaagctaaatatcagaagctttatggaccattgtactcaaaggaaaagggtgttccagatttctggctcaatgcaatgaagaacaatgagattcttgctgaggagatccatgagagcgatgaggaagctctaaagtaccttaaggacatcaaatggtgtagaattgatgatccaaagggttttaagttcgaattcttcttctatacaaatcccttctttaaaaatcaagtgctgactaaaacataccacatgatcgatgaagatgatgaacccatcctagagaaagcaattgggactgaaatcgaatggcatccaggatattgtttgacacaagaggtgctaacaaaggagagttcagagagcactaaacctataacaaagactgaagaatgtgagagcttctttaatttctttagcccccctcaagttccagatgatgatgcaaaaatagatgaaaataccgctgaagaattgcagaaccaaatggaacgagattatgacatcgcatctactctcagggataagattataccacacgctgtttcttggtttactagagaggctgttcaagacgaggattatggagcttcttgggtggatgatgaagaagaggatgacaataatgatgaatatagtgatgaagaagcataa

SEQ ID NO: 12642 - DNA, 561 bp, Oryza sativa
  Clone ID: TFbOSC25825j.C1.o2.fg
atgaacgggatcgagctctcatcaggggacaaggctaaactcgtggagacgctcaagaacaagctgcaggcattggcggagcaacatgttgacatgctcgagagcctggcgcccgcggtcaggaagcgcgtcgatgtgctcatggagattcagcgttctaaaattgtgagtggtgttcttgaagtagagggcgagaccgaagaaagagaggaaaagggtgttccagatttctggctcaatgcaatgaagaagaatgagattcttgctgaggaggtgctaacaaaggagagttcagagagcactaaacctataacaaagactgaagaatgtgagagcttctttaacttcttcagcccccctcaagttccagatgatgacgcaaaaaatgacgaatatacccttgcccatgttgccagatctactcttagggacaagattataccacacgctgtttcttggttcactagagaggctgttcaagacgaggattatggggcttcttgggtggatgatgaagaagaggatgacgacgatgatgaatatagtgatgaagaagcataa

SEQ ID NO: 12643 - DNA, 1125 bp, Oryza sativa
  Clone ID: TFbOSC23522j.C1.o5.fg
atgggcggcgacaaggagaacctcgacctctccgacctcaacgcctcgctgcccgccgccgccgccgctctcagcgccgaggaccgcgccggcctcgtcaatgccctgaaggataagctgcagagcttggcgggtcagcacacggacgtgcttgaggcgctctcccccaatgtcaggaagcgtgtcgaatatttgagggagatccagggccagcatgatgaaatcgagttaaaattctttgaagagagagctgcgcttgaagcgaagtaccagaagctttatgaacccttgtacacaaagaggtataacatagtaaatggagttgttgaggttgatggtggaaatgacgaaccagccagtgaaaatgctgctgagggtaaagatgcagatgctaaaggagtcccagatttttggcttactgctatgaaaacaaatgaagtgctttctgaggagatccaagagcgtgacgagcctgctttgaaatatctgaaagatatcaagtgggctagaattgacgatcctaagggtttcaagctggattttttctttgatacgaaccctttcttcaagaactctgtcctaacaaaaacgtaccacatggttgatgaagatgaaccaattttggagaaagcaattgggactgaaattgagtggtatcctggtaaaaacctgacacagaagattctaaaaaagaaacccaagaaaggttcaaagaatgcaaagcctattaccaaaactgaagtctgtgagagcttcttcaactttttcagtcccccgcaagtacccgatgatgatgaggacattgatgaagacactgctgatgagcttcagggtcaaatggaacatgattatgacattgggaccaccataagggataagatcatcccacatgctgtttcctggtttactggtgaggctgtgcaagccgaggattttgacgatatggaggatgatgaagaagatgatgaagacgatgatgaagatgaggaggaggaagaagaggatgaggatgaagacgaagacgatgaggaagaaaaaagcaagccaaagaagaagtcggcaggcaaaccgaagtattttgcgttgaactgcccaggaaattattggttggttgtgcacgggtga

SEQ ID NO: 12644 - DNA, 906 bp, Oryza sativa
  Clone ID: TFbOSC400044j.C1.o55.fg
atgagcaatcccgagctcttgtcagaggaaaaggccatcctcgtggagacgctgaagaacaagctgcaggcgttggcggagcaacatgttgacgtgctcgaaagcctggcgcccgtggtcaggaagcgcgtcgatgtgctcatagagattcagagccaacatgatgaactagaagcgaagttcttggaggaaaaagctgctctagaagctaattatcagaagctttatggaccattgtactcaaagcgttctgaaattgtgagtggtgttcttgaagtagagggcgagactgaagaaagagaggaaaagggtgttccagatttctggctcaaagcaatgaagaacaatgagattcttgctgaggagatccatgagagcgatgaggaagctctgaagtaccttaaggacatcaaatggtgcagaattgatgatccaaagggttttaagttcgaattctttttcgatacaaatcccttctttaaaaatcaagtgctgactaaaacataccacatgattgatgaagatgatgaacccatcctagagaaagcaattgggactgaaatcgaatggcatccaggaaattgtttgacacaggaggtgctaacaaaagagagttcagagagcactaaacctataacaaagactgaagaatatgagagcttctttaacttcttcagcccccctcaagttccagaggatgatgcaaaaattgacgaaaataccgctgaagaattgcagaaccaaatggaacgagattatgacattgcatctactctcagggacaagattataccacatgttgtttcttggttcactggagaggctgttcaagacgaggattatggtgcttcttgggtggatgatgaagaggatgatgacgatgaatatagtgatgaagaagcatag

SEQ ID NO: 12645 - DNA, 702 bp, Oryza sativa
  Clone ID: TFbOSC420713j.C1.o28.fg
atgacggcgccggcggacaaggggaagaaggccaagaccgacgccgacggcggcgccgccgaggagaacgagcagatcgacggcgccctcgtcctctccatcgagaagctccaggagatccaggacgagctcgagaaggtcaatgaggaagctagtgacaaggttttggaggtcgagcagaaatacagtgagattcgcagacctgtctatctccgaaggagtgacgttatccaaacaatccccgacttctggctgacagcgtttctgagtcatcctctacttagtgagcttttgaccgaagaggatcaaaagatgttcaagtacctggagtctgtcgacgtggatgattctaaagatgtcaagtcaggctactccataactcttaccttctccgagaacccgtactttgaagacaaagagctcacgaagacatatgccttcgctgatgacggaacaaccacaataaatgctactagcattaagtggaaagaaggaatggaaattgcaaatgggaatgccaagaagaaagggagcaagcgaccattggttgaggaaagtttcttcacctggtttactgatacagagcacaagagtcttgctgatggtgtgcaagatgaggaggctgaagagttaggagaggatgacgacgaagaggggtctgatgctgatgagggtgaagaggatgaggaggaggagaactga

SEQ ID NO: 12646 - DNA, 1782 bp, Oryza sativa
  Clone ID: TFbOSC401316j.C1.o10.hg
atggcggcggcggagcagaaggggaagaagccgaggaccgacggcgcggaggccgagcccgtcgacgccgccctgctgcagtccatcgagaagctccaggagatccaggacgagatcgagaaggttaatgaggaagcatgtgataaagttctggagttggaacagaaatacaacgaggttcgcagaccagtttatgttcgacggaataaaattatcaagcaaattcctgacttctggctgacagcgtttcttagccatcctatgcttggtgaactattaactgaagatgatcaaaagattttcaaacacttggagtctatcgacgtggatgactcagaagatatcaaatcaggctactccattactctcacattctcccccaatccatattttgaagatacaaagcttacaaaaacatattcctttagtgacgatgaagcagtcaaagtaaaggctacctccatcaggtggaagaaaggaatggatattgccaatgatcgtgcgtacacgaagaaaggggacaagcgaatcttaattgatgaaagtttctttacttggttcaatagtgaaaagaacagaagttttgctcatggagctatggatgaggtggcagatgtcatcaaggaagatctgtggcctaatcctttgaagtacttcaacaatgaatttgaagaagaattagagctactggatgacgatgacgagcaatatttttttgcgcttgactggtatctgatgatgacgatgaggaggaggatgatgaagaccaaggtgaaggagaggaggatggagaggagaactgagctctctgtcatgtcagattcttttggcctggacaacttatgtctgcagaaagcggagaccgggcctcctggagggctgaaacagcagggcgtccccttttgcggcgttgtggtgctcgacttagctggcagtttgaattcaggcggccgcgtgagatgggccgctcgcttcgccggcccgtccgggcctccgagcgtccccgctcgtcgcctcgtcccctgcctgcgccgcagtggagcaaccggcactaccgaaccgctcggcgtagcatccacgcagcgcaggggaaggaaagccgaagcgcggccgccgcgcgtgagatcgacgcgcggcgacttcgccaaccttccctataaagcgctgccccaatcgccaagcccaccgacctcctcctcctctccagaccggaggatgtccggcgagagatgcgccgggcggccgctgttcggcggcgccatctccagtaccttccccgtccggttccaggaggtgttcgttgacccggcccgcgacgagagcctcatcttcgagctgctcgacctcaagggcgaggtagaggacggcggcagcgcgctctggttcctgcgcgacatcgccaacgagcaggacgcgggggacaacttggtagttgagcattctgggacgatcgagctaggtggtctgcgatttggagatgctcctgcagtggctggaactgcggttggtcagctggctatctcaaaaggaaggcaaggcagagaagcacagaacattgttcgactttacttggccaatatacgcctcaagaatgcagctactgatgtagttattactgcatatgagccactgttgataaaccccttgagtgaaagcgccagtgcagttgcagccggtccagcagtaccagcagaacaagcaggatgcttagcaatgtctgagatcttcaagctcgccgtgatgaacttcaatgcaccaaggatcaggatgacgaacatgtga

SEQ ID NO: 12647 - DNA, 5095 bp, Oryza sativa
  Clone ID: TFbOSC4252j.C1.o2.fg
atggaccatatagctgaagaagagactgtgggagttgcggaagaccctggtttggctgatgttggcaaggctgatgagaccaaggaagaaggtggtggtgctggagtgcacttggatgaaactagggttgcagtggatgatcccacggaggtgcgtgcttcgcagattgacgatggtacggctatggtgtccgtattaggtggcgatggcgatagctttgttgagcaagatggtcaggatactagcggcggcggtgcttgcaatgaaggtaatgagcctgaggaagatgctcgtgttcaggtgcgtttggatgatactagtgccgctgtggatgaggggggtgcttccttgattgatgatgttatgaatacgctccccgttggaggtgtggctagctttgatgatggtcctcagacggacaagaatgcgcaggatgagggggcgcttatagatgtagtttcctcaactgtgctgaatgatgcgagcatagatcttgtcaaagctagtgatagtgtctcggaggaaggcacagggatggatatacttgtccaaccgggagaggacattaaggaaatggttacaatagcctgtgatgcggccacagatgacgagggcaggaaggtggatgcagtttccagctccagtgatcgcaacgaggaagtggttggtgcagctggtcttgatgagacagatgaagacatgcgattgggtacagttggcctgtctggtgatgacaatgtggcaaatgaggctgctgccgcagctgctggtggtgcagatgatgaggacttgaagatggatggggtcattaccgccggagataaggatgtggaaaatggcaaggctgacaatgctgatggtgttccggaagtgaatgtagttgccattagtagagataatagtgcggaaaatgaggctgctgcagctggtgatgatggcgcagatgaagagggcattcagatgaatgtgctaaacacaactagaggtgagggtgaagaagatgatgaggctgctcaaaatgttgttgaatatgctgttgatggtacagaagaactggaaactataggcctgactggagatgataaggcggaaaaagaagctgccccagctggtaacaatagtgcagatgaggagggcatgcagatggatgcggttaccacaactggagctgaagatgaagatggcaaggctgatgaaaatgttgttgaagatgatgatggtgtttcagaagaagctgtggctgacacagttggtgaggatatccctgaagaagatgcagtgcagatagatgaggacgaggatgatgatgacgtgcctccaccattgacaaggaaaggcggggggcgccggaagcgaggtcgtgcatcttccaaggctcaggttgtggtgaaaccacctgttaggaagaaggatgatgaggaagtttgcttcatttgctttgatggtggtgaccttgttgtgtgtgatcgtaggggttgtcctaaggcttaccacccttcttgtgttaatcgggatgacgagttcttcaaatcgaagggtcgttggaattgtgatagtgggatgccggatgtagattttgacgacaaaacaagctggtggtatttgttcaaggattattggttgaatttgaaaacaaaattaccattgacgtttgaagaaatatcagcagccaagtctcaaaagaatggttcttctttggttattcgtgacaatgatctcagtgaaccacatgatacaaatgatgaagaagagggtaattcagacagctcatctgtgcgccatctagaaggcaattcaaagaggaaaggaaggaagcgatcaaagcaagctgctaacgatgacagttctgtagttaaagatagcactaggaaatctacaaagcgaggcctgacaggtggccgtgatactaaaagttctacagggagaaaggttagaaaattgtccaagcgtgctttgagcagtgaccatcgaccaagagaatctgaaagcgtagggacatctacatcgtcagctgaagagaccagttgggcttcgaaggagctcttggattttgtagcaaatatgaaaaatggtgacaaatctgtgctgtcccaatttgaagtccaatcccttttacttgattatattaaacgtgaaaacctccgggatcctcgcaggaaaagtcagataatttgtgattctatgctcaaaagcctttttgggaaagcacgtgttggtcattttgagatgctgaagcttcttgaatcccatttcctcatgagcgaggtctcgccagttgaaattgatgacaaccatggtggtgttgtagaccctgatcctagtctggatgctgatggcaacagtgaagcatcaatggtgatgagctcagaaaaaaggaaaaaatctcgcaagtatgaccagaaagctctgcaaacaaaccttgacgactacgcagcaatagataaccataacatcagtttaatgtacctgcgtcgcaacctgttagaagaattgatcagtgaagttgacacatttgatgagaaagttcttgggtcatttgtgagaataagaatatctggaacaggtcaaaggcaagacatctaccggctcgtgcaaattgttggcacaggaatagcgccagaacaatataaatgtgggaaaaagtcgactgatataacactggagattctaaacttagacaagagagaggttattactattgatataacctcaaaccaagagttcactgaggaggaatgcaaacgcttacggcaaagcataaagtgtggattcattccaaggctgacagtgtttttttggcatatgtgcacagtttcgctgtttctaaactatcttaccattcagggagaggtttatgagaaagcaaaggttctacaatctctcaaagtcaacgattggattgaaatatttacgcttagagaatgtgtagagaagctgaagcttctaagtacccctgaagagcgtgttcgtaggctgaatgaagaacctgaagttcatgctgaccataccatggatccagattatgaatctccagaggaacaagagcaggatactggaagaagcagcttcaataagtcaagaggatctttctctaagaaagataataatcctgtatctccaggtaaaggagagggtaggagtcctgcacaaagagatttaaaaaccaactgggagtctaatcgaaacacatggggcgaatccagtacacatatcgagtcaccccttggacgcagacctgcattttcgtctcacggtgaaagtgctggttacacaagtaaatcagatagcccaaacatcggtacacacgcagttaaagtgggagctactgcaggagccaatatagggtcagggggaacacatgcatcacagtcagttattaatgagtctgaaaaaatctggcagtacatggatcctaccggtaaaatccagggtcctttctcaatagtgcagttgcggaaatggaatggcagtgggtacttccctccgaatttaaaaatatggaagtctactgagaagcaagatgattcaatattattgacagatgctttgctcgggaggtttgagaaagacctaccgccgtgggaaccgccagttggaagcagttcagatgttgatggtaggccccgtaatgattcccttcttgaggaaggaacaagagctggagaacaaccttcaaaatcagcagttctaagtagcacacagtctttctcaggaagggctggtcagggaaacgatgcggcaaatcttggaccagccactatccaatctagtacacaaggttattatggaatgcaaaactctcaagcagcgtatgcagtccaacaatctcttagtggaagttggaacgcctcaagtcagtttggaactgcaataaatcctgtgacactttctcagcctgccatgggtagctttgtagttggacaaaatgcagctttaggaagtgcaggtcagctaactcctgtaccaggtcctgcgacagtgagtgcagaagtagttaattcacagttgcagtcccagaaccagatagcatcttttttatcacaaagtgatggcagattagctgatggaaacgattcaaagttgggggaagatgcttcgcgtgaaaggatgaggtcatcgggtgaagatcttggactatctggtgcacaacctggaggggtgcaatcaaatactcaacaacttgaagatgcaaggaaccagttacaaactgatgcttccaactcggtaaagccatctcagctgatatcaacaccatctgctgaagcagtgcagccctcgtccacagccatggctggtggtgataatcaaaacactgcttgggcacaattggcaagcacatctggccaatctcagcctcaggcggctggaaatatgacctggggagctactctccagggtaatgcaaacatgggctggggaatggttggacagaacaacatgaacatgtcttggggaggaacagcacaaagtgccacaggctacaacatgggtttggctatgcaagcacagccaaatgcagttccaaacatgggctgggttacaccaaatcctggaaacaccaatatgaatatgatgtgggcaactcaaggccaaggcactccaaatgcagcagcaatggtgggaactcagatgcaaggagttgcaatggctccatggggggccattgcacaaggaaatacaaattcttatcctggttgggggggccaagttggaaacatgaaccaaaatgttggatggggtgctcccatgcaggttaatccaggtcccagtactggaaatgggacaggccaagataataacaatatgaactggaattcaccaagcgggaacccaaattggaataaccagcagcgagacaatggaggcaggcattctgggcatggtggtgattttaatggcggtgactctggtgggaggtcttggaggtcgcagtcaggtggtgatggagggtcgtggaggcctaaaaggggagtctgctattctatactcgacaagggatactgcaagaatggtgagcactgcaacttttcccattcaataccgaatgatggatatccatcaagaaacagtcggcacttcgataggcaaaattcag

SEQ ID NO: 12648 - DNA, 5334 bp, Oryza sativa
  Clone ID: TFbOSC900152j.C1.o16.fg
atggaccatatagctgaagaagagactgtgggagttgcggaagaccctggtttggctgatgttggcaaggctgatgagaccaaggaagaaggtggtggtgctggagtgcacttggatgaaactagggttgcagtggatgatcccacggaggtgcgtgcttcgcagattgacgatggtacggctatggtgtccgtattaggtggcgatggcgatagctttgttgagcaagatggtcaggatactagcggcggcggtgcttgcaatgaaggtaatgagcctgaggaagatgctcgtgttcaggtgcgtttggatgatactagtgccgctgtggatgaggggggtgcttccttgattgatgatgttatgaatacgctccccgttggaggtgtggctagctttgatgatggtcctcagacggacaagaatgcgcaggatgagggggcgcttatagatgtagtttcctcaactgtgctgaatgatgcgagcatagatcttgtcaaagctagtgatagtgtctcggaggaaggcacagggatggatatacttgtccaaccgggagaggacattaaggaaatggttacaatagcctgtgatgcggccacagatgacgagggcaggaaggtggatgcagtttccagctccagtgatcgcaacgaggaagtggttggtgcagctggtcttgatgagacagatgaagacatgcgattgggtacagttggcctgtctggtgatgacaatgtggcaaatgaggctgctgccgcagctgctggtggtgcagatgatgaggacttgaagatggatggggtcattaccgccggagataaggatgtggaaaatggcaaggctgacaatgctgatggtgttccggaagtgaatgtagttgccattagtagagataatagtgcggaaaatgaggctgctgcagctggtgatgatggcgcagatgaagagggcattcagatgaatgtgctaaacacaactagaggtgagggtgaagaagatgatgaggctgctcaaaatgttgttgaatatgctgttgatggtacagaagaactggaaactataggcctgactggagatgataaggcggaaaaagaagctgccccagctggtaacaatagtgcagatgaggagggcatgcagatggatgcggttaccacaactggagctgaagatgaagatggcaaggctgatgaaaatgttgttgaagatgatgatggtgtttcagaagaagctgtggctgacacagttggtgaggatatccctgaagaagatgcagtgcagatagatgaggacgaggatgatgatgacgtgcctccaccattgacaaggaaaggcggggggcgccggaagcgaggtcgtgcatcttccaaggctcaggttgtggtgaaaccacctgttaggaagaaggatgatgaggaagtttgcttcatttgctttgatggtggtgaccttgttgtgtgtgatcgtaggggttgtcctaaggcttaccacccttcttgtgttaatcgggatgacgagttcttcaaatcgaagggtcgttggaattgtgatagtgggatgccggatgtagattttgacgacaaaacaagctggtggtatttgttcaaggattattggttgaatttgaaaacaaaattaccattgacgtttgaagaaatatcagcagccaagtctcaaaagaatggttcttctttggttattcgtgacaatgatctcagtgaaccacatgatacaaatgatgaagaagagggtaattcagacagctcatctgtgcgccatctagaaggcaattcaaagaggaaaggaaggaagcgatcaaagcaagctgctaacgatgacagttctgtagttaaagatagcactaggaaatctacaaagcgaggcctgacaggtggccgtgatactaaaagttctacagggagaaaggttagaaaattgtccaagcgtgctttgagcagtgaccatcgaccaagagaatctgaaagcgtagggacatctacatcgtcagctgaagagaccagttgggcttcgaaggagctcttggattttgtagcaaatatgaaaaatggtgacaaatctgtgctgtcccaatttgaagtccaatcccttttacttgattatattaaacgtgaaaacctccgggatcctcgcaggaaaagtcagataatttgtgattctatgctcaaaagcctttttgggaaagcacgtgttggtcattttgagatgctgaagcttcttgaatcccatttcctcatgagcgaggtctcgccagttgaaattgatgacaaccatggtggtgttgtagaccctgatcctagtctggatgctgatggcaacagtgaagcatcaatggtgatgagctcagaaaaaaggaaaaaatctcgcaagtatgaccagaaagctctgcaaacaaaccttgacgactacgcagcaatagataaccataacatcagtttaatgtacctgcgtcgcaacctgttagaagaattgatcagtgaagttgacacatttgatgagaaagttcttgggtcatttgtgagaataagaatatctggaacaggtcaaaggcaagacatctaccggctcgtgcaaattgttggcacaggaatagcgccagaacaatataaatgtgggaaaaagtcgactgatataacactggagattctaaacttagacaagagagaggttattactattgatataacctcaaaccaagagttcactgaggaggaatgcaaacgcttacggcaaagcataaagtgtggattcattccaaggctgacagtgtttttttggcatatgtgcacagtttcgctgtttctaaactatcttaccattcagggagaggtttatgagaaagcaaaggttctacaatctctcaaagtcaacgattggattgaaagtgaaaaaatgcggcttgggcatcttcgtgaccgtgcaagcgatatgggccgtagaaaagaatatccttcttcattatttacgcttagagaatgtgtagagaagctgaagcttctaagtacccctgaagagcgtgttcgtaggctgaatgaagaacctgaagttcatgctgaccataccatggatccagattatgaatctccagaggaacaagagcaggatactggaagaagcagcttcaataagtcaagaggatctttctctaagaaagataataatcctgtatctccaggtaaaggagagggtaggagtcctgcacaaagagatttaaaaaccaactgggagtctaatcgaaacacatggggcgaatccagtacacatatcgagtcaccccttggacgcagacctgcattttcgtctcacggtgaaagtgctggttacacaagtaaatcagatagcccaaacatcggtacacacgcagttaaagtgggagctactgcaggagccaatatagggtcagggggaacacatgcatcacagtcagttattaatgagtctgaaaaaatctggcagtacatggatcctaccggtaaaatccagggtcctttctcaatagtgcagttgcggaaatggaatggcagtgggtacttccctccgaatttaaaaatatggaagtctactgagaagcaagatgattcaatattattgacagatgctttgctcgggaggtttgagaaagacctaccgccgtgggaaccgccagttggaagcagttcagatgttgatggtaggccccgtaatgattcccttcttgaggaaggaacaagagctggagaacaaccttcaaaatcagcagttctaagtagcacacagtctttctcaggaagggctggtcagggaaacgatgcggcaaatcttggaccagccactatccaatctagtacacaaggttattatggaatgcaaaactctcaagcagcgtatgcagtccaacaatctcttagtggaagttggaacgcctcaagtcagtttggaactgcaataaatcctgtgacactttctcagcctgccatgggtagctttgtagttggacaaaatgcagctttaggaagtgcaggtcagctaactcctgtaccaggtcctgcgacagtgagtgcagaagtagttaattcacagttgcagtcccagaaccagatagcatcttttttatcacaaagtgatggcagattagctgatggaaacgattcaaagttgggggaagatgcttcgcgtgaaaggatgaggtcatcgggtgaagatcttggactatctggtgcacaacctggaggggtgcaatcaaatactcaacaacttgaagatgcaaggaaccagttacaaactgatgcttccaactcggtaaagccatctcagctgatatcaacaccatctgctgaagcagtgcagccctcgtccacagccatggctggtggtgataatcaaaacactgcttgggcacaattggcaagcacatctggccaatctcagcctcaggcggctggaaatatgacctggggagctactctccagggtaatgcaaacatgggctggggaatggttggacagaacaacatgaacatgtcttggggaggaacagcacaaagtgccacaggctacaacatgggtttggctatgcaagcacagccaaatgcagttccaaacatgggctgggttacaccaaatcctggaaacaccaatatgaatatgatgtgggcaactcaaggccaaggcactccaaatgcagcagcaatggtgggaactcagatgcaaggagttgcaatggctccatggggggccattgcacaaggaaatacaaattcttatcctggttgggggggccaagttggaaacatgaaccaaaatgttggatggggtgctcccatgcaggttaatccaggtcccagtactggaaatgggacaggccaagataataacaatatgaactggaattcaccaagcgggaacccaaattggaataaccagcagcgagacaatggaggcaggcattctgggcatggtggtgattttaatggcggtgactctggtgggaggtcttggaggtcgcagtcaggtggtgatggagggtcgtggaggcctaaaaggggagtctgctattctatactcgacaagggatactgcaagaatggtgagcactgcaacttttcccattcaataccgaatgatggatatccatcaagaaacagtcggcacttcgataggcaaaattcaggtaacgagagacggtacgacaggcaaaacgagaggactgatcggcagtttgatcggcaatcgtcaggcaacgagaggcgtgatgacaggcacaacggcagggatagtgacaggcatgatgacaggctgactgatactaggtcacaatcaagagagaggcagtag

SEQ ID NO: 12649 - DNA, 565 bp, Oryza sativa
  Clone ID: TFbOSC27143j.C1.o2.gp
gttccatccatcttgtatgggaatgaccattgagcaggccaaaaaattagatcatttcctgtgcgcagattgtgtcaaagaaaatggcacgaagagaccttcaaattcatatccagcatcatcaaattctgattctaaggttgagccaaaaaagcggaagaggtaattgctgtgacacgagccatccgtggtgaggagatgcactgtttatggcgtcagctcttcattgctggtgcaaagtcaaaacgtggagggtgtacagtgcagatgaagagctaggctaggtccaagatcgcgttaacttatcatttgcccgaatttgggaacgtttccatcagtctaggcaaaagaacgaacttcattgatgctgttggctcgttcagttgtagccagtgtggactggatgagtgtcagcgtgttttagctttttgcctggtacaggaaaacgttcccagcgtggatgatgttgatgatagcttaactgtagtttcataatttgggtgtccctgagttctgtgacctgtttattgataagtgaatgccgcatgatgatgctgttgctgca

SEQ ID NO: 12650 - DNA, 2064 bp, Oryza sativa
  Clone ID: TFbOSC400970j.C1.o1.fg
atggaagaagtcaaggaatctccagtacagccaacgactagtacagctcaaacaatcacttcaagtggcacagctgatttccaaggttttcatggagctcccaagtttgctgtcggagttcctaggaatctaccagctgttgctgccttgcctgctactgccccagtgacttctgcttccctggttaccttgaaaccacctggatcatctcctgtaaaatcagttaacaacccttcagttgttacaatgccccatatggctccatcgcatcttaaatcggataaaggagttaatggtcctcctaatctagtacgcaccggagcaacctatggcaacttgaacaaatcatttcatgatacatgtgctaggtccaatctgaacgctgtacagagttccaatccggtggcgaaaaatcaggacacaaagacagcatcaattgatgctacagcaggaaaccctcttacaggtcatcatgctacaccaagcgtggcacctgttcctccaaaacctacttttgctaaccacagtgaaatagcaaaaagtgttcaacgtgttctgcaccaaccagctaatcatcctagctggattccgccatcaactgagtacatgcgttctcgtttggactgtcaaatatgcaaagtagctatcatggatatggaaagtttgcttgtttgtgatgcttgtgagaagggagcacacttgaaatgccttcagcattatggtaataaaggtgttcctaaagctgagtggcattgtccaacatgcctgacaaagagtaagggcaagcctttgccaccaaaatatggcaaggttacaagaactgctgtcgaaccaaaggctactccaccaccagctggaacgcaggtttcttcgcaaggagcggcagaaaatattgctgtaaaggaaaatcaccaaaaagtggctgtaaatggtaatcttctgaatcaaaactccacgcaagctggcagtgttgctcagagcagtactgttttggctctaggtgttactgctgctgttgcacaatcacagccgctttctatatccagacttccagaaggaaatttaaataatgatgcagccttatctagtgaaaagacggggaatgtgggtccttgcagtagcattgcacatcgtaatgaaaagccccctgatgaactacagagcagtggactgcctgctaacagtaagactggaacccaatcagggaaatctcctaatgaagaagtgtccagtgtattagtttcaggcagtgcggattcaacaaatgataccttgcatgagcagaaatctcatgaaatttctggggaaaaatgctcagacaactcttctattgttgcttctgaagcaaatatcaagtcaaaagcagactctgagctcatttcgggcagagatgtggaaatggttgataatgatataccaccaaaggatcaaaccaacaacattgccactgaggacaaacccagtactcaagaaacctctgaagcacataaaatggaagttgtggaggtgagcgccaatactggaatacaaataagccagggtgacagtgctggcactgaagagaatctccacactgaagtaacttctgttccacacatgatcaatgatgtggcaatggctaccaatgctggaacaccaatatgtccaagcaacaacgttgccattgaagaaaagcccaagtctactgtaatttccgaggtatgtacaaccaaagatacggaaatgactactgatgccactttagatcaaaacaccaatgttgctacagaagaaattcctttgcctgaatcaatttctgcaactgaggatgctgacatgactactgatactggaataccaacaaatcaaagacaggaagtaaatggattggctgaaaatggcagaaaagaacatcccctgggagaaacagataaacacaaatctgaccatagtacgatgcctgatatgtctacagccccacagataacatcaaatggagttatgcattcaaaagatgaagctgcatgtggccatgaaggtgaaattgtggacatcagtgcagcagcaacagaggaaaacaattag

SEQ ID NO: 12651 - DNA, 2610 bp, Oryza sativa
  Clone ID: TFbOSC401107j.C1.o34.fg
atgacgataccgagcgccgaggggttcctccacgccgcgagctgcctcccgtgcacggcggaggaggagcgggacctcgtcgtcgcgctcaccagggaggccgaggagaatgtcaaggacggcgatctccgctacctcgtctcccacagctggtggcttaactggcaaagctatgtgggcttaatcaaacctgatgagaatgatgctgacatgcttcctcaagctccaagtagaccaggagagatagataactcaaagctagtttcagaggaaagcagcagtattggtgatgagccagagcttcaaagaaccctgagggaaggagatgactacgctttggtgccccaggaagtatggaggaagctacatgaatggtacaaaggtggaccagaactctcaagaagagtaatttgtagtagtccaacttccagaagttacattgtggatgtctatcccctccgtctgaaattatttgatggaagagacagcttggagagaattatcagaattagtagaaaggccaaagttagtgagctctatagcttggtttgctcacttttgtccgtcgaacagtctaagatcgacatctgggatttttaccaaaagacaaagggaaaaaaactgataaatcttaatgagacggttgaggaagctcaactgatgatggaccaggagattatcatagaggcaaaggcagatgatgcttggtgttcggatcttggtacaagatcaaataatgaactagcattaattccgttggaaccctcaacatcatcgttttcaattgctggaggtcctgcattttcaaatggtttttcatctggatttggttccagtttttcccaagataatagctttagtcctttattaagggacgcagaagatggttatagtttctccaatggcacaaaggatgatatccatggactgagtggtttacataacttgggaaatacatgtttcatgaacagtgctatacaatccttggtgcatacacctccattggtggagtactttttacaggattacagtcgggagataaatacagaaaatccacttgggctacaggagttacttgcatttctattggatggtctgcatgaagatctcaaccgtgtgaaaaagaaaccatatattgaagcaaaggatgccgatggccgtcctgatgaagaacttgctgaggaatgctggaattaccataaagctcgaaatgattctataattgttgataaattccaggtttatgtatgctcacaactattcaccactcatcagtataccttttccattgcttgctgcttttgcaatgattatcttcttgagactaggcctgaaagattaggccagggtcagtacaagtccactttggtttgcccagattttactcgcatgattaatgtaactgtatttagtggtactggagatgcccttcccatgccttacactgtgaaggtatatgatcatcggatttaccgctattggaacccatcagaaccactttgtcatgtaaaagatgaagacaaacttgttgcttacaggctaccggttggctctgaaaatctcttgagggtagagatcctgcatcgggtggttgatagatatacttcagagtccatgtttaatcttagtcggaagctaattggaagccctcttgtgacttgtattccaagtgactctacaagaaaagctgatatttatgcaactgtctcttcacttctggctccatttgtgcgggcaaaagtacatactctggatgaatctgcaaccaagttaaatagcaatggacctagcctggatggtattgtactgacagacaatggtgtcacctgtgaggaagatgtatctacatcaaatgtggatgaggaagcagctgatgaagaggttttgccatttcagctttggttgactgatgataaagctaataagagagagcatattgatgcagattctaacggtgttcctgggtcgaccatgaggttattaatggactggtctgatagagaacatgaagtatatgacattaagtacatggatgaactttctgtggtcttcaagcctggatttatgtcaaagaaaaatcggcaagaagcagtcaatttattttcatgcttagatgcttttctgaaggatgaacctctgggccctgatgacatgtggtactgtccgagatgcacggagcacaagcaagccagcaaaaagcttgacttatggaggttgcctgagatattggtagttcacttaaaaaggttctcatacagccggtttatgaagaacaagcttgatacctttgtcaactttccaatccatgatcttgatatgagtagatatgcaaatcactcaagaggtgatcagccccccatttatgaactctatgcagtgatcaatcattacggcggaatgggtggtggtcactactctgcgtatgcaaagttagtagaagaggacagttggtatcattttgatgatagccacgtttcatctgttggcgaagaggacatcaggacatcctcagcttatctcctgttctatcggcgagttggtagcagctcctgcagtgtgtctaaaaatgttgcagtggacactgatatggttgattcgctggacacatag

SEQ ID NO: 12652 - DNA, 2481 bp, Oryza sativa
  Clone ID: TFbOSC401949j.C1.o34.fg
atggcactttgtccagactgtggcgccattactgtatgcgaagtttgtggagttcttggttacaaaaatcttctgctatcttgcaaaaactgcaacggagctgctgtgcaccgatactgtctggacaaagttgattttgatgggacagtagattggtcatgtgatgaatgccatcctaggcatggcaaaggtactaatagaagatctttagaagtgactttagatgataaaacagtggttggcaagcagccagaaaatcagtcatcactggataccaaccacgacaagcctgggatgaatggtggtaatgatgactatgtcagtgatgacttgatgttggagagaaataaggaaagatttcagttgcatgacgaggcaaacaatgatatacacctgaaaagtatgtccgctaatgtgccccggtcttccactttgcatgaaaactctgtggcccgaaacgtatcatcctcagcaaatacagggctaccgatggatagcaattgtgtgccatctgcacacattgatattggaaatccaagagacagtagtgtgagactaatattaacaggggaaaatcgaagagaatcttcaatgctgctagatggggcttgttcaggttccttgtcaaaagactcgtcgaaagagaaaattgatcgtgaggccaattcttcccatatggaaccttctgatgctgtcaagaacttctgtaaggacaacccaatgaagcgaagaaaactcatgttattagatgatgatgatgatgatgtaggtgtggaactgtctgatactgttcaaaatgttgtcaaggacaacccaagcaaacgaagaaaactcattttacctgatgatgatgatgtagaggtggaactttgcaatactgttcaaagtattgcaaaggacaacccagggaagacaatacagcttattgtactagatgatgatgatgacaaacaagaggatgctgaaaatctgaatcacctatctcttgagtttgaaggaccaattgagaagcataaaatacacattggatatgccacagggcagagatgtttagaagatgatgaacatggactactggatagtttggatcaccggtctttggagaacacttgtcccacaaagaaacggaggagatacatatgtccaagtgacgatgaagaagaagaggttattaaaggttctacgaccactggatgtgctccgaatgatgttgcaaatacagcttcacaacatgtagatgccaaggaccaccatctgcagtccagaatggcatttgcttcagatttcaccaaacatcagtattatatttactcagagcctatgggtgagcctgcttggagtggtatctttatgacagatagcaatgtgcctattatgttggctgcacacctatcaactaaagcatgccagagagtgtcggaatttgcaagatcgttgcaaccagtagttgaagtaatcaagctccctaggttgaaagcatggccagagaggtgggacaaatcaggacctactgacgacagcattgggttgtttttcttcccgcatagtatgaggccaaatgaagaattagataaactagtgaaagaagtaattgagagtgatgttgtcttaaaagctgttctaggaactgtggagctactaatcttcccctctattcttttaccagaacaatatcatgagttccaggggaaatactacctgtggggagtgtgcaaggccaggaaacataatcctgacacagctgttcttgttgaagaacaatgtggcttggtctctgcctcggaggaagggtcatcggacaaagaaagttatgtcatgaaacatgtcgaggatcgattgcctgcagactgtaacccggaggcacgggagggggacatcaaaactgctttgggagaaggttgtttctcacctgatagctgtttgtcaagtaataaggcaagccctgtgaagggtggatcaccatgctttatgcaaccaggacttggcgataaacctcatgagcctggtgtagcagaccagaaagaagatgagcaagacttcacctctttacctagaaggaatgatcaaaatgctaccaatccaccaatcgactctttaccttccgcgaccagactgtttggattcgttacagcacggtctgaaagatgtcagcaactcatccaggagatggtcaaggaaggtgctctcttattctcggtgccggaagatatgacgatcaatcgatctaccataagcaagagcaatggagtaggagcagctcaggcccctgacagtggctgtcaacatgtgcaggagcgttgtgaacccattgaattcgttccgattgatcacaatgaccccgactcggcttctgaagcctgcctggatctgttcccggttcggcatgagcagattggattgacttctcaggtagatgttaaagaagtagaactggacttgagccttggcgcatttcggcgagcaccttcagagctgccatga

SEQ ID NO: 12653 - DNA, 771 bp, Oryza sativa
  Clone ID: TFbOSC27184j.C1.o6.fg
atggtggagaatcatgtgtcaaaagaggattcaaagaattataaattgaggatgggctttgtggatggccatatttgtgcaatttgtgatgatggtggtaatttgatacgctgtgagggtgcctgtcgaaggtatttccaccgaaccatttccaatgatgcagattttaactgtgaaactctcaacatgagtcaagaacaagtggaatcatcaaagttcatatgcaagaactgtgtgtataagcaacaccaatgctttggttgtggagagttgggatcctctgacatgtcatcgggttcagctgaggtatatcagtgcagtaagagcagatgcagacgcttttaccatcctaagtgtcttgctgaatttgactctagtaagaacccaccagtttttgaatgccccctgcatgaatgctttgcatgcaagaacaaaggggaaaaatataacgaggaaacatgcaagaacaaggggcaggagagtatcaagaaaaaacaaggggcggaaaacaacaagaaaatgcacctggcattatgcaggcgatgtccaatagcataccatcgcaagtgcttgcccaggtgtgatatgtatttggcactatttgctagtgatagtgcccttctaaaaggatattttgttgacacggtgttctcttttttaggaatatttcctctgttcccaaaggttgtcttccaaggaaatggaaaactaataagggccaagttttcttctattgcctgtaagctttttgcacttcatcctttttgttag

SEQ ID NO: 12654 - DNA, 2466 bp, Oryza sativa
  Clone ID: TFbOSC400909j.C1.o27.fg
atggggaggaggagcaagcagaaggtggaggatatggccgaggagctctgcttcgtctgcaaggacggcggcgacatccgcgtttgcgacttcaagaactgcctcaagggttatcatccacactgtgtggggaaggaggaaagcttccttgattctgccgaacagttcatttgtgaattgcacaaatgtgttagctgcaaaaggaattcagaatatcattgtttgtgttgtccaagttcctctgtatgcggtgaatgccttggaaaagttgaatttgcacaatttaggaagcagagccagaccaaaggattatgcaataactgtttaaagttggcattgtttgttgagaagaactctgaagctaattctgatggggaaacagttgaattcagatatacggagaactatcttgttctgtttaaagactactgggaaactattaaagacaatgaaggcttggcattgattgatttgcagcaagccaatatttgtcttagaacaagcttaagctgtaaacaaggaagggattcagagaaacccccagatgaagattacagggcagataagaattcattgagtgttaatgatggcgctgaacaaccattcccggttgatgtaaaggtccaaccaagtgaagcaaaaatgtcactgaagagaaagaagtcaaacaagaaaacatatgtcggttggggttcaaaagagctaattgaattcctgtcatgtattggcaaggatacaactaaacctcttgatgaatttatacttactggagttgttaaggagtacatccagcagaagaatctattcaaggacaggaaaagaaaatctgtcatttgtgatgataagcttcattctttgttcaggaaaagaaaagtgaagtcaaatatgattcttaacttgctggaaatacatcttgcggcaaatgctgcttcagaggatgattttctcgatgattctgaggatgatgaaggccgaattatgagaaaaaggccttgtaatactttaaaggcggcagagacttctgagagggatccaaagagaaacaagaaatgctttgcagctcttaatcacaataacttaaagttaatttatttgagaagaactctaattatgaatcttatgggccaagacacatttgaacagaaagttgttggaagtttggttagagtcaagaatgatgacaatcattatagttatcagatgcctaaaaaacactaccagcttggcctagtaacaggcattaggaaatctccacaagaatacaagataaaggacaaacgtacagatattcttttatgtgtttccaatctgtgggatgacatcaagatctccatgttgtctgaagaggacatagaggaggacgagtgtaatgatctccttctgttggctaaaaaaggactcttcaaaagacctactgttgctgatttagaagagaaagctgcaagtatacatgtggacatcgtgaatcattatgcaacccaatgtgcaacagggcatgtacctaattctgtgaaagttctaatggaggattcacgaggtgcaacagggcatatagctgattctgtgaaagtacttatggagggtttaccaggaggtgcaacagcacgagtagctgatgttttcaatgttgatatggctaaatcacaagatgcatcagggcaagtaactgattacttggaggttgttgaagaggaaactccagaagatgcatcaggacaagtagctgatatcttggacgttgttgaagaggaacctccagaagatgcatcaggacaagtagctgatatcttggagcttgttgaagaggaaacttcagaagatgcatcaggacaagtagctagtatcttggaggttgttgaagaggaaactccagaagcacctggtaaagacctttgtaatggtggcattcctgggtctggactacaaaacaaaatgcacaatgctcaagatggtggcacggctcaaggcagcgatatgtgcaatggcggaaatacctcaaggcgtctcaatgatcgcaagagtgttatcgttatcgactcagacagcgatgaagacgaggatcctcacccagagcaacatgaaccagaacgtgctgctcctcgggcagccatggacgtggtcatggctcccactcatggtgctccggtagccatgaatgggactagtgctcccactcttccttgtgctaagagaggcaagaacgggactaccgcgcctaaaggccgtgttccggctatcgctgcacttcacgcactgcaatccatgaatgcgccaggtgagcatgaatacatatggaattacgcggatcctcaggggaaagtgcaagggccattcacaatggagcatatgcggaactggcaccggaatcgtttcttccctccggacttcagggtgtggagattaggccagacacagaatgattccgtcctgctaacagaggccatgggcctgaaattttcttcttga

SEQ ID NO: 12655 - DNA, 2275 bp, Oryza sativa
  Clone ID: TFbOSC401826j.C1.o1.fg
atggggaggaggagcaagcagaaggtggaggatatggccgaggagctctgcttcgtctgcaaggacggcggcgacatccgcgtttgcgacttcaagaactgcctcaagggttatcatccacactgtgtggggaaggaggaaagcttccttgattctgccgaacagttcatttgtgaattgcacaaatgtgttagctgcaaaaggaattcagaatatcattgtttgtgttgtccaagttcctctgtatgcggtgaatgccttggaaaagttgaatttgcacaatttaggaagcagagccagaccaaaggattatgcaataactgtttaaagttggcattgtttgttgagaagaactctgaagctaattctgatggggaaacagttgaattcagatatacggagaactatcttgttctgtttaaagactactgggaaactattaaagacaatgaaggcttggcattgattgatttgcagcaagccaatatttgtcttagaacaagcttaagctgtaaacaaggaagggattcagagaaacccccagatgaagattacagggcagataagaattcattgagtgttaatgatggcgctgaacaaccattcccggttgatgtaaaggtccaaccaagtgaagcaaaaatgtcactgaagagaaagaagtcaaacaagaaaacatatgtcggttggggttcaaaagagctaattgaattcctgtcatgtattggcaaggatacaactaaacctcttgatgaatttatacttactggagttgttaaggagtacatccagcagaagaatctattcaaggacaggaaaagaaaatctgtcatttgtgatgataagcttcattctttgttcaggaaaagaaaagtgaagtcaaatatgattcttaacttgctggaaatacatcttgcggcaaatgctgcttcagaggatgattttctcgatgattctgaggatgatgaaggccgaattatgagaaaaaggccttgtaatactttaaaggcggcagagacttctgagagggatccaaagagaaacaagaaatgctttgcagctcttaatcacaataacttaaagttaatttatttgagaagaactctaattatgaatcttatgggccaagacacatttgaacagaaagttgttggaagtttggttagagtcaagaatgatgacaatcattatagttatcagatgcctaaaaaacactaccagcttggcctagtaacaggcattaggaaatctccacaagaatacaagataaaggacaaacgtacagatattcttttatgtgtttccaatctgtgggatgacatcaagatctccatgttgtctgaagaggacatagaggaggacgagtgtaatgatctccttctgttggctaaaaaaggactcttcaaaagacctactgttgctgatttagaagagaaagctgcaagtatacatgtggacatcgtgaatcattatgcaacccaatgtgcaacagggcatgtacctaattctgtgaaagttctaatggaggattcacgaggtgcaacagggcatatagctgattctgtgaaagtacttatggagggtttaccaggaggtgcaacagcacgagtagctgatgttttcaatgttgatatggctaaatcacaagatgcatcagggcaagtaactgattacttggaggttgttgaagaggaaactccagaagatgcatcaggacaagtagctgatatcttggacgttgttgaagaggaacctccagaagatgcatcaggacaagtagctgatatcttggagcttgttgaagaggaaacttcagaagatgcatcaggacaagtagctagtatcttggaggttgttgaagaggaaactccagaagcacctggtaaagacctttgtaatggtggcattcctgggtctggactacaaaacaaaatgcacaatgctcaagatggtggcacggctcaaggcagcgatatgtgcaatggcggaaatacctcaaggcgtctcaatgatcgcaagagtgttatcgttatcgactcagacagcgatgaagacgaggatcctcacccagagcaacatgaaccagaacgtgctgctcctcgggcagccatggacgtggtcatggctcccactcatggtgctccggtagccatgaatgggactagtgctcccactcttccttgtgctaagagaggcaagaacgggactaccgcgcctaaaggccgtgttccggctatcgctgcacttcacgcactgcaatccatgaatgcgccag

SEQ ID NO: 12656 - DNA, 4692 bp, Oryza sativa
  Clone ID: TFbOSC422386j.C1.o2.fg
atgagggcgccgcaggagcgcaccgtcagggatctctacgatcgcacgcgacacaaggatctcgcgctccccgaggaatcagtggaggggcgtggcagtggacgacgggtggaggggccggggcatcgggaagtggtcgccaagatggagatgcttggaggtgattctgatcccacaatgctgtctacaataagggacaagcttacagcaagaaaaagaccagtaccactcgacagtcctaatgtgaagacagaatctggcacttgtaatgtctgttgtgctccttgctcctcgtgcctacaccgaaatattgcactcacggattcaaatatggactgtggatcatctcaaacatgctttgcaaggtcagaaacaaaaaacagttcgtttgttcgtgttgataaagggctccgtaccaaggctaaggggggagaaaatgacgatgaattcagtgctacttcaagccctgcttcctattctgaaaatggtgaaaataaagtcatcgcaagatcatctgttgcagcagattccgaggttgacaagccagcaaaacgtagaaggctagtaaatcacggttctagatcacctatagtagaatgccatgatgatagcaactcatgtgttactggagtatcagcagcaagcaagcttctgttagacaagaaaaaggataaactatctacatcagcatcaagtcgtgaccttactgttaactataaggacaatggcattaacagactaagaaactactgcgccgaagaatctacaggaaagaagagatctgatgttcatgccatgcaccgaagttcatctgatagatcattgcctgccgagtctccttttgcaaccaagaggttgctgcgtacccaatcctctctcagtgcatcacatggattatctcctaagagaccaacacatgaatttgggaatgcacaaaataatttagctcaccaaccttgtgagaaagcttcttcaaacaagaccgtagagcgttcactgggaggaaaatcagatccttctgtgcttggtggtgagaggcacagcatgatgactagttgtggtaccagtaatagggataaaatcaaggctggatctttaacaaagaatctggaaaatggcacctcatgctcaagaaatggaagtctagaacatgctgacatccaatctaatgatgctgtcaataggaatgacaatgataaacaagaacgtaatcaaggttgttcaatggatacaggtagtggtagaaagttgaatacacagaatgatgtgatgacggactctgggaattcagagggcttaatagatgttaatgtttgtgatatatgtggagatgttggaagggaatatcttctggctacatgcactaggtgccttgaaggggcagagcatacttattgcatgcgagtgaagttagagaaagttccagatggtgaatggttatgcgaagaatgctgtcttaaagaagatgaaaaccaaacaagaagcaacggtggcacatcaaggaataaggttttggacgggaagaaccaaaattcagaaagtacaaacaactctaagacattgaaggttgttgtgactgatttggacagtcaacaaatcacttgtggcactccagtaaatgatcccttggctggtagcaatcaaaagttgcatcttgcgtcatctgatctggaagcacggcaagtgaagtgtgccaccccaactgctgaaagactggatgtgaagaacaaaaattcaggaattatgggaaatcgcaagaagttgcaagttgttacatctagcttggaagcacgacaatcctcttgtaggacaccaacgtctggaagcttggataagaagaatcaaagcttagacaagaggagtcaaagttcagaagtgttgttaaaacgtaagaagttgcgagttgccactgatatggaatcacctctatcaaatgatggtgtacggagtccacctaaatcatgcaagagatatgcagaaaatactttatcctctactcccaggctcctgaaggcggacagccctaggaatcatgatgtgttctccagggagaactcatttaaaagctctaacaaaggaagtataaagtcgcctgataatgctccaatgaggtctcaagcagttaatagttccgtgaccttacctcggtcatattccttggggaacttggcaaatgttaaaacaccaggtccttcaccacgaggccttttatcaaagcaaccatctttcaacaactccagtaatgaaccaaaggtcaagcaattagctgaacctgtgttgagcaagttgaagccttcaaaacattcaccaagagatcctagagagtccatccggaaagttatgaaatctgggcctcttaagcatgaggcttcaatttgcaaaggctcaagttcatcaaagcaaaagcaatcagttcattcatctcaaaatgaacaaccgagaatattgaagcccgtgaaaccaacaattttgttagaaaggggggcttcatttaatcttcaaaaaccaaacatttcttcatctccaaggcctgatagttcaataaaatcaggggatccaagaaatgaccaagacagcccgaggcctggaccaagcatacttaaaagtagcaaaaaaccaggaattgttgaaaataagcatagctccattttatctaaaagtgatgagcaagggattacttcaacaggagttgtttgttctaaagacacctgtgtggtgaaggcatcagatccactaatcccaatggataaaataaaaaatgatagcacagatggtgcatgtgaaagtccactaattttggtgaataacgataatgaaatgtcaactaaacctgaggtgctttccattccacgtgcttcaaagacttgtggatctgatttccaagatattgcgccaacaagttcctcagaagatttgcctccagaagaggtacagtatgaacagaaagttgtggaaagtgatgggaacatctcctgtaaaagtgcagcggcgattcaggcttccgaagaccttttgccggagagcccacaaggctgtctagtggcacaaaatccgtacagccctgacactaaatcgaatgacctgaacttaaagcagcaagctttggttgatcaatcttctactgttggaagttctttgggggctttagttattccagagcagtcttacatctggcaaggtacctttgaggtttcaagacctggaagctctcctgaaatgtacgatgggtttcaggctcacttatctacctgtgcatcgctgaaagtacttgaaatagtgaaacaattacctcagagaattcagttggtagaagttccacggcattcctcatggccactgcaatttaaggaagtaaagccgaatgaagataacattgctctttatttctttgctaaagatgttgaaagttatgaaagagcatatgggaaactgttggaaaacatgcttgctggagatttgtccctcacagcaaatatttgtggcattgaacttctcatttttacgtctgataagctgcctgagaggactcaacggtggaatggcttacttttcttttggggtgtcctttatgccagaaaggcaagtagttcaactgagctgcttgtcaaagggatgaatcatagtccattagaacaaattaatggacctgttaatcaacttgtctgttcccctaagatgcctcagtctttgggcatagatttgaatgagtgccctgttgatgaattgtatgatccagctgtatcagttcaaacggagatggagaatcgtggtgcatctgtaaaccatgagactttgttgaggtccaaccatgaggctgaaaggctgaatttatgtgaaatacatttcccagaaactgcagggactgggaaaattttgttaggaactcctactgcagttccctatggagttcatgttcacacaagttcaaaacgtgaatgcctcaacattaaaccagaatatccaagtgatataataggtagcgaaggaacagcgggcagggacaacatggaggaggaagagagctttaccaagaatggagttccatgctttactaagcagcatacaggtgcaaccaccagatcagtatctgatgagatattggcaaatacacaggcacgcgtatcctttcaagaagtatccccacagcattctgtcaggccaaagctttctgatgatccaagtgattcagttttaaaggactttgttttgcctgattctagttccatctacaaacggcaaaagacctctgagggaaaatactctacttgcagttttggagatggtcaactgactagcaaatgcttgtccaagatacccttgccagctgatcagcatacttcattagatgatgtgcaatatattggtagggttccagcagatccctgttctccaactaaaccaatcttggatcatgtgatccatgtcctatcttcagatgatgaagactccccagaacctcgtaataatctgaataagacatcactgaaggaagaagagggcccttctcctctactgtcactgtccctttctatggcctcaaagaagcataatcttaccggttctgatacaggagatgatggaccgctgtctctgtctcttgggctccctggtgtagtgactagcaaccaggctcttgagatgaagcagtttctgccagagaaacctggcatgaacacttcattgcttctctag

SEQ ID NO: 12657 - DNA, 516 bp, Oryza sativa
  Clone ID: TFbOSC400235j.C1.o43.fg
atggctggcgccggcaccgtctgctccatgtgcggcgacgtcggcttccccgacaagctcttccagtgcgcgcgctgccgctaccgcttccagcactcatactgcacgaactactacggtgacgcggcgcccgccccggccggcgccgacatgtgcgactggtgcctgagcgacgtcgccgggaaggcgaggtactcgtcggcggccgggaagcagcagggcgccggaagccaggagtcatccacgacgacgtcgagctcctccgccggaaggggtggcggcggcaagcccggcgccggcgagcaggagagcgggcggcgggggaccaaggcggccggccgaagttttggggccggggaactgaggagcaactggccatcacgcacgttgcatgctgccaagccgagccatgtcgatgtaggggtcaacgaatcgtacccaaagacccaaagtggccgacaaagacatgctcctacacaaacctcaagctctgcacggcctcctctctacgagtag

SEQ ID NO: 12658 - DNA, 1401 bp, Oryza sativa
  Clone ID: TFbOSC400822j.C1.o33.fg
atggccggcgaggggagcggcggcgagggcggtgcgggcgccttcgaggacgaggcggagccgacggtcaccatcggggagtacatcgaggggatcgaggccgaggagctggaggcggatttggtgctgggcggggacgacggcaaggagtgcacctacggcggcggctacctcaagcgccaggccgtcttctcctgcctcacctgcgtgccagcgggtgtcgctggagtctgcaccgcctgcagcctcgcctgccacgacggccatgagctgggattagtgtcaatgtttatatgggtgagaaggatgagcgctacaagagttattttaggcgttgcattagcagttgccaaattatctattgccatcttctgtattaagtatctatatgactgggtgatgcgcacacaactgatgcttggatggttctttttgctaaaggtcgttgaactatggacaaagcgaaagtttcgttgtgattgtggcaactcaaagtttggaagtcatgtttgcaaactttgccctgagaaagatccagagaatccagtgaattcttataaccataacttcaaagggtcctattgcacatgtggcaggccttatcctgatccagaagctgaaaagcaagttgaaatgatacaatgctgtatttgtgaggattggttccacgaggatcatattggtcttaactccattgaagagataccacgagatgaggaaggggagccactctacgaggatttcatatgccccaaatgctcacctaagtgctatttcttgaaattatatccggatactatttgggcatctaataagcagagttctgcaccacaagctgagactaccaattcaactgttatgaatggaaattcaagccttggtgacatagagaaaagtgaaaatggtgctcttataaatcatttgaattgtgaaaagacctctgacaatgagaattgcccaaaagacagtgtagctccagaaaaggccagtctggatgacagttctgatggcaaatgtaagctaggaatgaacatttgttcaaatacaccatcagctgattcagagaaaaagatgccgttttttatgtcaaaaagctggagagaggttatctgtagatgtgaaacttgcaccgacttctatgcacaacaaggtgttgcgtaccttatagacaaggaagactctattgaggagtatgagaaggttgctaagcagaagagggaaaagaagttggagcagcaggaaggagttgaagcaaactttcttaattcactcgaccatgtacagaagattgagattttgagtggcatcaatgacatgaagaatgagcttcagtcttttctgagtatttcgcaaataaatggtgatacttcccatgtttcagtatcagggtttgagttctaa

SEQ ID NO: 12659 - DNA, 1920 bp, Oryza sativa
  Clone ID: TFbOSC17126j.C1.o1.fg
atgatcgcggccgggatccgcaagaagccgaggaagagggccaaaaaggcggcggccgctggcagcaaggtgaccgtcccggctgacgtgatcatcgtcgacgacgacgtcaaccagccgagctcgaacaccgacgcgcaaagcaacgccgacgacgatctgaagaaggcggccgtcgcttcccctgcggcgacgcggagcaagaccagatcaaagtgcaagaccagcagcaacagcgccgccgcctcgccgagcgccaggtccagcgccatcgccgccaggaagaagaacaacgccacagcgaccggcacgacggcgacaccaccaccaccggaggcgaagaagcacaccgtgctgacctggctgatagacaccggcttcctcaaggacaaagcgaaggtgttctacgtgccgggcgacgccggcgccgccgagaaggtcatctccggcatggtcaccaagacgggaatccgctgccgctgctgcaacaccgtcgtccccgtggctgtgttcgaaacccacgccaggtgcgagcggccagggcagccatgggagaagctgctgctcatgtccgggaagccgctgtcgaagtgcatgcaggaggcgtgggcgcaggagcgggtgaccgccatgcgcgcccgggagaaggccatggcgtcgctggagcaggagaaggagaagagctcgcaggccaagaggaagctcgcgaagacgaagaagatgcagctcctcgacggcgtcgtcgtcgtctccacctcttctcctcgtcatcaggtgaagaagaacggcggcggcaaggattgcagcgacgacgcctgcggcgtctgcgccgacggcggccagctgctctgctgcgacacctgcccctccaccttccatccagattgcctcgccatccagttcatgatcaaatcttggttactgtttgacagacagcaactgacaacaatttacggccagcaaccgtggctccagacggctcctggagctgccatttctgccgatcatcagtactgccgtcctttgcaaagccctgggttcgagatcggcgcatactgcagcgaaacctgcaaaaagatgtcctctcatctatcagatatgataggagtcatgaaccatactgaagatggcttttcttgggccctcctgaagattcagaaggatgagctagtcacttctgaggacatgcctgtcattcttgagagcaatgtgaagcttgcagtagctctgggtgtactcaatgaatgctttaatcctgtgcaagatcgaaggactaagatcgatatgctccaccaagctgtctacagtctaggatcagagttcaaacgagtaaactatgagggattctacaccatggttcttgagaaggatggagaaatcatttcagtagccttgctgaggttccatggcaggaaactggctgagatgcctttcgcaggcacgctgccagcttaccagaaacaaggaatgatgcgtcgccttgtcaaggctgttgaaaaggtgttggcgtcgttgcaagtggaaaatctagtgatcccggccgtcgctgatctagtggaaacctggaagagatccttctccttcaggccaatgcaggcagaggtcagggacgaagccaagaagctgagcttggtcgccatcaccgggacgacgctgctgcagaaacccatctctgctcatcagcagcaaccagttccatcccggaaaggtagcagcagcagcagaagcaagcgcgcgtctgctccggcgacggtcaccggcagcagcaaggaagaggaggagcagatgacgacgacggcggctcgcctgaccgacgacgagctggcattcctggagatggcacccttgtgcagcttcaccgacctgttggccggaggcgtctacccgacgggtctccagcttctccgcggcatgaagtga

SEQ ID NO: 12660 - DNA, 2694 bp, Oryza sativa
  Clone ID: TFbOSC401197j.C1.o46.fg
atgtcgtcgtcggcggcgccggcgaggaaagagaatggcaccgtcgccgcccccgccgcctcatccgccgccgccagcaacacgttccacgtgctcaactccggcagcgccgccgccgccgtcgcagccggacgtgcgtatgttcagtcgccgcgagcgacggcgctgcggtcgccgcaggtgcgagccatcaccaactacggcatgttcccgaccaccggcgcttcggcggcgaggacggccatggcggggcgaacgatcaatggtggcgcgtcgatgctgacgacgacgacgacgacgacgacgccaccgcacctgatccagcagctcatggtgttggctggctggaccacccggagtccgtggctccagaaccacgcgtccatgtcgccgcggggctcgccgtcgtcgttctcctccgggagattctccgacccccgtgggatgccgtcgacgttcgcttaccgaacacccggagctagtagcggccgcgttatcgacaacggcgccgtcgccggccgtggcaagcagatggccggaactagccgctcacttgagattatcgccgttgataccggcgccggaagcagcaagaacgcgtcgccggccggcggccatgcaaatgccggcgtggtggtgaaacgtttggcccctgtgctcgcgatgccgagtgccggagccgccggcaaagggaaggaggaggcggcggcggcggcggcggctccgtcgccaaatggccgcggccgtaagcgcgcgccgcccaaggtgagcaatgatccggcggcgggatccgacaagaagccgaggaagagggccaagaaggcggcggccgctggcagcaaggtgaccgtcccggctgacgtgatcatcgtcgacgacgacgtcaaccagccgagctcgaacaccgacgcgcaaagcaacgccgacgacgatctgaagaaggcggccgtcgcttcccctgcggcgacgcggagcaagaccagatcaaagtgcaagaccagcagcaacagcgccgccgcctcgccgagcgccaggtccagcgccatcgccgccaggaagaagaacaacgccacagcgaccggcacgacggcgacaccaccaccaccggaggcgaagaagcacaccgtgctgacctggctgatagacaccggcttcctcaaggacaaagcgaaggtgttctacgtgccgggcgacgccggcgccgccgagaaggtcatctccggcatggtcaccaagacgggaatccgctgccgctgctgcaacaccgtcgtccccgtggctgtgttcgaaacccacgccaggtgcgagcggccagggcagccatgggagaagctgctgctcatgtccgggaagccgctgtcgaagtgcatgcaggaggcgtgggcgcaggagcgggtgaccgccatgcgcgcccgggagaaggccatggcgtcgctggagcaggagaaggagaagagctcgcaggccaagaggaagctcgcgaagacgaagaagatgcagctcctcgacggcgtcgtcgtcgtctccacctcttctcctcgtcatcaggtgaagaagaacggcggcggcaaggattgcagcgacgacgcctgcggcgtctgcgccgacggcggccagctgctctgctgcgacacctgcccctccaccttccatccagattgcctcgccatccagttcatgatcaaatcttggttactgtttgacagacagcaactgacaacaatttacggccagcaaccgtggctccagacggctcctggagctgccatttctgccgatcatcagtactgccgtcctttgcaaagccctgggttcgagatcggcgcatactgcagcgaaacctgcaaaaagatgtcctctcatctatcagatatgataggagtcatgaaccatactgaagatggcttttcttgggccctcctgaagattcagaaggatgagctagtcacttctgaggacatgcctgtcattcttgagagcaatgtgaagcttgcagtagctctgggtgtactcaatgaatgctttaatcctgtgcaagatcgaaggactaagatcgatatgctccaccaagctgtctacagtctaggatcagagttcaaacgagtaaactatgagggattctacaccatggttcttgagaaggatggagaaatcatttcagtagccttgctgaggttccatggcaggaaactggctgagatgcctttcgcaggcacgctgccagcttaccagaaacaaggaatgatgcgtcgccttgtcaaggctgttgaaaaggtgttggcgtcgttgcaagtggaaaatctagtgatcccggccgtcgctgatctagtggaaacctggaagagatccttctccttcaggccaatgcaggcagaggtcagggacgaagccaagaagctgagcttggtcgccatcaccgggacgacgctgctgcagaaacccatctctgctcatcagcagcaaccagttccatcccggaaaggtagcagcagcagcagaagcaagcgcgcgtctgctccggcgacggtcaccggcagcagcaaggaagaggaggagcagatgacgacgacggcggctcgcctgaccgacgacgagctggcattcctggagatggcacccttgtgcagcttcaccgacctgttggccggaggcgtctacccgacgggtctccagcttctccgcggcatgaagtga

SEQ ID NO: 12661 - DNA, 3351 bp, Oryza sativa
  Clone ID: TFbOSC100733j.C1.o4.fg
atggaggcgagcgccggtctggtcgccggctcccacaaccgcaacgagctcgtcgtcatccgccgcgacggcgatcccgggccgaagccgctccggcagcagaacgggcaggtgtgccagatttgcggcgacgacgtggggctcaaccccgacggcgagccgttcgtggcgtgcaacgagtgcgccttcccggtgtgccgcgactgctacgagtacgagcgccgcgagggcacgcagaactgcccccagtgcaagacccgcttcaagcgcctcaggggcaagtcacacccgcaatgccgaattggttgcgctcgtgtgcccggggacgaggaggaggacggtgtggatgacctggagaacgagttcaactggagggacaggaatgactcgcagtacgtcgcggagtcgatgctccacgcccatatgagctatggccgtggtggggtcgacgtcaacggtgttccgcagccattccagcccaaccccaatgttcccctccttaccgatgggcagatggttgatgacatcccgccggagcagcatgcgcttgtgccatcttttatgggcggcgggggaaagaggatccacccgcttccttatgcggatcccaatctacctgaatcagctaaaggtagttgtgctacagttcaaccaagatctatggacccatccaaggatcttgctgcatacggttatggtagtgttgcgtggaaggagaggatggagagctggaagcagaagcaggagaggctgcaccagatgagaaatgatggtggtggtaaagactgggatggcgatggtgatgatggagatctaccactgattttctcccctgtagaattgctttatcactttggctggacaaaaatggatgaagctaggcagccattgtccagaaaagtcccaattccttcaagtcagattaacccctatagaatggttatcataattcggctggtggttttggggtttttcttccactatcgagtgatgcatccagtgcctgatgcttttgccttatggctgatatctgtaatttgtgaaatctggtttgccatgtcttggattcttgatcaattccccaagtggtttcctatcgagagagagacttaccttgatcgattgacattgaggtttgacaaggaaggccaaacatctcaacttgcaccaatcgatttctttgtcagtactgttgatcccttgaaggaacctcctttggtcacagcaaacactgttctatctatcctcgcggtagattatccagttgataaggtttcatgctatgtctctgatgatggtgctgcaatgctgacatttgaagcattatccgaaacatctgaatttgcaaagaaatgggttcctttctgcaaaaagtacagtattgaaccacgtgctccagagtggtacttccaacagaagatagactacctgaaggataaggtggcaccatactttgttagggagaggagagcaatgaagagagagtatgaggaattcaaggtgagaatcaatgcattggttgctaaagctcagaaagttcccgaggaaggttggacaatgcaagatggaactccctggcctggaaacaatgttcgcgatcaccctggaatgattcaggtcttccttggccaaagtggcggccatgacatcgaaggtaatgagctacctcgattggtgtatgtttcaagagaaaaaaggccaggctataaccatcacaagaaggctggtgccatgaacgcattggtccgagtatctgctgtactaactaatgctccatacatgctcaacttggattgtgatcattacatcaacaatagcaaggctataaaggaagcaatgtgttttatgatggaccctttggttggaaagaaggtttgttatgtgcaattccctcaaaggtttgatgggattgatcgtcatgatcgatacgccaacaggaacgtggtcttcttcgatatcaacatgaaaggcttggatggtatccaaggccccatctatgttggtactggatgtgtctttagaaggcaggcattgtatggttatgatgcccccaaaacgaagaagcctccgtcgaggacctgcaactgctggcctaaatggaagagcaagaagaaaactacgaaacctaaaacagagaagaagaaaagatctttcttcaagagagcagaaaatcaatcccctgcatatgcacttggtgaaattgaggagggtgctccaggagctgaaaatgaaaaggctggtattgtaaatcaacagaagctggaaaagaaatttggccaatcttctgtttttgtcgcatccacacttcttgagaatggtggaaccttgaaaagtgcgagtccagcatctcttctaaaggaagcaattcatgtcataagctgtgggtacgaagataagacagactgggggaaagagattggctggatctacggatcagttacagaagatattctaactggttttaagatgcactgccatggttggcggtcaatttactgcatacctaaactacctgcattcaaaggttctgcaccactcaatctttctgatcgtcttcaccaagttcttcggtgggctcttgggtctgttgaaatattcttcagcaaccattgccctctttggtatggatatggtggtggactaaaatgtttggaaagattttcctacattaattccatcgtgtatccttttacatccattccactcttggcttactgtacattgccagccatctgtttgctaactgggaagtttatcactccagagcttacgaatgttgccagtctctggttcatgtcactttttatctgcatttttgctactggcatcctggaaatgagatggagtggtgttggcattgatgattggtggagaaatgaacaattttgggtcattggaggggtctcttcgcacctctttgctttgttccagggacttttgaaggtcatagctggtatagatacgagtttcactgtgacatcaaaaggtggggacgatgaagagttctcagagctatatacattcaaatggactaccttgctgatacctccaaccactctactcttattgaacttcattggggttgttgctggtgtttcgaatgcaatcaataacgggtatgaatcatggggacccctcttcgggaagctcttctttgcattttgggtgatcgtccatctttacccattcctcaaaggtttggttggaaggcaaaacaggacgccaacaattgttattgtctggtccattcttctggcttcaatcttctcactcctctgggtccggattgatcctttcttagcaaagaatgatggtccacttctggaagagtgtggtttggattgcaactag

SEQ ID NO: 12662 - DNA, 3772 bp, Oryza sativa
  Clone ID: TFbOSC403261j.C1.o1.fg
gattggaacatcttcagatgtggagttttgtgcaagatattacaatcattgtgatgttgtcaaagtcgtccaaatacttgcctcttcagatgcatatacagatatatgtaggagaatgacagagtactggagtcatctacttgatatatttcagaatgagagatcaaaaataagtaaagaggttggtagaagccttatgtcacagtccaatattctatcgaccgctactccagtgaaagcaaataatggaagtgttcaggcaactttgaaagatggtcaggacagtaagatggcagtgctttcccagacaaatgcacatcaggttatggataatcaatttacgttgtgctcagctaacaataatgaagcttttaggcaaactccattagctaagacctatgtagataatgcatacagaaatggagcttttgggcccagtgggacatcctcaatttctcaccagagcatgtctatggtgacagttatgcctaacagaacacaagcacagccagcacatggattgattcgtccagacttgtcgtgtggttcagtaattggtaatggtatgtctagagaaaatatcaggagctctatttctgctagggcagacttgatcagcccaccttataaaagcaagccccctgttcagctaattactgaaaatatgagtggtggcaagccagctaaattctcatcttttagaccacaggcttacatgaatctatacaatcacgggaatgttgcagcatctgctgctgccaatctagctgttcttaaatctgatgaaggtaaggctccaacttcccatctgacaacaaaccaaaggaagaaactggctgctgactgtgctctacaagtgaaagcattttcctcagcagccttacaatttgtttggccaagtactgaaaagaaggttatggaagtcccaagagatagatgtggttggtgccttgcctgtcaaagttcagcaggtggaactaaaaaagcttgttttcttaacatggccactgcaaatgcttctaaaggatctgctcgaattcttagtggcatgcgtttaatcaagaattctgatagccatttccccagcattgttacttatttaagccacatggaggaaagtttgcgtggccttttagttggttcactacaagatgtgcagcggagacaacagtggtataatcaactaaaagatgcttccaactgtggaaatataatacccctcttgcttgaattggaaagtaatattcgtggtgtagcattttctactagctggctgaagctaatagatgactggcctgtggaatctcctagtgcatctgctggtgcatcccgtcctgcagcataccaaaaacgtggaactggtggaaggcggggcagaaaacgttcaatggcatctgaatctgctcctgttactgatgatgacaacagctggaaagaagtgaattggtggagtggaggaaatgtttcaaagcgtatcttacagaggggggctctaccaattttgaccattagaaaagctgctcgtcaaggtggaaaaaaaaggatgttcagtgtgtcttatcatgaaggctccaattttccaaggcggactcggcaacttgcttggagggcatgtgttggattaagccagagttcatctcaacttgctctccaggttagatatcttgattcccacataagatggaaggagttcatccctccagatcaaattccttcagaagggaaaagtgtagattctgactattctgttctcagaaacgcagttgtttgtgataaaaaaatagttgacaataagataagatatgcacttaagtttcccaaccagaagcatcttcctgtccgtgtaacaaagaatattttggaagcagaagataatcaggatggggatgggaaattttggttttctgaaaaccatatcccactatacttgctacgagaatttgagcagaaagctggggttagctccttgcctactccaggaatgttagattctaactgttttgccaatttctaccaaaggcgagtaaaatcatcaattggagatgttttcttctatctgcttcacaagggtgatgtatatccttgcacctcatgcaagaaggatgtttccttcagggatatcataaaatgcagctcttgtcaaggtaattgtcataaagagtgcacattaaggtctgttggtagcaaagggggcaatgctgcttccagtttaacatgcaagttgtgccttcagaagcgtagtcttatgcttacaaattacaatacaaacgcaagtttcatcctacctcaacagaagagtaatgtccatcacgcagtggcagctcccaaaataatctttaaggttggttcttcccattccgctgaaccagccacaaaggttgaagctccgccaatcgtgaaggtagaagcccagccagtggtcaagaaggaaacctggccagttgtgaagatggaaacccagccaactgcaaatgtagaagcacagccaactgcaaaagtggaagcctttccaatttcgaatttggcaactcagaataatgcaggggcgcaagtccagcctaagacaaaatctaaaaaacccaagccagaaaaaccgagaaaatccaagaagactgaagagatcaaatactttggtctcgtgtggaagaaaagcactaatgacaaaaataataatgaaaattctggagaagtgttcagggcgaatgatgttatcctaaaaggcaaggatggtgtaggttcatcaataaaacctacttgctgtctttgtaataagccttattgcccagatttcctgtatgtccgctgcgagaggtgcaaaaagtggtttcatggcgatgccttgcaacttgaggaagaaaagatatttgaattggtttcataccgatgttgcagatgccgaaggcgagccataccaaaatgtcctcattcagatgattataagaagcctgaaccagaatacagtgagcaaacagtcgctacgtcatcacagtcaactatgctttctagtgaggagaattttgctgtagcagatcaagatccactgcttgcttcatatggcagagttgaaccgtttggagcacaaacaatggatgctgatttatcgatgaacatgatgagctttaacccaggaaatcagaaactatcagtaagaaggggacaaaacaaaaattgtgaatatgttgaccaatccagtatacatgtggatgactattatatccagaatcaacctcaagggaatgcaaacatcaatttcagtcactcgaatgaattctctttgtcagaggctgatggtgtggatgcttcagagctgttgggatgggatttttctcaaggaaataccagtgctgccccttctgatttcgcagctaattgcccgtggaatgacatcagctgtggcagcgttgctggtgatgaatatgaaccacagacttatttctcattcaccgaactacttgaagctgatgatacacagttcgataatacatttgggatgtctaatagtgtgcaagatgatggtgaccaacaaggaattggttttgatgaaatggctttcatgatggaagatggggcctcaaacatgcctttcccagctattgactccgcctctgacgaggtagcatgtgacaggtgcaagaatcctcagccgccacctgatctcaaatgcgcagtatgtggactgcagatgcaccgtcattgctcgccttgggaggatggtgaacagccatcagatagtgccgattggagttgtggtgcctgccgggagtggcgatga

SEQ ID NO: 12663 - DNA, 3279 bp, Oryza sativa
  Clone ID: TFbOSC404183j.C1.o2.fg
atggaggccagcgccgggctggtcgccggctcccacaaccggaacgagctcgtcgtcatccgccgcgacggggagcccgggccgaagccggtgaagcatacgaatgggcaggtgtgccagatttgcggcgacgacgtcggcctcacccccgacggcgagcccttcgtcgcctgcaacgagtgcgccttccccgtctgccgcgactgctacgagtacgagcgccgcgagggcacgcagaactgcccccagtgcaagacccgcttcaaacgcctcaagggttgcgcccgcgtccccggcgatgaggaggaggaggacgtcgacgacctggagaacgagttcaactggagggacaagaccgactcgcagtatgtcgccgagtccatgctccacggccacatgagctatggccgcggcggtgacctcgacggcgtgccgcagcatttccagccaatccccaatgttcccctcctcaccaacggggagatggctgatgacatcccgccggagcagcacgcccttgtgccgtctttcatgggcggcggaggaaagaggatccaccctcttccttatgcggatccaaaccttcctgtgcaaccaagatccatggacccgtccaaggatctcgccgcgtatgggtatgggagtgtcgcgtggaaagaaagaatggaaagctggaagcagaagcaggagaggttacaccagatgaggaatgatggcggtggtaaagattgggacggcgatggcgatgatgcagatctaccactaatggatgaagctagacagccattgtccagaaagattccgatttcttcaagcctggtcaatccttataggatgattatcataattcggctggtggttctgggcttcttcttccactatcgagtgatgcatccagtgcctgatgcatttgcattatggctcatatccgtcatctgtgaaatctggttcgccatgtcttggattcttgatcagttcccaaagtggtttcctattgagagggaaacttaccttgaccggttgacattgaggtttgacaaggaaggccagcaatctcaactcgccccagttgatttttttgtcagtacggttgatcccatgaaggagcctcccttggtcacagcaaatactgttctgtctatccttgcggtagattatccggtcgacaaggtctcttgctatgtttctgatgatggggctgccatgctgacatttgaagcactgtctgaaacatctgaatttgcaaagaagtgggttcctttctgcaaaaggtacagtctcgagcctcgtgccccagaatggtacttccaacagaagatagactacctgaaagataaggtggcaccaaactttgtcagggagaggagagcaatgaagagggaatatgaggaattcaaggtcagaatcaatgcattggttgctaaagcccagaaagttcctgaggaaggatggacaatgcaggatggaactccctggcctggaaacaacgttcgtgatcatcctggaatgattcaggtcttccttggccaaagtggtggccatgatgtggaaggaaatgaactgcctcgattggtttatgtttcaagagaaaaacggccaggctataaccatcataagaaggctggtgctatgaacgcattggtccgagtctccgctgtactaactaatgctccatatatgttgaacttggattgtgatcactacatcaacaacagcaaggctataaaggaagcaatgtgttttatgatggatcccttggtaggaaagaaagtttgttatgtgcagttcccacaaagattcgatggcattgaccgtcatgatcgatatgctaataggaatgtcgtctttttcgatatcaacatgaaaggtttggatggtattcaaggccccatctatgtcggtactggatgtgtctttagaagacaggcgctgtatggttatgatgcccccaaatcaaagaaaccaccatcaaggacttgcaactgctggccaaagtggtgcatttgctgttgctgctttggtaacaggacaaacaagaagaagactgctaaacctaaaacagagaagaaaaagaggttgtttttcaagagagcagagaatcagtcgcctgcatatgctcttggtgagattgacgaaggtgctccaggagctgaaaatgaaaaggctggtattgtaaatcaacagaagttagaaaagaaatttggtcaatcttccgtttttgttgcgtccacacttcttgagaatggtggaaccctgaagagtgcaagcccagcatcactcttaaaggaagctatacatgtcatcagttgtggttacgaggacaagacagactggggaaaagagattggctggatctacggatccgttacagaggatattcttactgggtttaagatgcactgccatggttggcggtcgatttactgcatacctaagcgggctgcattcaaaggttctgcacctctcaatctttctgaccgtcttcaccaggttcttcggtgggcgcttggatctattgaaattttcttcagcaaccattgccctctttggtatggctatggaggtggattgaaatgtttggaaagattttcctacattaattccatcgtgtatccttggacatccattccactattggcttactgtacattgcctgccatctgtttgctgacaggaaaatttatcactccagagcttactaatatcgccagcctttggttcatgtcactatttatctgcatttttgctacgggcattctggaaatgagatggagtggtgtaggcatcgatgattggtggaggaacgagcagttttgggtcattggaggtgtctcttcacatctctttgctgtgttccaaggacttctcaaggtcatagctggtatcgatacaagcttcactgtgacatcaaagggtggagatgatgaagagttctcagagctgtataccttcaaatggacaaccttgttaataccccctaccactttgctcctattgaacttcatcggggtagtggctggcgtttccaacgcaatcaataacggatatgaatcatgggggccgctctttgggaagctgttctttgcattttgggtgattgtccatctgtatccgttcttgaagggtttggttggaaggcaaaacaggacaccaacaattgtcattgtctggtccattctgctggcttcaatcttctcgctcctctgggtccggattgatcctttcctggcaaagaatgacggccctcttctggaggagtgtggtttggattgcaactag

SEQ ID NO: 12664 - DNA, 4725 bp, Oryza sativa
  Clone ID: TFbOSC400188j.C1.o8.fg
atggggaggaggaaatcgcggccggcccgggcggtaggcctaggccccggcgctgccgctgccgcggagcccgacgcgccgagccctagcggcagcggcggcgcctccaaatcgaggcgcgcggcgaagggcgaggctaggaggagagaggatgtgtgcttcgaggtggatgatagcacgtggtgtttgagcgacggcgaccgccgggacctcgcggagttggtcatgcgcgacgtgaggatctccggcgagggagagggggcgttggacgtagcggctctgcacgaggcagagagggagaagaggtgctcgttgcgcctgcgggtgcgcgacgcgccggaggagggtttccggcttggccagtggcctgtggtaccttcagattgtgtgatcctggagtatgccatcgccggtatggttttctctggatgttttgatggtcccgatgaaggtgtatcaggcctcgcccatttggttagattgagattcgtgacattgcgtgttcatgcctttgctgtatctcggtctgctgattccgtgtcggttgcatcatttagagttagattggggttgatggagcaggcttttgctacatgcgaatcattgttggaggtgacaaggcatccgtggaggaagagtttcatgaatatgatggcttgggttcgtcctgaggtcatgacctcggctgcaatatatgggatggatggtcttgcccggcctataaatggaggtgctaatggtgattttaccccaaagaaggattctcagtttgatcttgctgctttctacgaagccgttaagccctcaatggaggctggactgttggaagaggagcttcccgatttgcttcctcatctcagaacctatcaacttcgtgcagcgaattggatggttcaacgtgaaaagggaaacacaatgatttcatcaccaaatcaacattatgttcattctgcaccttattgtgttcccatagattttatgcacaagaaatctaggatgttctacaatccattcaatggaaatgtctcgatgcatccagaaccttctccaccttatgtctctgggggcattttggctgatgaaatgggcttagggaaaactgttgagcttttggcttgcatttttgcacatcgcaggccatattcagcagactgttctgtctcttcgaatataaaaggagcagatcagataaagaggcataaaagagaaagagttgagtgcatttgtggagctgcaagtgtaacctctgcataccaggggatatggatccagtgtgacatatgtgacgcttggcaacacgctagttgtgttggttactcaccaaaggaggaaatgcatgttgatgatgatgatggtgatgaagcatcaaacaatgaaaaaggaaccctaaagtcaaaaaatagaaggaagaagaaagacagacacacaagaccaggatctctgaaagtttgcatttatgaaggtgcaaagaacacggacttaacatctacccaaaaaagtgatatggctgagataagcacagctgacattgttttgacaacttatgatgtcctgaaagaagatctatcacatgattctgatcggcatgatggtgatcgccgttttttgagatatcaaaagaggtaccctgtcactccaactgtcctaacaagggtccactggtggcggctatgtttggatgaagctcagatggtagagtccagcaaaacttctgtgactgagatggcaatgaggctaaatgctcaacaccgctggtgtatcacgggaactccaatacaacgccggcttgatgatctttttgggcttcttcgctttctcaaaactcatccttttgacacatatagatggtgggtggatattattagggacccatatgagaagggggacatggtagctatgaattatgcacacaagttcttcaaggaaatcatgtggcgctcctctaaaattcatgtttcacgggagttacagctgcctccacaagaagagtgcttttcgtggctcatcttttcatcaattgaagaatatttctatcagaagcagcatgccacttgcatggaccatgcacatgaaattataagacgtatcagagatgatgccaacaaaagcgagccaatatcagactcgaatgttgtatcaaatttgtacctctccaatgatgacattgccaaactcctagtcccactgctcaaacttcgacaagcttgttgccacccgcaagtggggagtttcggtctctgctccctgcagcgtactcctttatcaatgggtgaaattttacaggttcttattgggaaagcaaaagtcgaaggggaggaagagctcaggaaaattgttgtcgccctgaatggtcttgctggacttgctgtcattgaacaaaataatcaagaggccatctctctgtataaagaagcactagctttggcctgtgaaaattttgatgatttccgtgttgaccctttgttgaatcttcatatcaaccacaatcttgcggagctgctcagagctagttctgagtatttgcaagaatgcccactaaaagaacaaacctctgaagtccatggtgcgcgaaaaagaaaggaaactagtcccgctgactcagaaacatccaaggaagacaaaaacatcaatacacaagtatgtggaagtgaagagatggatgtagagaatgattctggatgccacacgtcatctgtctcaactctcagtatggagttacagaatcaaaatatgaattggtggctgtatgctttggattgcattgaacagaacaaggattctgctgatgagctcattaggaagattgatatttcttccaataaaagcaccactggcttgggttcaacagggatgtcttccagggttcaaaccattgctgggttgaagtataccattcaaactggtattgattctctgcaaagttcaaggcaacaagtgatggacagacttttagaacttgacaaaacaatggatagcccaaaggatgaagacattgagtgtcagcgatattgtccaaattgctatgatggtaatggttctttatgcatccaatgtgaattggatgatctgtttcaggggtatgaagcacgtctgtttcttgttaagaaatcaaataatgattctgttattgcctcagtagaggaagcaagggacttgcaaaggcgaaaatatgagttgaatcagttttttcgtaatactaaaactaacgagggatctgaacctggtgacgacaataagaatccaagatctgctcgagaaggttttctggtctacaggcatccttctcgaattgagacttccttaagggttattctaacccactcaaagacaataatgggagagcaatctgctaaaattgctaaaaagaatttgctgctttttgaggctatgcgcaaggagttctctcaagcaaggaatctatcaatagcacagacccagttactgcgtgcccatgatgagatcaagatgtctctctcacgcctgcagctcaaggagaaagatgatgaacccagtgcagtcaatattgttactagagaagagcttataccatacaatgtgcagtttacaagtgaaaaattcttgtctttgtcatctttagctcgtataagaggccaactcagatacttaaagggattggtgctatccaacaagaaaccactgggcaagcatggtgaatcactgcccgagtcaggcaacagtgttgctatagcaacttccatccctgccacagggcaaactgcttctgatattatcaatgaaccatgcccaatttgtcaggagaagatctttgaccagaaaatggttttccaatgtggccatttcgtttgctgcaagtgctgtctttacatgacagaacaagctgcagcccactttgggaggagcaaaaaatggattatgtgccctacttgccgtcaacgtacagatcttgaaaatgttgcttttgtagttgaaaaccagagaggaaatgctgatagagaaattgaggatttggcagaaagcgctatttctgtccaaggttcatatggaacaaagattgaagctgtgacaagaaggattttgaggatcacttcaactgacggagcagccaaaatacttgttttttcaagctggaatgatgttcttgatgtgctagagcactcccttgccgctaacaatatctcttatgttcggatgaaaggaggaagaaaatcgcaaacagcgcttgcccagttcaaaggtctggcaagtagtataagtggagagaaagcaaagaagtcattttccaagatgcaacctgctcaagtattgctaatgcttatccagcatggtgcaaatggtcttaatcttttggaagcacaacatgtaatattagtggagccgttgttaaaccctgcagctgaggcgcaagctatcagcaggatccatagagttgggcaagacaaaagcacgtttatccaccgttttattgtgaagaatactattgaagagagcatctacaaattaaacaggggcagagctgtttgctccacgatacaccgtaaatcaaaaaatttcaaagatgagcttgttttgacactgaaggatattgagtctttatttcctgtggcaacacttgatcagccttcagaacaggagaataagaattacggtggggccggtgggcatatgagaagtttacctccatctgttgcagctggcttagctgctgaaaggaggttattggagcaacatgacaaccagcattaa

SEQ ID NO: 12665 - DNA, 286 bp, Oryza sativa
  Clone ID: TFbOSC401336j.C1.o5.fg
atggaggcgagcgcggggctggtggcggggtcgcacaaccggaacgagctggtggtgatccggagggatggaggaggagggggaggggttggggggaggagggcggcggaggcgaaggcggcgtgccagatatgcggcgacgacgtcggggaagggcccgacggggagccgttcgtggcgtgcaacgagtgcgccttccccgtctgccgcaactgctacgactacgagcgccgcgagggctcgcaggcttgcccccagtgcaagacccgcttcaagcgcctcaagg

SEQ ID NO: 12666 - DNA, 3570 bp, Oryza sativa
  Clone ID: TFbOSC900180j.C1.o3.fg
atggcggcgaacgcggggatggtggcgggatcccgcaaccggaacgagttcgtcatgatccgccccgacggcgacgcgccaccgccggctaagccagggaagagtgtgaatggtcaggtctgccagatttgtggcgacactgttggcgtctcggccaccggcgacgtctttgttgcctgcaatgagtgcgccttcccggtctgccgcccttgctacgagtacgagcgcaaggaagggaaccagtgctgcccccagtgcaagactagatacaagaggcacaaaggtagccctagagttcagggcgatgaggaggaggaagatgttgatgacctggacaatgaattcaattataagcatggcaatggcaaaggtccagagtggcagatacagagacagggggaagatgttgacctgtcttcatcttctcgccacgaacaacatcggattccccgtctgacaagtgggcaacagatctcaggagagatccctgatgcttcccccgatcgccattctatccgcagcggaacatcaagctatgttgatccaagtgttccagttcctgtgaggattgtggacccctccaaggacttgaattcctatgggattaacagtgttgactggcaagaaagagttgccagctggaggaacaagcaggacaaaaatatgatgcaggtagctaataaatatccagaggcaagagggggagacatggaagggactggttcaaatggtgaagatatgcaaatggttgatgatgcacgtctacctctgagccgcatagtgcctatcccttcaaaccagctcaacctttaccggattgttatcattctccgtcttatcatcctgatgttcttcttccaatatcgtgtcactcatccagtgcgggatgcttatggattgtggctagtatctgttatctgtgaaatttggtttgccttatcctggctcctagatcaattcccaaagtggtacccgataaaccgtgaaacataccttgacaggcttgcattgagatatgatagggagggagagccatcacagcttgctcccattgatgtctttgtcagtacggtggatccactaaaggaacctcctctgatcacagcaaacactgttttgtccattctggctgtggattaccctgttgacaaagtgtcatgctatgtttctgacgatggttcagctatgttaacttttgaggctctgtcagaaactgcagaatttgctaggaagtgggttccgttttgcaagaagcacaatattgaaccacgagctccagagttttactttgctcaaaaaatagattacctgaaggacaaaatccaaccttcctttgttaaagaaaggcgggcaatgaagagagagtatgaagaattcaaggtacggatcaatgctcttgttgcgaaggcacaaaaagtacctgaagaggggtggaccatggctgatggcactgcttggcctgggaataacccaagggatcaccctggcatgattcaggtgttcttggggcacagtggtgggcttgacactgatggtaacgagttgccacggcttgtctacgtctctcgtgaaaagaggccaggattccagcatcacaagaaggctggtgcaatgaatgcattgattcgtgtatctgctgtgctgacaaatggtgcctatcttctcaatgtggattgtgatcactacttcaacagtagcaaagctcttagagaagcaatgtgcttcatgatggatcccgcactaggaaggaaaacttgttatgttcagttcccacaaagatttgatggcattgacttgcacgatcgatacgctaatcgcaacatagtcttctttgatgtgttcttggggcacagtggtgggcttgacactgatggtaacgagttgccacggcttgtctacgtctctcgtgaaaagaggccaggattccagcatcacaagaaggctggtgcaatgaatgcattgattcgtgtatctgctgtgctgacaaatggtgcctatcttctcaatgtggattgtgatcactacttcaacagtagcaaagctcttagagaagcaatgtgcttcatgatggatcccgcactaggaaggaaaacttgttatgttcagttcccacaaagatttgatggcattgacttgcacgatcgatacgctaatcgcaacatagtcttctttgatattaacatgaaaggtttagatggcattcagggtccagtttatgtgggaacaggttgctgcttcaataggcaggccttgtatggctatgatcctgtactaactgaggctgatttggaacctaacattgttgttaagagctgctgtggtggcagaaagaaaaagagcaagagctacatggatagcaaaaaccgtatgatgaagagaacagagtcttcagctcctatctttaacatggaagatatagaagagggcattgaaggttatgaagatgaaaggtcagtgctgatgtcccagaagagattagagaaacgttttggtcaatcgccaatttttattgcgtccaccttcatgactcaaggaggcataccaccctcaacgaacccagcatctctactgaaggaagccatccatgttatcagttgtggatatgaggacaaaactgaatggggaaaagagattggctggatctatggttcagttactgaggatattctgactggatttaaaatgcacgcaagaggttggatatcaatctattgcatgccaccacggccatgcttcaagggttctgcgccaatcaatctgtctgatcgtcttaaccaagtgctacgttgggctcttgggtctgttgagattctgcttagcagacattgtcctatctggtatggttacaatgggcgtttgaaacttctggagaggctggcttacattaacaccattgtttatccaattacatccattccacttatcgcctattgtgtgcttcctgctatctgtctcctcaccaacaaatttatcattcctgagattagcaattatgctgggatgttctttattctgcttttcgcctccattttcgcaactggtattctggagctccgatggagtggtgttggtatcgaggactggtggagaaatgaacagttctgggtcattggtggcacatctgcccatctcttcgctgtgttccagggtcttctgaaagtgttagcaggaattgataccaacttcactgttacctcaaaggcgtccgatgaggatggtgactttgctgagctatacgtgttcaagtggaccagtctcctcattcccccgaccaccgtgcttgtcatcaacctggtgggcatggtggcgggtatatcatatgccattaacagcggttaccaatcatggggtcctctctttggaaagctcttcttctccatctgggtgatcctccatctctaccccttcctcaagggtctcatgggcaggcagaaccgcactccgaccatcgtcatcgtctggtcgatcctcctcgcgtcgatcttctcccttctgtgggtcaagatcgatcctttcatttcgcctactcagaaagccgtcgccttggggcaatgcggtgtgaactgctga

SEQ ID NO: 12667 - DNA, 3282 bp, Oryza sativa
  Clone ID: TFbOSC401656j.C1.o43.fg
atggcaaagaccctgcaagggactcaacagcaatatgcagcaagtggatttcctacccagcaataccccacaagtggctggacacaatctgcagctgaaattcttcagttggataatatggatcaagatacatccgtagttcgcaatattattcaccgtaaaattgtagagtacctaaatgagcggaaggaattctgcaactttgacctatcctttcttatggaaattggaaaatgtattgaccgacatctttttgagaaagctgattcaaagattaagtatatggatcttgaaactttaagaaccaggttgaatgctatcgtcaattctgcatcatttcggggtagatataaccaatatgaaaactgtatgggtgctgctaactttgctcattcgttggctgataaacccaagcagatgcctgaaagattagcaaacaccatttttacctcatgtgcatcaactctaccgaaatgtagccctagtattgatgtactgcatattggccatataaaagaacatttctcaggtgatgcgtatcaaaatgatagttcacaaccatcaacctctgggagttctagttctttgtcagcagtgtgggatcaaacaacatgttctagtgcaatgagaacacttccgatggattctttctcaacagtgaacggacaaaacctttccacaaacaataaaagtttgtatcccacaaccggtcagggacctttgttgcaacaatacatagaatgtgagatgaagcaagagacgtggagtcggtcactagagcaatcagatcagtcaaacattaccactggaaaccgtgacttgtatcatgctcaaattcatccgtacatcaatggagagcacaaacgggatcgatgcattcaaatgaaagaaaaacttgggcatacttctgatcatgaaggtttctccagggagaaaagctcaaatttaagcaaccactttatgcatcatcagcagggcttcatgactaattatggtgcttgtagccctgtaagcaagacagtggatagagctgaacagacatcaaatagtactgtatcaaagccgacttcacctgcttcagatggatcttctggcaagcattatccagcaaaacgcttgaaagttgatgttccccatcttgtccatgtcaatgaaatggaggcttcaaaggaacaacaacctgctgccaatgagacttatgcatctgctgaaacagtacaatctgaagtcactaattcaccaacaaaatcaccatgttgtacttccttgggggacaacattgcttgcaccgataatgtacatggaatggatatggtcagattgtcggggagtgctgtacaaactgaagaagaatttcgtcgtgaaaatagtgacattgagatgaaggatgcaaaggttgatttattggaccaaacattgtcaggggacagcctgagggcaaggaagagaagaggggcctcagtactttatgcattaacttctgaggagcttaaagatcacttgtgtactctgaaccatgatacttctcagagcaaagtgccgactgaagagctgctatcagttgaaggcttgcctgatcagaacacatgcaatttatgtgggatggaaagactcctctttgagccccctccacgattttgcgcgctctgttttaaaataattaattctacaggatcctattatgttgaagtggaaaatggaaatgacaaatcttcaatatgtggcagatgccaccatcttagtagtgccaaagccaaatatcagaagagattcagctatgcagagacagatgctgaggcagaatggtgggtccagtgcgataagtgcaaagcttggcagcatcaaatctgcgcactttttaaccccaaaatcgtggatccagaggctgaatatacttgtgcaaaatgtttcttgaaggaaaaggataatgaagatgttgattcacttgagccatctactattctgggagcacgcgagttaccaagaactagactaagtgatcatattgagcaaaggctttctgagcggcttgtgcaggagcggcaacagagggcaattgcttctggaaaaagtgttgatgaggtaccaggagttgaaggtcttactgttagagtggtatcttcagctgatagaacactgcaagtccaaccacgtttcaaggatttttttaaaaaagaacaatatcctggggaatttccgtacaaatcaaaggccattctcttgtttcaaaagaatgaaggtgtagatgtatgcctgttcgccatgtatgtgcaagagtatggttcagcctgcccatcaccaaatcaaaggcacgtttatcttgcatatattgattctgtcaagtacttcagaccggaaatcaagtcggccagtggagaagctctccgtacctttgtgtatcatgaaattttgattggctacttggatttctgcaagaaacgagggtttgtaagctgttccatatggacttgcccatctacaaagcgtgacgattatgttttatattgtcatcctacaatacagaagatgccaaagtctgacaagcttcggagctggtaccagaatttggtaaagaaggctgttaaggagggggtagttgtggaacggaatacactctatgacttcttccttcagcccaccaatgaatgcaagaccaatatctcagctgcatggttgccatactgtgataatgatttctggcctggggaagcagagaggctccttgaaaagaaagatgatgacacctcacagaagaaagaaactcaactaggaaggcttctacgggttgccaaacgtgatgaccggaaaggaaacctcgaggatattttacttgtgcataagcaattttgcaagcattgccaccatcctattgtatctggtagtagttgggtttgcaccagctgcaaaaacttctttctttgtgaacgttgttatgctgaggagctgaatacccctctgaaggacaggcacccagctacaacaaaacaaaagcatgcatttgaaagagactaccttgaaggcttggtgcatgcatcaagatgttttgatcgaagttgcacttccaaactttgtttgacgttaaagaaactgttcttccatggtgtacgatgtcatacccgtgcccgtggtggaggaggttgccatatgtgtgtattcatgtggaaactgctgttcacgcactcactgctttgtgacaatgcagactgttcagctcccagatgcagggatataaaggcatatattgctgacagaagcatgacagaccttagtatatctggatga

SEQ ID NO: 12668 - DNA, 2304 bp, Oryza sativa
  Clone ID: TFbOSC419836j.C1.o17.fg
atggcgctcgaccccgccgacgatccgctgctcgccgattgcaagtacaagttgaatcactttagaataaaagagctaaaggatgtcctgcatcagcttggacttccaaagcaaggaaggaaacaggaacttgtggacaaaattatagcagtattgtctgatcaacaagaacaagactccagattgaatggcttgccaaacaaaaagatggttgggaaagaaactgtggctaaaatagttgatgacacttttgcaaaaatgaatggctccacaaatgctgttccagcctctagaaatcagactgactcggggcacattgtaaagcctaaaaggaagtcagatgattctgctcagttggatgtcaaagtccgttgtccctgtggttattccatggccaatgattccatgattaagtgtgaaggtccacaatgcaatacacagcaacatgtaggctgcgttatcatatctgagaagcctgcagacagtgttcctccagaattaccaccacacttttattgtgatatgtgccgaatcactcgagctgaccctttctgggttactgttaatcatcctgtacttccagtctcaataactccctgtaaagtagcatctgatgggtcatatgctgtacagtatttcgagaagacctttccgctatcaagagctaattgggagatgcttcagaaagatgaatatgacctccaggtttggtgtatcctattcaatgatagcgtacctttcaggatgcagtggcctttacattctgatattcaaattaatggtattcctattagggttgtcaacaggcaacccacacaacagttaggggtgaatggtagagacgatggtccagttttaacagcatatgtgagagaagggtctaataagattgtcctatctagaagtgactctcgcacattctgtttgggagtcaggattgccaagaggagatctgtagaacagcttgttggatatggccagaactcggtcgattctctcagcatctacaacacaagctggtacctgggaggaacatggcaactcttgagatttaggaaccctgttttatttatcaaaggtcctctaaattttcatagcatacaggtcctatctttggtgccaaaggaacaagatggtgagaactttgataatgcccttgctcgtgtgcgtcgctgtgttggtggtggaaccgaggcagataatgctgacagtgacagtgatattgaagttgtagctgattctgtctctgtgaatctccgatgccctatgactggttcaaggatcaagatagctggccggttcaaaccctgcgttcacatgggttgttttgatttagaagcttttgtggaacttaatcaacgttcaagaaagtggcagtgcccaatttgcctgaaaaactactctttggacaacataatcattgatccttacttcaaccgcataactgctttggtccaaagttgtggagatgatgtatctgaaattgatgtcaagcctgacggttcctggagagtcaagggtggagcagaactgaagggtcttgcacagtggcatttacctgatggcactctctgtatgcctacagatacaaggtccaagcccaacataagaattgtaaagcaagagattaaagaagaaccgttgtctgaagaaacaggtggccgtcttaagttgggaatcagaagaaacaacaatggccagtgggaaattaacaagagattggattctaacaatggtcagaatggatatattgaagatgaaaactgtgttgtttcagcaagcaacactgatgatgagaacagcaaaaatggaatctataatccagaaccagggcaattcgatcaactaaccagcaatatctatgatcttgattcttctcctatggatgcacattttcctccagcaccaacagagcaggatgtaatagttctgagtgactcagatgatgataatgttatggtgttatcacctggtgatgttaatttcagttcagcacatgacaatgggaatgcattcccacccaacccacctgaagcttcaggaatttgtggggaacaacctagaggagccggcccagatgtgacttcatttcttgacggtttcgatgatctggaactgccattttgggaatcttcgagctctcaagatgctgcaggcacacaggtgacagacaatcaatgcgaaatgcaaaatttcattgtcaaccatcaatttttgcacgagccaattttaggggttaacttgggtggaacagcagcatcaaacacactggaatgtgagcatgatggtgcgttacaagcttga

SEQ ID NO: 12669 - DNA, 3168 bp, Oryza sativa
  Clone ID: TFbOSC900335j.C1.o17.fg
atggaggcgagcgccgggctggtggccgggtcgcacaaccggaacgagctggtgctgatccgggggcacgaggagcccaagccgctgcgggcgctgagcgggcaggtgtgcgagatatgcggcgacgaggtcggccgcaccgtcgacggcgacctcttcgtcgcctgcaacgagtgcggcttcccggtgtgccgcccctgctacgagtacgagcgccgcgagggcacccagaactgcccccagtgcaagacccgctacaagcgcctcaaggggagcccgagggtgcccggggacgaggacgaggaggacattgacgacctggagcacgagttcaacatcgacgacgagaagcagaagcagctgcagcaggatcaggatggcatgcagaacagccacatcaccgaggcgatgctgcacggcaagatgagctacgggaggggccccgacgacggcgacggcaacagcaccccgctcccgccgatcatcaccggcgctcgctccgtcccggtgagcggggagttcccgatatcgaacagccatggccatggcgagttctcctcttccctgcacaagcgcatccacccctacccggtgtctgagccagggagtgcaaagtgggacgagaagaaagaggtgagctggaaggagaggatggacgactggaaatccaagcagggcatcgtcgccggcggcgcccccgatcccgacgactacgacgccgacgtcccactgaacgacgaggcgaggcagccgctgtcgaggaaggtgtcgatcgcgtcgagcaaggtgaacccgtaccggatggtgatcatcctccgtctcgtggtgctcggcttcttcctccggtaccgcatcctccacccggtgcccgacgccatcccgctgtggctcacctccatcatctgcgagatctggttcgccgtgtcgtggatcctcgaccagttccccaagtggtacccgatcgacagggagacctacctcgaccgcctctccctccgctacgagcgcgagggggagccgtcgctgctgtcggcggtggacctgttcgtcagcacggtggatccgctcaaggagccgccgctggtcacggccaacaccgtgctgtccatcctcgccgtcgactaccccgtcgacaaggtgtcctgctacgtctccgacgacggcgcgtccatgctcacgttcgagtcgctgtcggagacggcggagttcgcccgcaagtgggtgccattctgcaagaagttcagcatcgagccccgcgccccggagttctacttctcccagaaggtcgactacctcaaggacaaggtccatcccaacttcgtccaggagcgccgcgccatgaagagagagtacgaggagttcaaggtgaggatcaacgcgctggtggcgaaggcgcagaaggtgccggcggaagggtggatcatgaaggacgggacgccatggccggggaacaacacccgcgaccacccgggcatgatccaggtgttcctcggccacagcggcggccacgacaccgagggcaacgagctcccccgcctcgtctacgtctcccgtgagaagcgccccggcttccagcaccacaagaaggccggcgccatgaacgccctcattcgtgtgtcggccgtgctgacgaacgcgccgttcatgctcaacttggattgcgatcactacatcaacaacagcaaggccatcagggaggcgatgtgcttcctcatggatccgcaggtcggacggaaggtttgctacgtgcagttcccgcagaggttcgacggcatcgacgtccacgaccgatacgccaaccgcaacaccgtcttcttcgacatcaacatgaaggggcttgatgggatccagggcccggtgtacgtcgggacagggtgcgtgttcaggcggcaggcgctgtacggatacaacccacccaagggacccaagaggcccaagatggtgacctgcgactgctgcccttgcttcgggaggaagaagcggaagcacggcaaggacggcctcccggaggccgtcgccgccgacggcgggatggacagcgacaaggagatgctcatgtcgcagatgaacttcgagaagcggttcgggcagtcggcggcgttcgtgacgtcgacgctgatggaggaaggcggcgtcccgccgtcgtccagccccgccgcgctcctcaaggaggccatccatgtcatcagctgcggctacgaggacaagaccgactggggtctcgagctggggtggatctacgggtcgatcacggaggacatcctaacggggttcaagatgcactgccgcgggtggaggtcggtgtactgcatgccgaagagggcggcgttcaaggggtcagcgccgatcaacctatctgaccgtctcaaccaggtgctccggtgggcgctcggctccgtcgagatcttcttcagccggcacagcccgctcctctacggctacaagaacggcaacctcaagtggctcgagcgcttctcctacatcaacaccaccatctaccccttcacttctctccccctcctcgcctactgcaccctacccgccgtctgcctcctcaccggcaagttcatcatgcctccgattagcacgtttgcgagtttgttcttcatcgcgctcttcatctccatcttcgcgacgggcatcctggagatgaggtggagcggggtgagcatcgaggagtggtggaggaacgagcagttctgggtcatcggcggcgtgtcggcgcacctgttcgcggtggtgcagggcctgctcaaggtgctggccgggatcgacaccaacttcaccgtcacgtccaaggccaccggagacgaggacgacgagttcgcggagctctacgccttcaagtggaccaccctcctcatcccgcccaccacgctgctcatcctcaacatcatcggcgtcgtcgccggcgtctccgacgccatcaacaacggctccgaggcgtggggcccgctcttcgggaagctcttcttcgccttctgggtcatcgtccacctctaccccttcctcaaggggctcatggggaggcagaaccggacgcccaccattgttgtcatctggtccgtgctgctcgcctccatcttttccttgctctgggtcaggattgatcccttcaccatcaaggccaggggccctgacgtcaggcagtgcggcatcaactgctga

SEQ ID NO: 12670 - DNA, 2044 bp, Oryza sativa
  Clone ID: TFbOSC20379j.C1.o1.fg
atgccgcgcccctccacctccgcctccgccaccgcctcccgcttcgccgccttttgggccgccgacgcgctcgccggcgacgacgccctcgacttcgccgtcaccaaggcgatggtgggcgtctccccggattccgtcagggccgcccctgaggcggtgcgggagcgcgtggcgctgcggtgcctccaggaggtcgtctccctcgcctcctccgatggcgagcgcggcgccacggcctcggccatagcggcgccgggggaggggatgcttggggtggaggacgcatcccgcacctgcgaggatttgctgcttcaactcatccgggaggttggtagctcagggagcttggagaaggatatgcttccgccctttagacaagatatccagaagtttatatgcataaagagacctacattaccagaaacttcttttgagttgctcagaaaagtttacccagagattacacctgtggttccaccatccccagtggagcagaatggaaatgaccaacacgacaatatcagccatgatcttgtgaatacagagaagaccggattcactacagatggtgctcaacttcagcaggatgatctagcaaatttagtcgatgaaagaaacacagaaaatcttcagaaggatgcaatggcaacttctgattttcaacaaccatgtacatcagacaataggtgttttgatcagcgacaagaagattctattaatactgttggtgtcaacatcaggtctccagaagacagtccaactaatgtaaatagacacatgtcagttgcagctgagccttctttagctagttctgcagatttgctgggaagtaatacaggaagaatgtctgagcaggacacgatagatcatacaaccatagttcaatcacaatcttgtggggtcagatatcctaataaacatcacagtaataatggagacatgccacttgttgccagcattcagtcaccaaaggattccatccatgaaggatcaaccatgcagacaactgtttctccagctgttgacagaagcaatgatgctttaccggcatccaacatgacccacttgcctgagtttattgctgtagaggataaaataatgacttcagaaccacacttcagcaaaactcatccaaattcagggcaacatgatactggtgataaagcaaatcaagatgtgggttgtggcagtactggtattcagacagctgctgctttaccatctgaaggctttaatggggatgttcaaggagacaaatctgaaattaaagatccagcagggaatactacacagcatactgaaacttttgaacaagaaaatagtgacaaggctcatttggaagttggttgttccgacaaagttaatcaagctctatatgatgatggcaacatcataaaaaataatatggtctttggtgggctgaataagcaaactgctctagagtctcatggctgcagcatgaccttgcataacagaaattcagaggccaaccatttctctgagcagaatattggaaggaacagaactgaagttcagaatgattgctgcagtattccaacctctcctaatgatgttaatgacaagcgagcaaagcaagcttcaaacaaggaaaccatggcgaatactgtggcagaaacattgcatgtgcattcttcagatggtagtttcagtggcttcgcagctggtggtcttctgtcaatggctgaaaaactaccgttctgtactcaggatcaatatgctaatggtactgttgagggcttgtcagaacaagagttgtgcataaaatgtggcaaagatggtcagttgctgaaatgcagtggctgttttttagccgttcatgatacatgttttggctcatcagtgacatttgatgattctggtcagttctactgtcctgtatgcttctatactaaagcaactgaagcatatcaaaaggcaaagaaaacatattctgaagcaaggaagaacctatcagctttccttggtagaaagcaattggctgagcaatatcaacaagctgcagtgcggcaaaaagctgccaaca

SEQ ID NO: 12671 - DNA, 2553 bp, Oryza sativa
  Clone ID: TFbOSC900210j.C1.o1.fg
atggtgggcgtctccccggattccgtcagggccgcccctgaggcggtgcgggagcgcgtggcgctgcggtgcctccaggaggtcgtctccctcgcctcctccgatggcgagcgcggcgccacggcctcggccatagcggcgccgggggaggggatgcttggggtggaggacgcatcccgcacctgcgaggatttgctgcttcaactcatccgggaggttggtagctcagggagcttggagaaggatatgcttccgccctttagacaagatatccagaagtttatatgcataaagagacctacattaccagaaacttcttttgagttgctcagaaaagtttacccagagattacacctgtggttccaccatccccagtggagcagaatggaaatgaccaacacgacaatatcagccatgatcttgtgaatacagagaagaccggattcactacagatggtgctcaacttcagcaggatgatctagcaaatttagtcgatgaaagaaacacagaaaatcttcagaaggatgcaatggcaacttctgattttcaacaaccatgtacatcagacaataggtgttttgatcagcgacaagaagattctattaatactgttggtgtcaacatcaggtctccagaagacagtccaactaatgtaaatagacacatgtcagttgcagctgagccttctttagctagttctgcagatttgctgggaagtaatacaggaagaatgtctgagcaggacacgatagatcatacaaccatagttcaatcacaatcttgtggggtcagatatcctaataaacatcacagtaataatggagacatgccacttgttgccagcattcagtcaccaaaggattccatccatgaaggatcaaccatgcagacaactgtttctccagctgttgacagaagcaatgatgctttaccggcatccaacatgacccacttgcctgagtttattgctgtagaggataaaataatgacttcagaaccacacttcagcaaaactcatccaaattcagggcaacatgatactggtgataaagcaaatcaagatgtgggttgtggcagtactggtattcagacagctgctgctttaccatctgaaggctttaatggggatgttcaaggagacaaatctgaaattaaagatccagcagggaatactacacagcatactgaaacttttgaacaagaaaatagtgacaaggctcatttggaagttggttgttccgacaaagttaatcaagctctatatgatgatggcaacatcataaaaaataatatggtctttggtgggctgaataagcaaactgctctagagtctcatggctgcagcatgaccttgcataacagaaattcagaggccaaccatttctctgagcagaatattggaaggaacagaactgaagttcagaatgattgctgcagtattccaacctctcctaatgatgttaatgacaagcgagcaaagcaagcttcaaacaaggaaaccatggcgaatactgtggcagaaacattgcatgtgcattcttcagatggtagtttcagtggcttcgcagctggtggtcttctgtcaatggctgaaaaactaccgttctgtactcaggatcaatatgctaatggtactgttgagggcttgtcagaacaagagttgtgcataaaatgtggcaaagatggtcagttgctgaaatgcagtggctgttttttagccgttcatgatacatgttttggctcatcagtgacatttgatgattctggtcagttctactgtcctgtatgcttctatactaaagcaactgaagcatatcaaaaggcaaagaaaacatattctgaagcaaggaagaacctatcagctttccttggtagaaagcaattggctgagcaatatcaacaagctgcagtgcggcaaagagctgccaacagtgaggatcatttcaatgggtgtaacaacgcaatcaaaaggcaaggtaatcatcaatctgaaggaaataacctttctcatagggatgaagagcctgcccgacagaggaagaagcagaagacaaatgctagggatgcttgcactcaggaagtagtcactaaaaaggcacccactgttcataactctgatgttgtatccatgaaaaagaattctgtactccagaataacagaaaacaagctcaggttgcagagcaggagcagccagaggaaaatgcagaagctagtggagagtctggtaatacaaattcatcgcacaaaacagcacattcatctcagaacaagtgcagtcctgctgcaagtcagaatattgatgctgacaaagaagatgtccttgcaagttctcaacagtcagaagattctgatgaaatcgaagctacatcttctagtgaccctagcaagcaaccatcgcctcattggcgcaagttgagacaccgcaaagcaagatatcaggataataatacagcaattccaattaattctaagaaaacactggggcaccatgatcaacatatggcttcaccatcaaggaaaaggaactatgcatatccacccaagcgttag

SEQ ID NO: 12672 - DNA, 372 bp, Oryza sativa
  Clone ID: TFbOSC4045j.C1.o1.fg
atggccagtggcggcaccgtctgctccatgtgcggcgacgtggggttcccggacaagctcttccgctgcgcccgctgccgccgccgcttccagcactcctactgcaccaactactacggcgacggggcaccggtggaggcgggcgccggcgtgtgcgactggtgcctcagcgacgccgccgtcgtcgccgggaagaaggggccatcgtcggaagggaacgaggagccgttctccagggagtaccgtggcaggagcaagcaggcggcgtcgaccggcggaggcgagcaggagggcggcggcggcggcggccggagggtctccaaggccggcgctgtccgtaggtacaagcttctcaaggacgtcttgtgctaa

SEQ ID NO: 12673 - DNA, 2127 bp, Oryza sativa
  Clone ID: TFbOSC400792j.C1.o5.fg
atggaggacgcgtggaggaaggcgaagagggcgctggggctcggcctgtgcgtgcacgtgcccgaggcggaggagggggagagggaggactgctcgagcgagcggcggaggcggctgccggcggcggcgagcggcgcgcggtgccggggcgaggccgcggtgacggtggggccggagtcggtgccggcgccgtcggacgttccggtgccgctgccgctccccggcgtggtgcggaggtccaagtcggggagcagccgatcctcctctaagaggaaatgtgcaatatgctttgactccatgcggcatgggaatggtcaagccctattcacagctgaatgttctcatatgttccattttcactgcatctcatctaatgtgaaacatgggaattatttctgcccaatttgtcgggcaaagtggaaagagatacccttcaatcgatcgctatcttctaacattccgcatggaagaattggagttagccgagctcgattgacccaacaagatgccaatatggctcttctccaccaagttccaaaccatcatcagcgagttcgtcgcccacatacttctgagccagcagacttcaatgatgatgaacctttgcagcagccagaagtttttgacaatcttaatgttcgatctactaagactgcagagataaacacatatccagaattctcaaccataccgcagtcctcatctaaagatgattttgctattctgatccatctgaaggctcctagtgctaacccagaccagggcacaggtaaattggcgaatgaaagctcagctggatcttcaagaaaccgtgctccggttgatctcgttactgtgcttgatgttagtggcagcatggcaggcaccaaactagcgctcctaaagcgagcaatgggttttgttgttcagcaccttggaccaagcgatcgtctttctgttattgctttctcatctagtgccagaagactgttccaccttcagcgaatatcacatcatggcaggcagcaggcattgcaggcaattaactcacttggtgctagcggcggtacaaacattgctgatgcactgaagaaagctatgaaggtgattgaagaccgcagttacaagaattcagtgtgcagcatcattcttctgtcggacggccaagatacatacaacatttcctcaagtgttcagggggcttcaccagattacaagtcacttgtcccatcttccattataaatgatgctcgccatacggtgcctcttcatgccttcggatttggagcagaccatgactcggattccttgcactcaattgctcaagcttctggtggcaccttttcctttatcgaggatgaaggtgtaatgcaagatgcatttgctcaatgcattggtgggcttcttagcattgtcatccaagagatgcgagttagcatggaatgtgttcatcctggtgttcaactttcttccatcaaatctggtagctacccaagtaaggtggcaagagatggacgaaacggttccgtcgacattggtcacctgtatgctgatgaggagagagacatcttactgtccgtgaacatcccacaatctcgtcatcagacctcagcactgaaggtttcttgtgcctacagagatccggtgacaggtgagacaatcaagattcaaggtgacgaggtgaagatcaaccggccgacaacatccaacatatctgagcatgtgtccattgaggttgaccgcgagaggaaccgcatacaagctgctgaatccatagagtgtgcaagggctgctgccgagaagggtgctctctctgaggccgtggccattcttgaggattgccggaggacactgtcacagtcattcgcaagccggagcggtgaccgtctgtcgctgtccctcgacgcggagctgcgagagatgcaggagaggatggcaaatcgccagctctacgagtcttcagggagggcttacatgctgtccgggctgagctcacactcgtggcagagggcaacagcacgaggtgactcgacggacagcagcaccgtcatctactcctaccagacgccatccatggttgagatgctacagcactcccagaaccatctcccttcgcctcagggccggcaaaggccacggccccggtga

SEQ ID NO: 12674 - DNA, 4872 bp, Oryza sativa
  Clone ID: TFbOSC900208j.C1.o7.fg
atgtcggggcaggcgccgcagactaatcaggttggtggcagtggcgtcggtggcgctgacggactgccacagcagatgcaggacgtggtgggacttgggggccttgatacccagtttttgttaatgcgcaacactatgcgcgataggatattcgaatatataggaaggaagcaatcatcgactgattggcggcgacggctgccagaacttgctaaacggctcgaggagatcttgtatagaaaattcttaaacaaggccgattacctcaatatgatgaggggaccagttgagccacaattgcagtttgctattaagactttgagtgctcagaaccaacaaaatcaacaaaaccaacaaatgccaaggcaaatggcatcttcctctggctatggcacgatgattccaacaccgggcatcacacaaagtgcaactggaaattctagaatgccctatgtaactgacaacactggccttccgtcatctggtgcaaccatggttcctcagggtgccaacactggtacctcacttccaggttcaatgtctaacggttaccagcatctaactaccagtgttccattaaattcaaccacaagcagcatcccatctacgatgggtcctgtgggtattcagcggcaagtgactcatatgatccccactccaggatttaataatcaacagaatgtgcctgtgaatcctgatttttcaaatggagctggatatttcaatggtgagccaactgtgacatcacaaatgcaacagcagaagcaatttcctagcaaccaaaacagtcatcaaatccagcatattggggggcacagtaattctggaatgcattcaaacatgctggagaattcttctgcatatggtttatcagatggacatgtgaatggtggaatgggtgtacatgggtcaaacatgcagctaacaaacagaagtgctgcatcagaagcatacattaacatatccacatatggaaattcacctaagcctgtgcaacaacaattcaaccagcaccctccacagaggataccgacaccagttgatatatctggttctgggaatttttacaatactggttcttctgctttaacagcagcgaataatcatagcatgggtgctacaaatttgccatctagatcaagaatgaattccatgttgcacacaaatcagttaaacatgcaatccattcaaccgcaacctcagataaaaactgaggttttggatcagccagaaaagatgaattttcaatcttctcagttgactcacgaacaacttatccgccagcaacattcaatgcagcaacatcaaatgcagcctagttcccagtttgtgcaaaaccagtaccatctgaatcaacagcagcctaactcacagcatcagcagtctatactgagaagcaattcccttaaacagccccaactgagttccagccattctatgcaattgtcagaacaaggagctctgccacacactgagctgatatcttcacaagctactgaacacgctgacattccaatttaccagggtcaataccagcaaagaagtgctcatgataatgtcaaaggagggcaagtgtttggacatctttccagctctcaaaattttcattctaatgcgtcccatgattctcagcaattgttgccaactaatcagcagcttgatgacagttcaaatgatgtaagttatgtcttgaaaggatctcagccagagcagatgcatcaggctcaatggcggcctcagacaatggaaaaagctcctgtcactaatgattcgtctcttgagaagcaaatacaggcagatttgtgtcagagaacaatgtctcaggatggagcacaacagccattttcatctgattggcgccttcctggttgtactgtgactccagctgatcctgcattgccaaagctccctagtggaggacttgaacaggctgctggaaatatctattattttcgtcagatgaagtggttacttttgctatttcatgcaaaatcatgcttaactcctgtcggaagttgtaaattccatcgctgttttcagtgtcctgtatgcagtaatgcaaagaaacttctgcagcgttcagctgaactagcaagcaagcaaaagccccctgagcctagaaaaattgctcaacagaatacggctcaaagaatcatgaatggggtagagggtgacataatggacatcgacctagtgtcagatgaaatctttgatagtcagccttctgttccaaaacgcttaaagatgcagcctgtatcacccagtactgcagagcgtgaagtttctatgccctccaatgcagggcttatattgcaggaaacacattctgaactgcctgaccagaataacaaggtgggacaactgaaaatggatgtgaagattgacccacgaccactgcagaagcctgcaaagattggttatggtactgatggaaatgtgcccacagcgagacataatgtggcacctggaggctcaaatgagatcaagactcatgtcaagcaagaaatcatgccaattgacaaagagacaagtgagactgcccctgaagttaagaatgaagcaaatgattcaacagacatcacagtttctaaatcagggaaaccaaagataaaaggtgtctcaatgactgaattgttcaccccagaacaaattcaggaacatatcaatagtctaaggctgtgggttggtcagagtaaagctaaagctgaaaagaatcagttgatggggcataatgaaaatgagaattcatgccagctctgcaaagtggaaaaacttacttttgaacccccaccaatatattgctccccttgtggtgctcggataaagcgaaatgcaccatactataccgttggtactggtgatactcgccattttttctgtattccatgctacaatgagtcccgtggtgacactattgaggttgaagggcaaaactttttgaaggccagattcgagaaaaaaaggaatgacgaggaaactgaagaatggtgggttcagtgtgacaagtgtgaatgctggcagcaccagatatgtgctctatttaatggtagaaggaatgatggagggcaagcagagtacacctgcccaaattgttatgttgaagaggtgaaacgtgggttgcgtatgcctctaccacagagtgcagttcttggggcaaaagatctgcctagaactgtactaagcgatcatattgaagatcggctttttaaacggttgaagcaggagagacaggatagggcagctcaggagaggaaaagcattgaggaggttcctggagccgaaggtcttgtggttagagttgtttcatcagtggacaagaagctggaagtaaaaccacgttttttggaaatttttcaagaagataactacccgacagagttcccatacaagtccaaggctgtccttttgttccagaaaatagaaggtgtagaagtgtgcctatttggaatgtatgttcaagaatttggtgcagaatgctcctacccgaaccagcgtcgtgtttatttgtcatacctggattctgttaaatacttcaggcctgagattagaacggtgtctggagaggcgttacgtacatttgtttatcatgaaattctgataggatatcttgaatattgcaagcagcgtggattcacaagctgttacatatgggcgtgcccacctttaaaaggtgaagattacattttgtactgccatcctgagattcagaagactccaaaatccgacaaattgagggagtggtacttatctatgcttcgaaaagctaccaaggaggagattgttgttgagctgacaaatctatatgaccatttcttcattactatgggggagtgcaaggctaaagtgactgcttctcgtttgccttactttgatggagattattggccaggagctgcagaagatatgatcaatcaacttcgtcaagaagaagatgaccggaagcagcagaagaagggcaagacaaagaagattattacaaaaagagctcttaaagctgctggccacaccgatctcagtgggaatgcttccaaggatgctatgctgatgcacaagcttggggaaaccatttatccaatgaaggaagatttcattatggttcatttgcagtattcgtgtagtcactgttgtacccttatggtgtctggaaaacgttgggtttgccatcaatgcagaagcttttacatatgcgacaagtgttacgatgcagaacaacagcttgaagatagggagaggcacccaagtaacagtagagacacacatacgctccatccggttgacattgttgggttgcccaaagataccaaggatagagatgatattctggaaagtgaattttttgacaccaggcaggccttccttagtctctgtcaaggaaatcattatcagtacgatacccttcgccgtgctaagcactcatcgatgatggtgttgtaccatctacataatccaaccgcaccagcgtttgtcactacatgcaacgtctgctgtcatgatattgaaactggtcagggttggcggtgtgaagtctgtccagattttgatctaaggaagatgcttgatcttctggtacatgcctcgacatgccgctctggcagttgtcaatacccaaactgccggaaagtcaagggactgtttcgtcatgggatgcagtgcaaaacacgtgcttcaggagggtgtgttctttgcaagaaaatgtggtacatgctccagctccatgcccgagcttgcagggactcaggatgcaacgtgccgagatgcagggatctcaaggagcatcttcgaaggttgcaacagcaatctgattctaggaggagggctgctgtaaatgaaatgatgagacagagagcagcagaagttgctgcaaacgagtag

SEQ ID NO: 12675 - DNA, 2081 bp, Oryza sativa
  Clone ID: TFbOSC402966j.C1.o8.np
gttttaccaatattaaatacttggtgcagatacaactatcagccacctcctgggaagccgaatcatacttgtggtggtgctgatagatgggcagatgttgttagcaccgatgatactagcaactcctcctcctcttcaccttctgcctccacctccacctccaagatggagctcaagatgtccaagaagatttccttcagtaggatccccaggaacctcaaggacctgctcgccactggcttgctcgagggccaccccgtcaagtacatcatgaggaaaggcaaggttgtttccccttattatttcgaggtgcatgctgggagtactaaaaagcacccctccgactacattttcctagaaaatggaaacaatctgcatgatatattgagggcgtgttctgatgctaccttagacatgctgcaatctgcaatacagaatgcgattggcccagctcctaagaagaggacattcagatgccaaacttgcaaaagtgagctgtcctcttgttgcactgggaaatttgctttgttatgtgattcatgtcttgagtccaagggatctcaaaacagtaccaggtaagctttgtcacagttccacattttgccagcgacagaaaatttggaggacatcaaagattggccggaatcctacttcctctgctaggagatccaagaatgaatccccaggttcaaagtattgcaattcatctgctaggggatccaagaatgcattcccaggagtgaagactactagcacgggaaggattacaagaaaggataagggattgcataagttggctttcatgagtggtgttctgccagagggtaccgatgttggctactatgttggtggaaaggttagcccttcgcagtttgaagcccatgctggccgtgctgctcgacgcaaaccgtaccacaacatatatatgtcaaatggtgtttcattacatgaactgtcagtttcactttcaaaaggtcgaaatatgtcaaacagacaaagtgatgacttgtgcagcatttgttcagatggtgagtgtgttggctttactactatcccaaggggaacttggtgttgtcggtattgtgagaatagacaacagagagaaagttctttggcatataaccacaatgcaatagctgctgggaggattgacggaattgatccaatggaacaaatatttacaaggtccatacgcattgccacaacaccagtgactggatttggtggctgtgcacttttgtgcaggctccatgatttcagcaaaaagaaattcagtgcgagaactgtgctgctctgtgaccaatgtgggagggaattccatattggttgcctgaaggaacacaatatggctgatttgacggccttgcctgagggagcatggtattgtactgcggactgcgttaggatcagcgagacactgaaggacttacttagccgtggagcagagcctatttcttctgtagatgtagaaattataaagaggaaatatgaacagaaagctctaaataaagatggagatcttgatgttagatggagggttttgaaggacaaaagttcagcagacagtaaattggttctctccaaagcagttgcaattttccatgaatcatttgatcccattatccaaattgctactgggcgagaccttattccagccatggtttacgggaggagtgtaagggatcaagattacacaggaatgcattgtgctgtattaactgttggcaacactgtagtatctgcgggtcttttccgtgttatgggtagtgaaattgcggagctacccttggttgctacaagtagagatagtcaaggcttggggtatttccaagcgctgtttggctgcatagaacgattgttggcatctctgaaggtgaaacattttgtgctgccagctgcagatgaagcggagtctatctggacacagcggtttggattcgtgaagataacccaagacgagctgcgtgagtacctcaagggtgggcgaacaaccgtgttccagggaacatcaaccctgcacaagctggtcccaaaattggatggctagctctgtgaatatatgcattggaatgtgcagggag

SEQ ID NO: 12676 - DNA, 3237 bp, Oryza sativa
  Clone ID: TFbOSC400769j.C1.o19.fg
atggacaccgcctccgtcaccggtggcgagcacaaggggaaggagaagacgtgccgggtgtgcggcgaggaggtggcggcgagggaggacgggaagccgttcgtggcgtgcgccgagtgcggcttcccggtgtgcaagccctgctacgagtacgagcgcagcgagggcacccagtgctgcccccagtgcaacacccgctacaagcgccacaaagggtgcccacgggtggaaggcgacgaggacgacggcggcgacatggacgacttcgaggaggagttccagatcaagagccccaccaagcagaaacccccccacgagcccgtcaacttcgacgtctactcggagaacggcgagcagccggcacagaagtggcgccctggaggcccggcgctctcttccttcaccggaagcgtggctgggaaggatctggagcaggagagggagatggagggtggcatggagtggaaggacaggatcgacaagtggaagacgaagcaggagaagcggggcaagctcaaccgcgacgacagcgacgacgacgacgacaagaacgacgacgagtacatgctgctcgcggaggcgaggcagccgctgtggaggaaggtgccgatcccgtcgagcaagatcaacccgtaccggatcgtgatcgtgctccggctggtggtgctctgcttcttcctcaagttccggatcacgacgccggcgatggacgcggtgccgctgtggctggcctcggtgatctgcgagctgtggttcgcgctgtcgtggatcctcgaccagctgcccaagtggtcgccggtgacgagggagacgtacctggaccggctggccctccggtacgagcgcgacggcgagccgtgccgcctggccccgatcgatttcttcgtcagcacggtggacccgctcaaggagccgcccatcatcaccgccaacaccgtgctgtccatcctcgccgtcgactaccccgtcgaccgcgtctcctgctacgtctccgacgacggcgcgtccatgctgctcttcgacacgctctccgagaccgccgagttcgcccgccggtgggtccccttctgcaagaagttcaccatcgagccccgcgcccccgagttctacttctcccagaagatcgactacctcaaggacaaggtccagcccaccttcgtcaaagaacgccgcgccatgaagagagagtatgaggagttcaaggtgaggataaacgcgctggtggcgaaggcgcagaagaagccggaggaagggtgggtgatgcaggacgggacgccatggccggggaacaacacgagggaccacccggggatgatccaggtgtacctgggcagccagggcgcgctcgacgtcgagggcagcgagctgccgcggctggtgtacgtgtcccgcgagaagcggcccggctacaaccaccacaagaaggccggcgccatgaactccctcgttcgcgtctccgccgtgcttaccaacgcccccttcatcctcaacctcgactgcgaccactacgtcaacaacagcaaggccgtccgcgaggccatgtgcttcctcatggacaagcagctcggcaagaagctgtgctacgtccagttcccccagcgcttcgacggcatcgaccgccacgatcgctacgccaaccgcaacaccgtcttcttcgacgtgagcactgccttcttctccggcgtgcgtgcgtcgcgccgtgacatcaacatgaaggggctggacgggatacaggggccggtgtacgtggggacggggacggtgttcaacaggcaggcgctgtacggatacgacccgccgcggccggagaagaggccgaagatgacgtgcgactgctggccgtcgtggtgctgctgctgctgctgcttcggcggggggaagcgcggcaagtcgcacaagaacaagaagggcggcggcggcggcgagggcggcggcctcgacgagccgcgccgcgggctgctcgggttctacaagaagaggagcaagaaggacaagctcggcggcggcgcggcgtcgctcgccggagggaagaaagggtaccggaagcaccagcgcgggttcgagctggaggagatcgaggagggcctcgaggggtacgacgagctggagcgctcgtcgctcatgtcgcagaagagcttcgagaagcggttcggccagtcgccggtgttcatcgcctccaccctcgtcgaggacggcggcctcccccagggcgccgccgccgaccccgccgccctcatcaaggaggccatccacgtcatcagctgcggctacgaggagaagaccgagtggggcaaggagattgggtggatctacgggtcggtgacggaggacatcttaacggggttcaagatgcattgccgtgggtggaagtcggtgtactgcacgccggcgagggcggcattcaaggggtcggcgcccatcaacctgtcggatcgtctgcaccaggtgctccggtgggcgctcggctccgtcgagatcttcatgagccgccattgcccgctctggtacgcctatggcggccgcctcaagtggctcgagcgcttcgcctacaccaacaccatcgtctaccccttcacctccattcccctcctcgcctactgcaccatccccgccgtctgcctcctcaccggcaagttcatcatccccacgcttaacaatttggcgagcatatggttcatagcgcttttcctgtcgatcatcgcgacgggggtgctggagctgcggtggagcggggtgagcatcgaggactggtggaggaacgagcagttctgggtgatcggcggcgtgtcggcgcacctgttcgccgtgttccagggcctcctcaaggtgctcggcggcgtggacaccaacttcacggtgacgtccaaggccgccgccgacgagaccgacgcgttcggcgagctctacctgttcaagtggacgacgctgctggtgccgccgacgacgctgatcatcatcaacatggtggggatcgtcgccggcgtgtcggacgccgtgaacaacgggtacgggtcgtggggcccgctgttcgggaagctcttcttctccttctgggtcatcctccacctctaccccttcctcaaggggctcatggggaggcagaaccggacgcccaccattgtcgtgctctggtccatcctcctcgcctccatcttctccctcgtctgggtcaggatcgaccccttcatccccaagcccaagggccccgtcctcaagccatgcggggtctcgtgctga

SEQ ID NO: 12677 - DNA, 3246 bp, Oryza sativa
  Clone ID: TFbOSC400765j.C1.o1.fg
atggacggcgacgcggatgccgtgaagtcggggaggcacgggagcgggcaggcgtgccagatctgcggcgacggcgtgggcacgacggcggagggcgacgtgttcgccgcctgcgacgtctgcggcttcccggtgtgccgcccctgctacgagtacgagcgcaaggatggcacccaggcttgcccccagtgcaagaccaagtacaagcgccacaaggggagcccggcgatccgtggggaggaaggcgaggatactgatgctgatgatgtcagtgactacaactaccctgcatctggcagtgccgaccagaagcagaagattgctgataggatgcgcagttggcgcatgaatgctgggggtggtggagacgtcggccgtcccaagtatgacagtggcgagatcgggctcaccaagtatgacagtggcgagatccctcggggatacatcccttcagtcactaatagccagatctcgggagaaatccctggagcttcccctgatcatcatatgatgtctcctaccggaaacattggcaagcgtgctccattcccctatgtgaaccattcaccaaatccatcaagggagttctctggcagcattggaaatgttgcctggaaagaaagagttgatggctggaaactgaagcaggacaagggagcaattcccatgaccaacgggacaagcattgccccttctgaaggtcggggagttggtgatatcgatgcatccactgattacaatatggaagatgccttactgaatgatgaaactcgccagcctctctctagaaaagttccccttccttcatccagaataaatccctacagaatggtcattgttctgcgtttggttgttctaagcattttccttcactaccgtattacgaatcctgtgcgcaatgcgtatccgctctggcttttatctgttatatgtgagatttggtttgctttgtcctggatattggatcagttcccgaagtggtttccaatcaaccgtgaaacctaccttgataggctggcattgaggtatgacagagaaggtgagccatctcagttggctgctgttgacatttttgtcagtacagtcgaccccatgaaggaacctcctcttgttactgccaataccgtgctgtccattcttgctgttgattacccagtggacaaggtctcttgctatgtatctgacgatggtgctgcaatgctgacttttgatgcattggctgagacttcagagtttgctagaaagtgggttccattcgttaagaagtataacattgagccaagagctcctgagtggtacttctcccagaaaatcgattacttgaaagacaaagtccacccttcatttgttaaagaccgtcgtgccatgaagagagaatatgaagaattcaaagttaggataaatggccttgttgctaaggcacagaaagtcccggaggagggatggatcatgcaagatggcacaccatggccaggaaacaatactagggaccatcctggaatgattcaggttttccttggtcacagtggtggccttgataccgagggtaatgagcttccccgcctggtctacgtatctcgtgagaagcgtcctgggtttcagcaccacaagaaggctggtgccatgaatgctcttgttcgtgtctcagctgtgcttaccaatggacagtacatgttgaatcttgattgtgatcactacatcaacaacagcaaggctctgcgggaagctatgtgcttccttatggatccaaacctaggaaggagtgtctgttatgttcagttcccacaaaggttcgatggtattgataggaatgatcgatatgcgaacaggaacactgtgtttttcgatattaacttgaggggtcttgatggcatccaaggaccagtttatgtgggaactggttgtgtattcaacagaactgctctatatggttatgaacccccaattaagcagaagaagaagggaagtttcttgtcatcactatgtgggggcaggaagaaggcaagcaagtcaaagaagaagagttcggacaagaagaagtcaaacaagcacgtggacagtgctgtgccagttttcaatcttgaagatatagaggagggtgttgaaggtgctggattcgatgatgagaaatcacttcttatgtctcaaatgagcttggagaagagatttggccagtctgcagcgtttgttgcctccactctcatggaatatggtggtgttcctcaatctgcaaccccagaatctcttttgaaagaagctatccatgtgataagttgtggctatgaggacaagaccgaatggggaactgagattgggtggatctacggttccgtgacagaagatattctcactggattcaagatgcatgcgcgaggctggagatcaatctactgcatgcccaagcgcccagctttcaaggggtctgctcctatcaatctttcagatcgtcttaaccaagtgcttcggtgggcacttggttctgttgaaattcttttcagtcgccattgtcccatatggtacggctatggaggacgccttaagttcttggagagatttgcctacatcaacaccactatttatccattgacatcgatcccgcttctcatatactgtgttttgcctgctatctgtttgctcactgggaagttcatcatcccagagattagcaactttgctagtatttggttcatctctctcttcatttcaatttttgccactggtatccttgagatgaggtggagtggtgttggcatcgatgagtggtggaggaatgaacagttctgggttattggaggtatatctgcgcatctttttgccgtcttccagggtctcctcaaggtgcttgctggtatcgacaccaatttcactgtcacctcaaaggcttctgatgaagatggcgactttgctgagctctacatgttcaagtggacaacgcttctcatcccaccgacgaccatcttgatcattaacctggtcggtgttgttgctggtatctcatacgcgatcaacagcggctaccaatcatggggaccgctctttggcaagctcttctttgccttctgggtgattgtccacttgtaccccttcctcaagggtcttatgggtcggcaaaaccgcactccgaccatcgttgttgtttgggcaatccttctggcttcgatcttctcattgctgtgggttcgcatcgatccattcaccacccgtgtcaccggcccagatacccaaacatgtggcatcaactgctaa

SEQ ID NO: 12678 - DNA, 4053 bp, Oryza sativa
  Clone ID: TFbOSC400272j.C1.o8.fg
atgtttgacgacgacgatgacgtggagccaccggttaacgatgtggacatctactattttgaggaaagcgaggacaagccagtctgcttcagtgtcttgcccataaagtttgatgagaacgaagaagtctcatgttctgattacaaggaactgaacttgcgtggatttacagataataaccgtcatgtgttcaagaaggtgatagcttggagggtagatcttgattgtcagaggccaaagatctcagtgctttcgagtgacgggaaatggatagaactgttgaaaccacggatgtgctattatgaaaaaaaagttcgatcaatattgatcacagtgcaaatgctccactttgtcaggaagtgtcccaagaaacaacagagaagcctttttgatcacctcggtgaagttttcaataaatttggtcctgtacctaatggggatgacataaagaagcaccatcatctaatcaagcttttcatggagagggatccaattttagtgaagtcgaagattatacgatgctttattgaggatgcttccaggaaggccattgagcccataccaaggagagcgtgtacagaagatcgatttattgtcagtgatgagtcacttgaaagcagtgatgactgcagctacagcaatagcgacagcagtgatgataataatgatgatagtactgatgaagatactgatactgatggtaatgcaactgatgatgatacagatatgatatgtgccatatgtgatgatggtggaaagttgcttagctgtgaaggtccatgcaagaggtccttccatgccagggtgaagcatggcaggaaatccaaatgcagaactctccgtttcacttctgtggagctaaagctaaaggaaagtggaactttcttgtgtgagaattgtgaacataatgaacatcaatgtttcaaatgcggagagcttgagccatcttatggtccaaatgctaagggatcgccggatatcattcaccatgcgcgatatgttggtgtcctctcaacaatacgccatggcttgatggtgtttcaatgtaataaagaatcttgtgggcacttctaccaccccaagtgcatcgcagtgctacttgagcctgaagacactgatggtgcttgtaaattggaggaaatgatcgcagatggtatgtcatttacatgccctgtccattggtgctttaaatgtgcaaagatggaggacaggacacgaagtgaattccagtttgcagtctgcagacgctgtccaagatcatatcacacagaatgtttaccaagctatcatgttctcatggcatcaaatggtatttttcacagcgaaatttcctttgaaacaaaggacaaaggtgccccaaaacttgcttggaaaattaaaaaaaggagttacttctactgtttacaccatggaatagatgctactactggaacacctagtggggagcatataaagttcccttctattccaaaaatcaagaaaacgaaaaatctttctaagaaggatgctaaagtgactggcaaaaggaaaaagagcggtaataaattttcaacaaaatccactaagttggcaaatgtgtcacctagaggagaaagcaagcaaaccagaagagtagcaaggaatagctcatctgagcatattgcactagaacatgggtgtgcagtaaagcgcttaaaaaaggatctgcagtttgaagtacctctggttgatgtttctgctagattaagtggtgcaaaaaccgtggaagggaaggaagggcaacctggaactccgtcttcatttgttatgggggaaatatcaaagagtgcatcttgtgcggtggatggtgaaacagaaaagagggtaacaagtacagcagaaaaggaaatatctgcagggacatcccaagatatggctacaaaggatgtactgaggcagcccaggattgagatagatggtttgtcagagtgtttggttcagattgctgataaacttcattggtatgtgcagcctggcaacacggaaagctgtggaaaattgccagatggggtgttattagagaggtccattgttgtcgtgagggagatagttgatctctgcttcaacatggataattttagtcgactgatgaaagaaaagcttgaagatgtgtctaaagggtgcaatttcaagaattatgatctcttccaacataagaacaatctgtgttttgatgagagcaactgggtgaccatgcaaccaaaggatttacctcatggattaaatctagttatggtcctggaccttcctcttgatatccaagccgtttcagcgaacaaatttgttgacaaagtattaacctttaagccaaggcttattataatagtttcccccacagatattgaaagattggattgcaaggaggagccctatcatttgatatgggaatataatcagcacatctttgggaagccattgtatcaacctggtgatgtggatgtgaatgacgacgcaaagaatggtttgcatgtaattcctctctgtgtttccttgtggagtttccctgacaagacagaggagaatatgaggatagctggaaaacatggccatttaaatgttgggcacaaggcacatagtgtcatgttgaaggattcttctgtggacaaaggtgctaagggggataacgagatcttcacagttggaaaagaagacactagcgagagagaacaaacatctgagcactgttcaggagaacgattgataattcccaatgtagttacttttcatgcaaatcaagagcagaatgatgagctacaaagcttgtataaggagaaacatgctaatggaagtggaggcggaaataacttgacatcaggaaaagagagtgatgtgcatcggggagagaatgcatgtgggcataactctgcagcacgtcaaaagacagagatctcgaagagagaaaacagaatgacggatagtacacatgaagagaacatgagatcaggaaaagagaagattcccagggatggcagcaacaaggggacagtgaagccagatcttgttgatggactacctccagataagcatgtagatgttgcatttgtgcacaagacaactaccaacagagtagatactcagcaagaatgtggatacaatgtggctgtagatgttgatgacaattatgctcttcaacatgagccaaagagtcctcacggcaatgataatctcagaggaactgaaatggatacttcaggtgacaattcaagaaaaaccagggaacaaaaggaggtgactgatggtaagagattggacttggataggaaaagagaagccgttcgcatgaaaaacgcgcgagatggtcatcatgaagatgatagaactgctcatcctcaatgtgttgacgtcaaaagtccttcgcataatgatgatcaaagagcacgaggggcttcagtatgcaagtccagaaagagggggacatcaaatagaatactagagtcaagggataccgtgagcgaaaattcagctagacgccaggtaccagtggaaagaagaaatggtcatgctccatattcaagaaggcctgattatagtgctactgcaaggcgtgggtccccttcttatccaagaagacgtagaagatcaaggcatttcagctctgaaagagactggagcacagttcctcctcgtggtaattcacccgataccgagtacgatggtactagatacaataccgagtatgatggatatggatcccagtcagggtgcggctaccatggaatggacactcttcctgttgatagatattatcctcaggagcaccacaatggtgcatatcgacctcagacaaattttggtgaggaggaacaggcggcggcttatggtaggcgtaggaatgatcatggatggggaccagattaccgccgtcgagacagtttcgactgggaacacaggagttcagctagagggacagttacagataggtatgtccctgaccttgaacagactaaccatcagataccaggtcaggctagcctacaagatggctacttcatgcgtagaagcaggtcttttgtgaatatgcatgtgccctactag

SEQ ID NO: 12679 - DNA, 3714 bp, Oryza sativa
  Clone ID: TFbOSC102169j.C1.o27.fg
atggctaagcctctccgctctaccgtcctcgtctgcgcctctgcggcgatggccccaacctccgcaccaagattgcccacttcggcgccgccgatctcgccggcgagctcccggaaaccgaaaccgaacagggcacgtgcgggtacattgtgccggagctcatcgcgggcggagcgccatcgcggcggtcggacgagtacgcgctgggcggcggtggcggcagaaggaggaggggaggcgatgcggcggtgggtggaccggaggctgagggattcgttcccggtggacacggtggaggagatgacgacgctggcgctccagtgcgtagccaaggacgcggcggcgcagccggagatgtcgtggcctcgtgggtcgccgccaaggtgtccaagctcttcctgcccagagccacagagacaagagtttggtggtggcaacccgctccggcggctgcctctcgtctctccaccaccccgtcccgccgattttccgcctcgacctggtggtgcagtgctcgattcggcagttcggggcttaccgagggcgcagggtgtcgatgtgcagcccgaggaatcgcatatccgaaggggagtcgaaattagggtttccctctactcgccgccgatgaaggggggccgcttgcaccgtctggagcggccgcccgccgcccacatcaccaccgccgcagccgccaccacgcccgctccggcgcccgccgatgattggggggatggctcgtggacggtggactgctcgtgcggcatcacgtacgacgacggggaggagatggtgagctgcgacgagtgcaacgtctgggtgcacacgcggccaagcgcgccccctcctccgccgacgaggctgaggtcgccgagctcctggccgagctggcccacccaccgcccacggccgttgtaccgccgatgggctgaagtccctctcccctcccgtgtccatgtccacgggcttccaggcggtacagacaccgccctattccgcagcgccgcaccctcccctgtattctcgtccgccctatggcgctgtgctgggtacgtacccaagagattcggcttccgctactgcgaattcccctactgggctgatgacaaggacggtgccaacgctctatttgcgctggctagagagaagcgcaaggaaaaggcagagactaggttccctctccgccttggagccatacacaaggacaagaattatgtcaggacgctgagcatttgcggcgataaggtggatggcgttgagcactctgtggacgatgacgcaaagaggacatctccaccaagtgatgcaaagaagagaggaacatccattagcattgtagagcctgatacttgggacaatggttgtgagaagaaaagggattttgatgtgccagctagtgaggatcagcatgccaaaacaaacatggtaaattctgatttgcacgtgcttgttgaagctaagaagaagagggcttcatcctcagaacgaagtggggataagaagtgctctgcctcgaaggaaattactgggatgctaaagaaatatgaacctaaggagtccaagcgattggtgatatcctcaggagttgcaacaacggcagctgtagcagagcaagaagtgcactcacgatttgtgaagctctacccacctcacttgagtgcgccaggtggaggagagatgcatggcagtgagctgcacctgccaatgggtggaggagcagagtggcaaagtcaccagcagacccttgcatggcgaaggtgcaaaccaggcgtgcaccagggtagcgtgtatgaaggactagacgggaatcaaaatgtaggtttacagactggagtaagatcgaatggagttgtgaaaagggatgatgccaaacgatcaaatggagatgtccagagcgatgctgctcctgagaaaatgaatgagggtctggatcttcagaagcaatcaaatcaaacttcaaatcttctggttgttggtggtgtaccggatttacagactaaccagtcagaatcattgactatcaagaaggaagcatctacagatgatcatgagagaaccgaggctatccagtttgtaagtgatgagcataaaagtggaaaacaagatactgcaatgttatcaacccttcagaggcattcgtccaagttagcatctgacttagtttatcaacatccaaagtctgaaacacaaaatccgatgcacacaataccagagcatccaaactcaagtttaggtaatgtgaaagtttgtacagcatcttctggtcctaactctaccacttttgatttatcttgctctttgctatccacagaaccatcatcagaagaaactactgttcgtttggtaaagaaggatcagacaaggttggtctcatccgctgacagcgaaaatgattttgcaaaaaaatctgagagttcccaggatcgcacaagatcctctgataaagttcaattgaaaggctttgttccgtctgcgccaaaatcatctcaaggaagtagaacatatgtatcttctgccaaaaatagatttatagtgccaaaggagcagttgcaaaagacatcaactgaaggaaacgctccaccagggtcattacaaggtgaagtggcacccttacattctcgtaataaggcaatgcctttgagcttttaccaaagaaaggacaagatccaccaccgctctattcatatcacacaggacacttccaatagttcagcatcggctgagctgcaatctactgaaacaacagcttcattgagcgatgaacagcttgcattgttattacatcaacaattgaacagctcccccagagtaccaagggtgccacgttgtcatcaagcatctaccatgcagatgctacatccaactggagctagtgtgttctcaaaacggtcttcagcacatggaggaagggatcaagcactggtcttaaagaagaggaacaaagatgatgcatggagagataatgatgagaccaagaagacaggaaaggtgtctagtgttgaacggaggcatagagatagtagcacagaacgtgtccttgctgcaaaagactcatgcaaatttactgaaaatatagaatcagaacagagaaatcgtggcatttgttcaactggagccacctctggcgtaggaaatgatgctccaatagatagaggtgtttcacatgatttacctgggttgattgaggaaatcattagcaaaaatacaaacataacatatggtgaactgtgcaacgctattcgccagcattggggggatttaagtaaacccaacgtggaaaacaatgcataccccaactatttacatgctgttaacgattgtcttaggaacaggaatgactgggctcaccttgttgaccaggctgcaatgatgaatccaaacaagcgccggaaggtagaggaaagtgactctttgtcagcagatgtactggcaaccgagaagacaaataaagaggctaaaaggggtccagaagacacaaatgctgaatcacaccatgaaattctgccaaggggcaaacgcaaggctcggaaatgcaggcgtcttgaactgaaagggaggagagtcaacgatacgaggaagagatctagctttgattcggcctctgatgatgatgataccaccttgtcggattccagtagtgacagaaatgacacccctatggataagagcctagaagatagttttgttatagctaagaatgcagattcaagttcatag

SEQ ID NO: 12680 - DNA, 5865 bp, Oryza sativa
  Clone ID: TFbOSC401196j.C1.o89.fg
atgccaaggaagaaggccagctcgccctcgccgacctccaccgccagggagactagaagctcctccgctcgtggtcatgcatcaccaaccccaaccccaaccctcaggaggtccacccgagaaaccacatccagattttcttcttcttcttcgtcttccgcaaacaagcacgaaggctcccccgccaagcaaagtgccaacaacaacaccgcaaaacggaagatgaataatgctgccgcagatacctccaccaggccaatcaagaagaacaaaaagctaaacgcaaagtcctatttagcactcttctccacaccccaacaaaccgccaaatcccctcctgcccctggaggaaattcccggctgtattctaactttggcaatgtagcccctcctctcctagtccaagtggatgacgacaatgcttccacggtgcctatgcaagacagtggcactcttctggagcatgaagaagctgacacacaagagcaaggttaccagtctggcttgcacaaagttcctgaggtggtactggaggagactgatgtctccaagaacaaagctgatgaacatgcttccacttctgaggccaagaagacaattgaagcaggtgatcccagagagatcaaaggggcttctacttcaaatcaggctttagtaacccattctgatggaacagattacaacgagtacctgtgtgctgtttgcagaagtagggaaaccccaggaattctcaagtttaaaatgaggcagctcaggagatgccaccatgaaaggctgtgggagaggtcttgtgatggaaaagattgcaaaaatcggtaccatgattcttgtctggatcctcccctgcaatatgtgtcgctaggtatctggttgtgcaccttatgtactaaaaagaggctccagtttggtttatttgcagtcagtgagggcattgaatctttgtgggatgttaaggaagtgaaatggaaagatctgggctatgagtatgcaacatgggagcttgagacttcatcatttttatgtacccctgaggctaaggatctgaaaaggaactatgagagccgccatgaagatgcaagaagaggttttgatcctgcaaaaataaataagggtaagcaatgtctgtttcagaaacttcagaagctaccggatgggttcccccctggtttagacaaagatcatttgagttcacttaaccggctccgcgagttctggcacaattctgatggtgctatttgtctcgatgatcaggagagagtaatcaaaaccattcttttttctatgtccatattgcctgatgtctgccaaccacttctcattgtctctacttctgcttctctctcattgtgggaagctaagttcaatcgcttggcaccatcgatcaatgttgttgtgtataatggggagaaagacgtacgcaaacagattcaagatttggagttttatgagaacggtttggtgacgtttcaagttctcttgtcccatcctgatgccatcctagaggacattcagaccatggaatcaattgtttgggaggcagttatggttgacgattgtcaaagcttgagagtttcaaaatgccttgaacaacttaagcatctttctaccaattttaggatggttcttttgagtttcccactcaaggagagtattcctgagtacatcaacctgctgtctttcctcaaccctgaaggaagtgtcatttcgagtagttcaaatggtgattttactgatacaggtgatatcttagcaacgctgaaagaaaaatttgctcgtcatgttgcatttgagcggaaagcagattcttcaaaatttttggagtactgggttcctgctcgtctttcacgagtgcagctagaaatgtactgttataccttactttcaaactccccagcactccgatcacactcaagaactgatagtgttggtgctcttcgtgacattcttgtatccctccggaagtgctgtgaccacccttacctggttgatcaatcactgcaaagctcacttactaagggccattctctgactgatattctagatattggatctggtggcggggctggcaaccctatgggtgacattttggatgattttgtccgtcagagatttggttttgagtcatatgagcgtgtagaacgcggattgctagtgccgaagaaacaaacagcactgaatatgttcaatgacaaaactaaggggcgttttattttcttgattgatagtcgtgcttgtgttccaagcattaaattatcatctgtcgatgccatcatcatatattgtagtgattggaatccaaccaatgacttgagagttctccagaggatcagtatagagtctcaatctgaatgtgtgcctatttttcgcttgtattcgtcttgtacggtggaggaaaagactcttatactgcgaagcatgatcatattcttgacagcaacgtccagaatacttgaggagttccaaaagcatgactactccagtaaagattctgaggatgatggtctcttcatgaataatgtatttttggagtttgcagcgaaactatccaccaacgttgaagccagcactaaaatggaaaatgcagtcatatctcgagctcagcagagtggatcgttttattctagagatattgctgttataagcgagagggagggaatatctgcagttgatggtgatttgccaaagttctggaccttctggtcaaatttactaggtgggaggtctcctcattggcaatatatatctgagccagtgcaaaggaaccgtaggaagatacaaaatatggaagaccaaatgagaatacctgcagaagaaactgatgaagcaataatgaaacgtagaaaaatcggagaaatcatggattcatctccgaagatcctacctgtcaaagacaatgatgctgtgctgcctgaaaatagtacagcatccagttctcatgaaacatcagttgatgacacttggcaagagctaggggcagaaagccttcagggcacacagaaaggtcttcacacccaactcaagccagagctgtcaaagttgtatgaattgttggaattgccggagactgtcaaatgtttatgtgaggaattacttgattacattttgaagaatcatcaatgttggcgtgctgcttctctcttaaagcataagatcaatcgaagagagtcacttgccctttctgtgagaaacttgaactatgagtgcgatgaagtgctcgctgaatatgtttatgagaagctaaggatcctcaagaaaaagttttcgcgtagagcaagtgaaacaagcaagcagagccaatctactccagtaaataacacatcatcttacaaacaacagacctcaccgaaattgagaagtgacggatcaatttgtcatcaggtaacgacaattgatggtgatttggaaaatgtttcacatgaagaggctccacatgatatcttgaccgaggagatgatattagaacagaaggaattgatatctgttctagaaactcatagagaagaacatgttttaagggatgaacttcttgaaagaatcacagagaaaagaattaatttaattaacatggttttctccttaagagaaaagaatattcaggataaacaaggaaacgagaccacactgttagacatgcacaagcaaaaggaagtggcaaagctgcaagaaacatgcaatttggtcgtggaacatcttcgtaaaggtcacattgattcagaggacagggatgccacggtgaagctaataattgaatggtttactttgcttctgtatgcatttttgaatcacatgagatgccagcataacaagttgaagatgcagcaatcaacttcatggaacaaggagttacaattgaaggaaattttccttcagcaagcaaaatctggccacttagatcgtagctttgatcaacaaattcctttaccagattcatgctttactttggaagaattcagccacttcaaggaaatagttggtaatttccctgtcggtgcagctacttcagcaaattgccagcattctttggcatcaaccatggaaattgcattggtccggagtgtcagtccatctgaagttgggaattcagaagcagcgataaatggggctgttgaagttcctgtccacaccgaaaaaagaccaacatcagaagttgggttgtcgcagaacaggatggacaatgattctgatggcattgactcacaaggagggccacctctggctgttcaacattcattaagttctaatcctgcaattgacaattccaataatttggaatcttcagttgccagccatagaagcgaacatcttggggatattgcagtggaagttaatgccgacaattgtggcactactcttgcagattcacctcacttagaggcaccaactgtggctgccctgcccagccagagtgccttgccaatggctatggaagttgacattcagacagatcatgtagttcagtctgcccagcagaacatagtgacaggacgagttccacaagaagaagagcgagaaggttcgaccactgtaacatcagctcagcctttgcaacctgaaatgcgaccatcaagtccagtatccggtattttgcgtgaaagaacaaatcctgatcagaggagggaaagtcgtcagccagaggctgcacctagttcggtggatccaacacaactctttcccgtggcatcactgatgtttaatcacccaccacttggcaatgaaccattgaaaaatgagctgcacagattacaagtacacatggattctcttaataaaatctacgaactgaagaaatcacaacttcaaacggagtgcagccaagaaatcgagaagataaaacagaagtatgatttgttaattaaagaacaagactccgctcatcatcagcacaggaagacactggatgacttgtatgggaaagttctcctaaaccaatcactagctgatgattttcgggtcaaatttgtatcaacatctgcagctcaagccagagccgtttctcctccactttgccagacaactcgccagacagctggggtatctcagcaggtaccaactaggccttcggtggctggatcgattgcattgccagtcggttcatcatcagctagtcgaccatcgctgcagaggcattgtgctcaaccatcgcatgtggatcggtcatcatcatcgggggggagtcattcatcatcgccatcttcacaagttgtacgacctcccccagcaatactaggcagcgttgtcagggcaacatcaactccttttagtcacacacctgcagcccgtggaaactatggagttgggagtgaagtagcacgggcaccagctccccatctccagttcaggctgccacgagcacatcccacggcccctgtaaatcagcagcagcggcagctcccagttaggctagagagcacatgttcaaggacacagttgactcctgtgagcaccccagtaaacgcaaggcagttgagttcacaatcagtttccccggtgagcaattcatcatcatcgtcaagctcacatccaggtccagcactctcaaatccagccttggcagcaaattcaagttcaaatccagttttgagtgcaggcacagtggcattgccgccaagtccacacccacccgagtcgatagcagcaccaaggggacagcaaaagggggcaccgtcaggcttgaatacagtgcctgttgtaggctcgggtttgccgccaagtaggtccatgtcagattcggtgtcgctggatgcatggcttacatccaatcttggtctgaaggacggtgaaaccagcacacctcgcactcgcatggatagtcatcgtacagtagatgtggtgtgcttgtccgatgacgaaccagaagagcactag

SEQ ID NO: 12681 - DNA, 5973 bp, Oryza sativa
  Clone ID: TFbOSC900291j.C1.o5.fg
atgccaaggaagaaggccagctcgccctcgccgacctccaccgccagggagactagaagctcctccgctcgtggtcatgcatcaccaaccccaaccccaaccctcaggaggtccacccgagaaaccacatccagattttcttcttcttcttcgtcttccgcaaacaagcacgaaggctcccccgccaagcaaagtgccaacaacaacaccgcaaaacggaagatgaataatgctgccgcagatacctccaccaggccaatcaagaagaacaaaaagctaaacgcaaagtcctatttagcactcttctccacaccccaacaaaccgccaaatcccctcctgcccctggaggaaattcccggctgtattctaactttggcaatgtagcccctcctctcctagtccaagtggatgacgacaatgcttccacggtgcctatgcaagacagtggcactcttctggagcatgaagaagctgacacacaagagcaaggttaccagtctggcttgcacaaagttcctgaggtggtactggaggagactgatgtctccaagaacaaagctgatgaacatgcttccacttctgaggccaagaagacaattgaagcaggtgatcccagagagatcaaaggggcttctacttcaaatcaggctttagtaacccattctgatggaacagattacaacgagtacctgtgtgctgtttgcagaagtagggaaaccccaggaattctcaagtttaaaatgaggcagctcaggagatgccaccatgaaaggctgtgggagaggtcttgtgatggaaaagattgcaaaaatcggtaccatgattcttgtctggatcctcccctgcaatatgtgtcgctaggtatctggttgtgcaccttatgtactaaaaagaggctccagtttggtttatttgcagtcagtgagggcattgaatctttgtgggatgttaaggaagtgaaatggaaagatctgggctatgagtatgcaacatgggagcttgagacttcatcatttttatgtacccctgaggctaaggatctgaaaaggaactatgagagccgccatgaagatgcaagaagaggttttgatcctgcaaaaataaataagggtaagcaatgtctgtttcagaaacttcagaagctaccggatgggttcccccctggtttagacaaagatcatttgagttcacttaaccggctccgcgagttctggcacaattctgatggtgctatttgtctcgatgatcaggagagagtaatcaaaaccattcttttttctatgtccatattgcctgatgtctgccaaccacttctcattgtctctacttctgcttctctctcattgtgggaagctaagttcaatcgcttggcaccatcgatcaatgttgttgtgtataatggggagaaagacgtacgcaaacagattcaagatttggagttttatgagaacggtttggtgacgtttcaagttctcttgtcccatcctgatgccatcctagaggacattcagaccatggaatcaattgtttgggaggcagttatggttgacgattgtcaaagcttgagagtttcaaaatgccttgaacaacttaagcatctttctaccaattttaggatggttcttttgagtttcccactcaaggagagtattcctgagtacatcaacctgctgtctttcctcaaccctgaaggaagtgtcatttcgagtagttcaaatggtgattttactgatacaggtgatatcttagcaacgctgaaagaaaaatttgctcgtcatgttgcatttgagcggaaagcagattcttcaaaatttttggagtactgggttcctgctcgtctttcacgagtgcagctagaaatgtactgttataccttactttcaaactccccagcactccgatcacactcaagaactgatagtgttggtgctcttcgtgacattcttgtatccctccggaagtgctgtgaccacccttacctggttgatcaatcactgcaaagctcacttactaagggccattctctgactgatattctagatattggatctggtggcggggctggcaaccctatgggtgacattttggatgattttgtccgtcagagatttggttttgagtcatatgagcgtgtagaacgcggattgctagtgccgaagaaacaaacagcactgaatatgttcaatgacaaaactaaggggcgttttattttcttgattgatagtcgtgcttgtgttccaagcattaaattatcatctgtcgatgccatcatcatatattgtagtgattggaatccaaccaatgacttgagagttctccagaggatcagtatagagtctcaatctgaatgtgtgcctatttttcgcttgtattcgtcttgtacggtggaggaaaagactcttatactagcgaagcatgatcatattcttgacagcaacgtccagaatgtaatgcctatcgtgagccattccctgcttagttggggtgcatcgtttctcttcaatagacttgaggagttccaaaagcatgactactccagtaaagattctgaggatgatggtctcttcatgaataatgtatttttggagtttgcagcgaaactatccaccaacgttgaagccagcactaaaatggaaaatgcagtcatatctcgagctcagcagagtggatcgttttattctagagatattgctgttataagcgagagggagggaatatctgcagttgatggtgatttgccaaagttctggaccttctggtcaaatttactaggtgggaggtctcctcattggcaatatatatctgagccagtgcaaaggaaccgtaggaagatacaaaatatggaagaccaaatgagaatacctgcagaagaaactgatgaagcaataatgaaacgtagaaaaatcggagaaatcatggattcatctccgaagatcctacctgtcaaagacaatgatgctgtgctgcctgaaaatagtacagcatccagttctcatgaaacatcagttgatgacacttggcaagagctaggggcagaaagccttcagggcacacagaaaggtcttcacacccaactcaagccagagctgtcaaagttgtatgaattgttggaattgccggagactgtcaaatgtttatgtgaggaattacttgattacattttgaagaatcatcaagtcagtcaggagccaaagggcatattgcatgcattcaacattgccctgtgttggcgtgctgcttctctcttaaagcataagatcaatcgaagagagtcacttgccctttctgtgagaaacttgaactatgagtgcgatgaagtgctcgctgaatatgtttatgagaagctaaggatcctcaagaaaaagttttcgcgtagagcaagtgaaacaagcaagcagagccaatctactccagtaaataacacatcatcttacaaacaacagacctcaccgaaattgagaagtgacggatcaatttgtcatcaggtaacgacaattgatggtgatttggaaaatgtttcacatgaagaggctccacatgatatcttgaccgaggagatgatattagaacagaaggaattgatatctgttctagaaactcatagagaagaacatgttttaagggatgaacttcttgaaagaatcacagagaaaagaattaatttaattaacatggttttctccttaagagaaaagaatattcaggataaacaaggaaacgagaccacactgttagacatgcacaagcaaaaggaagtggcaaagctgcaagaaacatgcaatttggtcgtggaacatcttcgtaaaggtcacattgattcagaggacagggatgccacggtgaagctaataattgaatggtttactttgcttctgtatgcatttttgaatcacatgagatgccagcataacaagttgaagatgcagcaatcaacttcatggaacaaggagttacaattgaaggaaattttccttcagcaagcaaaatctggccacttagatcgtagctttgatcaacaaattcctttaccagattcatgctttactttggaagaattcagccacttcaaggaaatagttggtaatttccctgtcggtgcagctacttcagcaaattgccagcattctttggcatcaaccatggaaattgcattggtccggagtgtcagtccatctgaagttgggaattcagaagcagcgataaatggggctgttgaagttcctgtccacaccgaaaaaagaccaacatcagaagttgggttgtcgcagaacaggatggacaatgattctgatggcattgactcacaaggagggccacctctggctgttcaacattcattaagttctaatcctgcaattgacaattccaataatttggaatcttcagttgccagccatagaagcgaacatcttggggatattgcagtggaagttaatgccgacaattgtggcactactcttgcagattcacctcacttagaggcaccaactgtggctgccctgcccagccagagtgccttgccaatggctatggaagttgacattcagacagatcatgtagttcagtctgcccagcagaacatagtgacaggacgagttccacaagaagaagagcgagaaggttcgaccactgtaacatcagctcagcctttgcaacctgaaatgcgaccatcaagtccagtatccggtattttgcgtgaaagaacaaatcctgatcagaggagggaaagtcgtcagccagaggctgcacctagttcggtggatccaacacaactctttcccgtggcatcactgatgtttaatcacccaccacttggcaatgaaccattgaaaaatgagctgcacagattacaagtacacatggattctcttaataaaatctacgaactgaagaaatcacaacttcaaacggagtgcagccaagaaatcgagaagataaaacagaagtatgatttgttaattaaagaacaagactccgctcatcatcagcacaggaagacactggatgacttgtatgggaaagttctcctaaaccaatcactagctgatgattttcgggtcaaatttgtatcaacatctgcagctcaagccagagccgtttctcctccactttgccagacaactcgccagacagctggggtatctcagcaggtaccaactaggccttcggtggctggatcgattgcattgccagtcggttcatcatcagctagtcgaccatcgctgcagaggcattgtgctcaaccatcgcatgtggatcggtcatcatcatcgggggggagtcattcatcatcgccatcttcacaagttgtacgacctcccccagcaatactaggcagcgttgtcagggcaacatcaactccttttagtcacacacctgcagcccgtggaaactatggagttgggagtgaagtagcacgggcaccagctccccatctccagttcaggctgccacgagcacatcccacggcccctgtaaatcagcagcagcggcagctcccagttaggctagagagcacatgttcaaggacacagttgactcctgtgagcaccccagtaaacgcaaggcagttgagttcacaatcagtttccccggtgagcaattcatcatcatcgtcaagctcacatccaggtccagcactctcaaatccagccttggcagcaaattcaagttcaaatccagttttgagtgcaggcacagtggcattgccgccaagtccacacccacccgagtcgatagcagcaccaaggggacagcaaaagggggcaccgtcaggcttgaatacagtgcctgttgtaggctcgggtttgccgccaagtaggtccatgtcagattcggtgtcgctggatgcatggcttacatccaatcttggtctgaaggacggtgaaaccagcacacctcgcactcgcatggatagtcatcgtacagtagatgtggtgtgcttgtccgatgacgaaccagaagagcactag

SEQ ID NO: 12682 - DNA, 1293 bp, Oryza sativa
  Clone ID: TFbOSC401546j.C1.o3.fg
atgcacgcgcaccagcaccagcacgcgctgctcgcggcgctcctcgcgtgcgcgctcgcggcgtcgtcgtcgacggccggagcgcagccggcggggcagcaggggtatgcctacggcgacgtgtccgggcagcaggtgcacgtcagcacgacgatgatcgtgctgctggccgccgtcgtcggggttttcctgttcatcgcgatctccaccatctacctccgccactgcaccggttacgaccccgcgacggagggcggcggcgtcggcgggagccgttccatgatcctccctgccaacagcttcgtctcgaggcggcagcggcggccgcgcgggctcgactcgtcggtggtccggatgttccccaccatgaagtacgccgaggcgaaggcgctgcgggtggggaaggtcgccggcgccgcgctggagtgcgcggtgtgcctcagcgagttcgaggacgacgagatgctcaggttcctgcccaagtgcagccacgccttccacccggactgcatcggccagtggctcgccagccacgtgacctgccccgtctgccgccgcaatctcgaccctaacaaggacaccaccgaagaggtgatcatcccggccgccgccgccgccgatccgaacagcacctccagtgaaatagttgtgatacggcaagaagacggggcgcacccagcagccgtggtgatcgacgtggtcaccgaggaggacgacgaggagcggaggaaggaggagctagagcttcaggcgataggcacccagctccgcgcgatgcggtcacggtcggggctgcggccaaagacgtcggcggcgaagcttccccggtcgcactccactggccactccctcgccgtccggctcgacggcgacctagagcggtacacgctgcggctgccggagcacgtacacagggagatggtcgcggcgggggagcagagcgtgcgccgcgggaggagactcggggaaggggtcggcatgggcgctcggtgcagcccccggttttcgcggtcgggcagatggtcatcttttctctcaaattctttgtcaggaaagctgtctttcctctccccgtcgtcgaggagaacgccggatagcacccaggtggaagtgtcatcatcctcgtcgtcgtcggtgacgaaggtgaaagggaagcgcgtggccgccgtcgatgttgccgacgacggttctgctcatgggactgcacagtaccctggttgcactgtggccagctcggcggcggcggcggctgtggacgtggagaaggcagctaccaggcaagttcgaacatag

SEQ ID NO: 12683 - DNA, 819 bp, Oryza sativa
  Clone ID: TFbOSC401826j.C1.o29.fg
atggaaggaggcggaggcggaggcggaggcggtggcggaggtggaggtggaggaggcggaggcggggcaccgtacgccacgcgcacggcggaggaggtcttccgcgacctccggggccgccgcgccggcatgatcaaggccctcaccaccgatgtggagaagttttacaagctctgcgaccctgaaaaggagaacttgtgcctttatggatatcctaatgaaacatgggaggtgaccttgccagctgaggaagtgcccccagagatccctgaaccagcattgggaatcaacttcgctagggatggcatgaatgagaaagactggttggcgttagtcgcagttcacagtgattcctggttactgtctgttgcattctactttggagcccgatttggttttgacagagaagcaaggaggcgactctttaatatgataaacaatttgccaacaatatttgaggtagtgacaggagccgctaagaagcaggcgaaagaaaagactcccaacagtagtagcaagagcaacaagcctagttcgaaagtgcagtcaaaagctgagtctcgttcgaaatctaagctgtcagcccccaaggatgaagagggaagtggtgatgatgagggagaggaagaggaggatgaccatgacaacactttgtgtgggacctgtggaaccaacgatggcaaggacgagttctggatctgttgcgataactgcgagaagtggtatcatgggaagtgcgtcaagatcacacccgctcgtgccgagcatatcaagcagtacaagtgcccggactgcaccaacaagagggcccgggcatga

SEQ ID NO: 12684 - DNA, 2094 bp, Oryza sativa
  Clone ID: TFbOSC419229j.C1.o1.fg
atgccgtccatgcgcgcgctcgagcggctcgcctcgtggccgacgcccccgccgccacctccgccgccgccgccgccggcgaaggcggcggcggcggaggcggagaggccgtgtccgccgtcgtccgccgccaccacctcgtcgtcgtcttcttcctcggcctcggccgcgcccgcggcggcgggggcgccgcgcgtctacccgctgcgggacttcccggggagggaggcggcggggctgggcggcgcgttccgggacaacgtgcggtggctgctgaggcagtggggcggcgcctcccccgcctcccccgccgccgggggtcctgggtcggcgtcggcggcggtggcggtggcgtggcgggtgctcctctccgacgaccgcaccggcgtcgtcgtccccatcttcgccgtcgaggagcccgtcgcgtcctcgcccaagccgctctgcgattactgccgctgggcgggttggagccaccattgggtgtcaaagcggaagtaccatttcattattccggcgcccgctgactgggaccgccagcttgctgctgatgtgatccttggacgcaccgaccacctcctccatggcctgatccacagcaatggttttggtcaccttgtcatgctccgtggtcgcgatggcggctccactgcactatctggccgtgacatcatggacatctgggattgcctctgctccgctcttcgtgccagggctgtgtctgtggtggacttttcccagaaacgctctctggatcttcgtctcctgctcagcgtggcacatggtgacacatggttcacccgatggggatactgccttgcaaggggttgcttctgtgtgtctacctcgacctatgcagcttccgtggaagcgttggctgccctgcctgtggactatcttcgcagccgtcacgtccgccgtgtggtaaccatttaccgccgcctatccaacaaacctctggttacagtccgtgagttcctccgctgcctccttgattggaagcaccttgagccaccccttcaattacctcctgtgaagacatgcacacggctgcaattcatgctgccaaagccatctgtgatgaagagacacaggcagcagccatgccagcgctttgaggatgtgattgacctgctccagtgtcgctggtccaagaagcggcttcttgatgctgcagaggttgttgttgacaggctgctagagcatggcagcggggcagagatgacacggcaggcggtgcgagatgctgcaaggggcgccattggtgatactggtctccttgactttgtcatcaagtcccttggtgataccattgttggcaactatattgtgcgacgtgtgcctgatgctgaaacacgtgtgcttcactttagccttgaggaatatgaagagccaacaccagcactgttggatgttgaggtagagtgcacaccattgccacctgtggtacggtggcctagcacagtggaagtagagcgagatctgcgtgctgtctaccgagcaatggtcgaggtgcgcagtgaggcagcacaggctgtgctggactgcaagcactgggtgaagtggtggggccttggggatgagtccgatgaccagctgaggtttttcgttgagtggcaaccccagccatgggaagctgctgagcttatacggccaatgccactgggggagattgtggtggtaccactccatgcatccatgggtgagcttcttgtcgagtcagagcatgcgctgcgggacacttactacttctttgaggaattccaggctgaagggctgcatggcattgctggggagaaatgggatccagtgatgcttggtggggcagagaatggtgacacaatcagcgtgtatggcaatggggcagacatggaaactgagctgcggtgccatggtggacttgacttgtgggaggtgcggtgcgtgtgtggtgcgcaggatgatgatggtgagcgcatgatagcatgcgatgcttgcgatgtatggcaccacacacgttgcgtgggcattgcagacagcgagcctgtgccaccattatttctttgtgtgctctgcggtggtgcgctcatggcggctggaccgatcaattcttga

SEQ ID NO: 12685 - DNA, 2688 bp, Oryza sativa
  Clone ID: TFbOSC900291j.C1.o21.fg
atgtccacctcccccggccgcacccgctccggccgccccctctcctcctcctcctcctcctcctcctcctcctccgcccccgcccctgcccccaagaggcggaggagaccggacaagccccccgaccacgaccccgcccccgcccccgcccccgacaaggatcttctcgtctcccctcacacgcctcctatggacgccgaggcgcccaagcccatacacctcctcaacgacaaggacaaggacaaggagggggacgatggatctcaccaggatacacccacgctacagtcaccccctcgtggatctgatgctcatccaataccaacggagctcaatgtttctgctgctgtcgccaggcctccacaaccaccccatgcacaaccaacggagctcaatgctgttgccgccgccgcgtctgctctaccaatggagcttgatgctgctgctgctgctgctgtgcctgccgaatcaacggagctcaatgctgctgcaaccgctgtgcccgcacaaccgacagaggtcaatgctgctgctgagattgtcaaaccaattgggctcaatgctgtcgctgctgagactgcaaagccagacatggccatggaattgcaggaaccgcctactgtaactgcagccaatgggagggatgtttcccatgaatcatttgaacaaaacctgcaacaccaggtcctggacaatgccttaaccgatccttctttgcttgccgagagcactgcaacaccagcctctactgctggcctcaagcctgcgaggcgcttcacacgatcgctgctcaagaacaaaccagaggaagagcccacagctagcaaaagtcaagaccctgctgtctccatgatatcggaggacaacaacgaggcctctgttgatttggctcttgccccagggaagccacagaggaggttcacaaggtctcttctcaaggtaaaggttgaggcgcgctctaccaacaatttgcttcaatccaaggaggcaattgacagcacatcagactcttctcggtcagtgaagaagatggagatgaagatgtctaagaaggtcgcctgcctcacaaagcacccaagcaacattagagagttgctcaacactggcctgctcgagggaatgccagtcaggtacatcatccccagtagcaagttgcagaaggctgtgctgaaaggagtgattacaggctgcaatatccgttgcttttgtttatcctgtaatggttccaagaacatctttcttcatcacaaactgaaatctttggaagctttttgtgtcaacgttgccttgagccaaaacaacatcaagatcccccttccccatcttatgcttgtaagagcaattccagggacaccgggctacacaaattggtctttaaagttctgcttgatgaggaaagttgatgggtatatcaaggatcaaagaatctactgtaatcactgcaaccgagtggttagcccgtcagcatttgaggctcatgcgggtgagggaacaagacgcaagccgtatgacaatatttttacatcaaatggagtatcattacatgagctgtcaatgaaaatatcaaaggacatggaattatctgaacgcgaaacagatgatttgtgcagagaatgtggtcaagggggagatattttcccttgcaaaatgtgcccaaggtcatttcacccagcctgtgtagggctgtctggagtcccctcagagtggtattgtgataattgcagcaaccttgttcaaaaggaaaaggctttagcagaaaataaaaatgctaaagctgctggaaggcaagctggagttgattctattgaacagataatgaagagagctatacggattgtcccaatctctgatgaccttggtgggtgtgccctatgcaagcagaaagattttaacaattcagtatttgatgagcgcactgtgatactctgtgaccaatgtgagaaagagtatcatgttgggtgtttgcggagccagtggcaagttgacctgaaggaattaccagaaggggagtggttctgttgtaatagttgctcagagattcgttcttccttggacaagataatctctgatggagctttgattttggctgagtcagatattgatatcataaggaagaaacatgagatgaaagggttaagcatggacactaatacagatctgagatggcgattacttgctggtagaaaggcttctgaagatggtgacttattgctctctgctgcagtcccaattattcatcaatcttttgatccaatcattgaagttcagagcgggagggatctaattcctgagatggtcaatgggaggagacccaaggatggaatgcctggccaagattatagtggaatgtactgtgcagtgttaactttaggcacttctgttgtgtcagctgcattgttgcgagtcatgggaggtgaagtggccgaactgccactagttgctacaagtaaagaccttcaaggactgggctacttccaagctttgttctcgtgcatagagaggatgcttatttctctgaagatcaaacacttcatgcttccagccgcccaggaagctgaaggcatctggatgaacaaatttggcttcactaaaattcctcaggaacagtcggatgcttatcttaatggggcacacctgactatattccatggaacgtcaaatctgtacaaggctattccttcgtcataa

SEQ ID NO: 12686 - DNA, 735 bp, Oryza sativa
  Clone ID: TFbOSC401827j.C1.o32.fg
atggagatggccgcccccgtctcccccgcgccgcgcaccgtcgaggacatcttcaaggacttctccggccgccgcgccggcctcgtccgcgccctcaccgtcgatgtggatgagttctacggattctgcgacccagagaaggagaatttgtgcctgtacgggcacccgaacgggcggtgggaggtggcgctgccggcggaggaggtgccgccggagctgccggagccggcgctcgggatcaacttcgccagggacgggatgcaccgccgcgactggctctcgctcgtcgccgtccactccgactcgtggctgctctccgtcgccttcttcttcggcgcgcgcctcaacggcaacgagaggaagcgcttattcagcttgatcaatgaccatccaaccgtgcttgaagcactgtctgataggaagcatggaagggataataaatctggtgccgacaatggcagcaaatccaggcactcaggaaagcgagcaaatgacgtgcagacaaaaacctcgaggccagcagttgttgacgatgggtacgatgaagaagaacacagtgaaaccctatgtggaacctgcggtggccgctacaacgccaacgagttttggattgggtgcgacatttgcgagcggtggttccacggcaaatgcgttaggataacaccagcgaaagcggaacacataaagcactacaagtgccctgattgcagcagctccaagaagagtaggcaataa

SEQ ID NO: 12687 - DNA, 2256 bp, Oryza sativa
  Clone ID: TFbOSC400505j.C1.o44.fg
atgggcaccggcggcggcagggtcgccctcgacggcggcggccggcgccggaggaagctggacgaagaggatgatgaggagtatgtggcggacgacgacgaggaggaagacgaagacgaagacgaggaggagtaccaacaggccgccgccccctccgacgacggcgaggaggggggcgacgacgaagcggagccggaggacgaatctgatgcggatttcgtcggggacgaggaggaggaggaggaggacctcgaagacgaagatgatttggaggaggtcaaggcgccgcgccccaagcgcccgcccaaggggaagccgccgccgagatctcgccgtcggaggcaaaaggacgacgacgatgactacgaagaggaggaggaggaggacgccgacttcgatccggacgtggacgaagacgacgaggaagagaaagacagcaccaagaaccacgtggccaagcggaagccaccacccggccgtaagaagaagaagaggaaaccttctagggtttctaaggcaaagcctaagaagcccacctcagggcgccgccggaggaagcgatgggccaccgatgacgacgaggaagaagaggacgatgcggatttcatcgtggaggacgatcaggaagaagaggaggacgaccaccgcccaaagaagaaggccaaggctgctaggaagaccagggatgtcacgccggagccggatgtcgaggcaagcgcatggccggccgtcgaatcagacacttcagaattcgaattcgtgacatctgatgaagaagctgctgacaaggaagcaccagccgctgaaccagcaaaaaccaaggggaagaagggcaggaagaggtggggatctgggtcagagtcatcatctgattctgattatgtcatatcagagcaggaactgaaggatctggaagtctccatgcctccagatgcagctctgcaatcacctgcaaccctgccgcgccggacctttctttcaaggagggtgggggagaaggggaaagagcctgaagaggcttggaaacagacatgtgggatatgcctctcggaagaacagagagccacgatacagggtgtgcttaattgctgcgcacattacttctgcttcgcttgcatcatggagtggtcaaaggtggagtccaggtgcccattgtgcaaacgccgattcacaacaattaccaagtcatcaatggcagatctagggcttggatcaaggaaagctgtcattagggtagaaaaacgtgatcaggtgtatcagcccacagaagaggaaatgagacgttggttggatccgtatgaaaatgttgtatgcatagagtgcaatcgtggtggtgatgacaacctcatgctactatgtgatatttgtgattcctcagcacatacctattgtgttggtctaggaagacaagtaccagaaggaaactggtactgcggaggatgtagatccggtggggagggcccctctgcacaggatacggtggttcactgcagagaaagtaataccaaccctgccaacagtagttctggatcatttggctcagccacaccaagtggagtgttccagagaccaccaccaatcaacacccaaccttctctacaaggattcgatctaaatctctcaccaagagaaacccctgatgaagataagcgagaagagtcacatgtttcagctgatgctgtttcgactcctactggaaggcatgccactctcgataggaggcgggcctttaaccgacgaattcgcatccttctatttagaccaagggtcacacctaatgggtggcagaatccgattcagtctgacaggacaataccagagaatgaacaaaatccacagagcacgtccactccaactgaagtgaacccatcatgttccagggatagttctatgcagaaccagcagagtagctcatcttttgttcagccagcaaggggtcttattgaacgcacctatgggggtggaagcaatttccaacaaacagaaggtgctaaggaacagctgattcctattgtcaagaggaacctcaaactaatgtgtgctcagtccccattgggtcaatctgatttcaagaatgttgcacggagagcaacacacactatcttagcactgtctgggattgcacacaacgaggattttgttgtcactatattggatgagcgagagatggaaatgaacattgtgcaatcaaatgttatgttgagaaatggttgcagtacagagtacagaccatgtctaagttgccttagaagttag

SEQ ID NO: 12688 - DNA, 777 bp, Oryza sativa
  Clone ID: TFbOSC421348j.C1.o6.fg
atggacgcatcctaccgccgcgacggccgcggaggcggcggcggcgggggcggcggcggttccgcccctcgctccgtcgaggacatcttcaaggacttccgcgcccgccgcaccgccatcctccgcgccctcacccacgacgtcgaggatttctacgcgcagtgcgatccagagaaggagaatctgtgcctgtacgggtacgcgaacgaggcgtggcaggtggcgctgccggcggaggaggtgcccaccgagctgccggagccggcgctcgggatcaacttcgcccgcgacgggatgaaccgccgcgactggctcgcgctcgtcgccgtccactccgactcgtggctcgtctccgtcgccttctactacgccgcgcgcctcaaccgcaacgaccggaagcgtttgtttggcatgatgaatgatttgccaactgtttacgaagtcgtatctggttcaagacaatctaaggagagggacagatccggcatggacaacagcagcagaaataaaatttcatcgaagcataccagcgacgtggcgcgtgtcgaaaataatatcaaggaggaagatgaaggctacgacgaggacgatggcgaccacagtgagaccctatgcgggacttgcggtgggatatacagcgccgacgagttctggatcggctgcgacgtgtgcgagaggtggtaccacggcaagtgcgtcaagatcactccggcgaaggcggagagcataaagcagtacaagtgcccgagctgcagctccaagagacctagacagtag

SEQ ID NO: 12689 - DNA, 2040 bp, Oryza sativa
  Clone ID: TFbOSC419173j.C1.o1.fg
atggcgcctaagatggtgatcagcctggggagctcgcggcggcggaagcgcggcgagatgctgttccggttcgaggccttctgccagcccggctacccggcgaacttcgccggcgccggcggcttcagggacaacgtgaggacgctgctcggcttcgcgcacctggaggccggcgtccacggcgagaccaagtgctggtcgttccagctcgagctgcaccgccacccccccaccgtcgtgaggctcttcgtcgtcgaggaggaggtcgccgcctcgccgcaccgccagtgccacctctgccgccatattgggtgggggaggcatctgatatgcagcaagaggtatcacttcttgctgccgaggagggaatcggcggcggaagccgacggcctgtgcttcgcgatcaaccacggcggcggcggtggcgcggagaaagcgtcgtcgaaagggacgacgacgacggcctccagcagaggccacctgctacacggcgtcgtgcacctcaacggctacggccacctcgtcgccctccacggcctcgagggcggctccgacttcgtctccggccaccagatcatggacctctgggaccgcatttgctcagccttgcacgtaaggacggtgagcctggtggacacggcgaggaagggccacatggagctgaggctgctgcacggcgtcgcgtacggcgagacgtggttcgggcggtgggggtacaggtacggccggccgagctacggcgtcgcgctgccgtcgtaccggcagtcgctgcacgtgctcggctccatgccgctctgcgtgctggtgccgcacctgtcgtgcttcagccaggagctccccatggtggtcaccaagtaccaggccatcagcggccacaagctgctcagcctcggcgacctcctccgcttcatgctcgagctgcgcgcccgcctgccggccacctccgtcacggccatggactaccggggcatcatgtcggaggcctcgtgccggtggtcggcgaagcgcgtcgacatggcggcgcgcgccgtcgtggacgcgctccgccgcgccgagccggcggcgcggtgggtcacgcggcaggaggtgcgcgacgcggcgcgcgcctacatcggcgacacgggcctcctcgacttcgtgctcaagtccctcggcaaccacatcgtcggcaactacgtcgtgcgccgcaccatgaacccggtgaccaaggtgctcgagtactgcctcgaggacgtctccagcgtgctcccggcggtcgccgccggcggcggcgtgccggcgcagggcaagatgagggtgaggttccagctcacgcgtgcgcagctcatgagggacctggtgcacctgtaccggcacgtgctcaaggagcccagccaggcgctcaccggcggcgcgttcggcgcgatcccggtggcggtgcggatggtcctggacatcaagcacttcgtcaaagattaccacgaaggacaagccgcggcgagcagcaatggcggtggcggattcgggcatccccacatcaacctgtgctgcacgctgctcgtgagcaacgggagcccggagctagctccaccgtacgagacggtgaccctgccggcgcacgcgacggtgggcgagctgaagtgggaggcgcagagggtgttcagcgagatgtacctcggcctgaggagcttcgcggcggactccgtcgtcggggtcggcgccgaccaggagggcctcccggtgctcgggctggtcgacgtcggaagcgccgtcgtggtgcaagggagcgtgggcgagcagataaacggggaggaccacgagaggaaggaggaggcggcggcggcggccgtgtgcgaggggagcggcggcggcgagcgcgtcgtggactgcgcgtgcggcgcggtggacgacgacggcgagcgcatggcgtgctgcgacatctgcgaggcgtggcagcacacgcggtgcgccgggatcgcggacaccgaggacgcgccgcacgtcttcctctgcagccggtgcgacaacgacgtcgtgtcgttcccgtccttcaactgttag

SEQ ID NO: 12690 - DNA, 771 bp, Oryza sativa
  Clone ID: TFbOSC413151j.C1.o11.fg
atggacggcggctacggctcggtcacaatcgtccacgacgcgcgctcccccgaggacgtcttccaggacttctgcggccgccgctccggcatcgtcaaggccctcaccatcgaggtggagaagttctacaagcagtgcgaccctgagaaggagaacttgtgcctctatggactgcctaatggaacctgggcagtgactctaccagctgatgaagttcctcctgaactaccagagccagccctcgggataaacttcgctcgtgatggaatgcaggaaaaagattggctgtccctgatagctgtccatagtgattcatggttactgtctgtggcattttactttggggctcgttttggatttgataaaaaggccagggaacggctcttcatgatgaccagtagtctccccactgtctttgaagttgtgtcaggaggtgtgaatacacaatcaaaaaccgccaacggcagtagcaaaaacaagtcaggctctaagccaccaaagcggcccaattctgacagcaagccacagaagcaggtccaggcaaagtatgaggaagagaacggcggcagaggaaatggaggtgatgaagatcaagctgaaaccatttgtggcgcctgtggtgaggcctacgcaaacggcgagttctggatttgctgtgacatttgtgagacctggttccatggcaaatgtgtccgaatcacccctgccaaggcggagcacatcaagcattacaagtgtcctggctgcagcaacaagaggaccagagaatga

SEQ ID NO: 12691 - DNA, 1318 bp, Oryza sativa
  unsure (1)..(1318): unsure at all n locations
  Clone ID: TFbOSC16959j.C1.o1.fg
atggagtcagaagcaggcagtgcacctaatggttgtacatctacagtaaaggggtcagaagagaggcacagtttggaacgtcgtcatgatgatggctcatgtatctcagagattaaacttatttctaatatggttgtaaagaaaaagagggggagaagagcacctccatcttctagaagattaagtggtaataaggttattagtggtgaagatgctgttcaaaatcgcaaccatgctaaagaagaagaccaggctggtaattcttctgatgtggcgttgtcgccatctagcaggaagacagaaggtcaagatcagtcgacaaaccccaaagatttgtttgagaaagcttgccatcaagctacagagatggttactgaaagcacaactggttgcaagaaatccttttgggaagaaaagggaagtgataataggagaggcaggcaagctacactttgtgtgaaacaggatgggcttgatattgaaacaacaggcaaggatgtctctgcaagtgaagcttatgaaaaatccagcacactggaagatacttctgttgggcatgcagcagcaaagagtgttaatcctgaggataattctctagatcctatggataatgtgtctgatacacatgtgaatgccacatcttctgaggacaaaagttctgaagaagttgaggacgtgaaagtgtgtgacatttgtggagatgttggtgaggaggagaggcttgctgtttgcactacatgcaatgatggtgctgagcatatttattgtatgcgggtaatcatccaagaggttccagagggtgaatggttgtgtaaaaagtgcgaaaatgaattggaatatgaaaagaagaagcaactagaaaaatctcagctgaaggttggtgcctcaaaaagccagttctttgaaaggaaaaccaatanaattgccaatgcatcaaaaagcaattcttatgaagatgaaccctcaaaagcccttgaagggaaaattagtaaacctgacactgctttgaagaacagaagttcttttgaaaatgaagtggagaatgaaaatggagataagaaagagttgaattcaacaaaccaatgcaataatagcaattcgaagaggaaggaagaaggtgcagggatcatttcctcgattaaacaaagtattactgaacgctgtggtttctccatgggagctgagtccagaaaaaggttgccattgtcatgtgagagctcatttcggttggatgtagagaagggaaagcaagccgctaccaaagtaccaacttcattggcatttgacgctgccaagaatctgggaccaccacttcgtg

SEQ ID NO: 12692 - DNA, 5091 bp, Oryza sativa
  Clone ID: TFbOSC422248j.C1.o10.fg
atggaggggttggtggggagggcggtgaggaaggagttcccggggttcggggtgttcgacggggtggtggagtcgtacgacgccgaggcggggtacttccgggtgatgtacgaggacggggactccgaggaggtggagcttggggaggtggtggggttgctggttggtgggtcgccggttggggtggagatggcgcatccgctgccgttgacgcccgggcggcgcccgaagaagcggcggcgcggggatgaggaggggggcgttggcgtgggcgcggtggtggcgatggaggtggattccgtggttctggctgtccccgccggtggcgcggagcccgcgtcgccggtggtggtggtggaggggagtagtagggatgaggtggatggggacgtggtgtcggagatggcggagaagaggcggagggtggtgagtccagggcctgagtcgtccgggaagccgcttcggcggagcgcgcggcaggcgaaggcggccgcgcgggtggccgaaatggaggccgccgccgctgtggcggccgccgctgaggctgaagcagctgctgccgcgatggccgaggccgaggcagaggctgctgttacgccaccgcagtctgggagtaagcgtaagcgtgcaagcggggctggcaggtatcggtctgtcgcgaaggatttggagaaggctgcggtggagaggctgcctccgaagccggagcttccaccctcgtcgcagagtttggatttggaaggtctccctgctctcgacgtctttcaagtgtactcctgcttgaggtcttttagtaggcagctgttcctgagcccgttcctgctggagacatttgtggctgcactgcggtgtatatatgtgaaccctttgattgactgggttcatttttctctcctgcgagcgatgaagagtcacttggaagatctcgccaatgaaggagaccctccggcaatgcattgcattaggaatcttaactgggagcttttggacctagcaacttggccaatctatcttgctgagtacctattgactcgtggttcagaactgaggtatggtatgaagcttacagacctaaagctgttgaatacagagtactatactcagccggcaatggtgaagttagagttactgcgcgcactctgtgacgatgttctggaaattgaggctatacgttctgaagttgtttcaaggatgtctgagttggatgggaatgatgagctttgtaaaagcactcgtacaagaagaaaaaggagggcttctgctgtcaagaacctactgaattcttctcgggctcctgaagattccagtgacactgaagatggtaacagcgatgagtgttatctttgtggcatggatggtaatttgttatgttgtgatggctgtcctgctgcatttcactctaaatgtgtgggggtagtggaagatttattgcctgaaggtaattggttttgcccggagtgtttgatacagaagaatgatggattcaaaaatatggtaaagcctggaagaggagctgaggttctgggaatggatccacatgaccgactatactttggcacctgtggctatattttggtggttgagtcaactgctgaggattctctggactcgacatgtcattactatggcatttttgatcaccattcgcttttcaatgtgctaagaacatgccatccctcgtacagttcaatcactaacatgatatctttgttttggggcactgcaattgattcttttgattccaatggtcgatgtgaaaataacaaggaattcagtatctttgatgccaagatagactgtagtcatttattgccatcgaagcaacacacagaacatgagcagcttaagtcagataagaatggctcctgtgaacaattggcctgtgggaaagctcatgcctcggatccagatcggctggatcatgacacctctcaccacaagttctccttgagatctgcggttatttctgaaaatggaaatgcaactagtgccaagactcagcaagatgtttgttcttatgctaatggattgcctgctgagaataagatagaccaatcacctcacaaaaagataagtgattgttatatccattcgaaccctgctatgtacgtaaactactacagttttggtcaaatagcagcatcagctgctgaagagttgaaggacaagctatcggaaaacaaagaaggaaagaaagttggtcaggatgcagcttcattccagctaaaaacaatatgtaagaaatatgccaatatttttgctctgacagatcaaaagttgtctgtagagctgcgaaaggaaaaatgtggttggtgtaattcctgccaaatcagtggcggtgttgattgcattttcagagtcaccgatggcaaatgcatggagggtcttcagtcagaaaagaatatgaacagccatattattcttgccatacatatcatcttgtcaattgaagaacggctaaatggtctactgattggtccatggaaaaatccccaatttagcagttattggcgtaaggcagttctgaaggcttcagatgtgtcatcattgaagcaacctctccttatgttggagtccagtgtgcgacgtgttgccttctcagtggaatggcaaaaaccagcagactctgttgaagttgttgggtctgcagctcatgtcttggttcgtacatctaataaatcctcgagacatggaagcactagaaagccagggagaaagccatttattgttgaactcaaagttgactctcgtgatgttggtgtttactggcgaaggggtgggagattgtctcgtcaagtgtttcactggaagaggttgccaaagtccttgacatataaagctgttcggcaagcggggcgaattaaaatcccaaccatattatatagtgatggttcacagtttgccaggaggtccaaatacatagcttggcaagctgctgtggaaatggcagaaaatgtggcccagtttattttgcagatcaaagagcttgaattcaatatcaggtggactgagatattgagcactctccctgctagccttgcaacaaaggaaacccagaaaatagcacgtcttttcaagaaagttatagttcgcagaaagcgtgtagatggaacaaatgtggaatatttacttgattttgggaagagggagaatattcctccagttattgctaaacatggaaaaaaacttgacgaaccctctaatgagaggaacagatactggttaagtgaaggacatctccctctgagtcttttgaaggcatatgaagctaaagcattaactcgcttactgaaaaagaaagatattgatcaccttccaaagaagatgattgacttgaaacccccaaagccaaaaaaatcaggatttgatgatctcctagaaaaagcaaaaaagcaagtccttgggctttgtggccattgtgacaaagaagtaaagatcagtgatgctgtgaactgccaatattgtgaagcacttttccataaaaagcacttcaaggttcctagaggtgctactgatgcttattatgtttgcaacaagtgcctatctgagaaggtcttgaatgtgaagtctccacagaaaaaggttgtatcaaagaagaactctctgaaaaagaagacaaagaagcaatcacttaagattgtaacaagaagtaaacagattgttgccaaatccaagaagaagatgggcaagaataagggcaagcgtggccgacctaggaagtacccgctgaatgagtcaaagaataaattgccagagttgcgtgtgaaagaaccagccaatgtgcccaagaatgagccagctaaacgtatatcaaaaagattatattcaaagtacatgaaaggcaattcaaatatatctgagcgttcagcaaagaggaggaggactgcttctcattattcatactggttagatggccttcggtggacacaaaacccaaatgatgatcgggcaatatcttttaggacagaaagagttgtctttccctgcgaagatgctgatctgtctgaagtttttccagtgtgccgtctatgccagaaatgctacagtggagaatctatttatattgcctgtgaagattgtggagattggttccatggagacatctattctattactcttgagaatgttaataatctcataggtttcaagtgccatagatgccgtttgaaagatgtacctgtttgtccgtatgtacaaacagataatatccttatggctcaatctgataaggatgacgtcacaagcagatctatagaggacaaggaagacaggagcccaacagatctggttgcccatgacagtctggaagggtctcatggtcatatcattgagaaagaggttaatgatcatagttttgaaaaggaagttggtgatcatatttgtttgcaagcgcaggaagatcataatgaaaaggagctcgacagtcatagcactgagaaagagctcggtgatcataacaagacggaagagtttgatggcaatatgaaagtgctatttaatcttaacagtacaaaggagcttgatagtactagcactgagaaagagcttggtgatcataacaagatagaagagtttgatgtcaatatggaaatgttcttcaatcttaacaatacgaaggagcttgatagtactggagaaagcatatgtgctggtggagaagcacactgtctgcatgagctcaacaaccatgaaattcttaaggagtgtcatagtcttgacaataacctgggtgaactcgataatcaagactgccaaaaagagtgtcataatcaaaatagtctaaaagagcttgaaaatcatcgaagttcacaagagcttgatagtcataaaagtccagaagagcttgataatattataagtccaaaagagcttgactgtactgaaaataatgaacactctgctgcagtgacgcagtcggatggttttcttgatgaccccttcaacattaggatatctgacaaaggactgatcatagcatcagaaaatggtaagataaaggaatctattcctttgcaaaccaagaataaacctgaggagaatcctgttcctgctgatcatgacattgatcttcaggtggtggtgactttatag

SEQ ID NO: 12693 - DNA, 2922 bp, Oryza sativa
  Clone ID: TFbOSC415418j.C1.o2.fg
atgatctttaagcggaaccagcggtcggagatcctctcgctgaggcggtgcaatgccgggggcggcgccggggtcggggaggacgatggggacggcggcgagcggcggcccaagaggcggaggggcgacgagttcttccccgtggagctgctcggcgacgtgccggtcgccggcatcccctacgccgccttcgggttccgctggtgcgaggaggccgaggtcgcgtccccggccgctgcctcgcgggcagcagccgccgccgcggcggcgtctcgaccgccggtggtgcgcacgtcgcgcgggagggcccaggtgctgccctcgcggttcaacgactcggtgctcatcgacccctggaagaaggataagccggcgaagccacctgttccggccaaggctgtgcagctagtgcccaaaagcgaggtgttatatcgcaaaggtgcaattgctgataggagtctaacaatgtcagagttagatgaaaatggcgatgatgattatgaggaaggccacaactttgttgcctccaggaagtactccatgtccctcagcacggtcacttctgtacacggtgaaccatacagctattaccatagaaagggactgatgaaaaggcaatacgatgacgatgacgatgacgatgacgatgacgatgacgatgacgatgacgaggacgaggaggcggaggaggaagaagaagaggaggaggaggaggaggaagagctatcttactggaggaatgattttgtgtatggcgacattgtgtgggcaaggctcgggaagcggcagccggtgtggccgggggtggtggtcgatccagcacagccagctgctgcccaggcattgccaccacagccacgcagcggtgctgtgctttgtgtgatgctgttcggctgggctgcagaattcggtgatgagaagaagttcatctgggtgaggcaaggagggatatttccatttgtggactacatggaccgatttcaagggcagacagaactaagcagttgcaaacctggtgatttccagagggcattagaagaggcatttttggctgatcagggattcttcgaagttccaatggatggcaacacaacaggacagcctgcacgttacaaaagagcacttcaatgtgagagttgtggaaattgctttccaaataaagacccaagcatgatggtgtatgtaatggaacaacttgcttgcagacagtgtgctaagatactgcggtccaaagagtattgtggtgtatgtttgaaaagctggcaacataaatgtggaggaagatggaaaagtagcaagcctgacaaagttgcagttatctgttttggcatggaaggaacttacctacgagatcttgaactaatttcttgccattgtggtccatgcaagggacaaaaatttttgttcaatgaatgggaacggcatgctggctgcagaagtaaaaactggaagtcaagtattaaaatcaaggacacgcttatgccgtttggaaaatggatagagcaacatcaatcaagttcatattccacaaatcctgcaaagcgctcctctcagaaaatgaagaaacaaaagcttcttgatttgctaagtgaaccatatgatactgtaaatgtaaaatggacaacagaaagatgtgcagtctgtagatgggttgaagactgggattacaacaaaattgtaatctgtaacagatgccagatagcagttcatcaggaatgctatggcgtgaggggaaagcaagacttcacctcatgggtttgtagggcttgtgaaacacctgatcaaaaaagggagtgttgtctttgccctgtaaaaggtggtgcactgaagccaacaaatgttgataacttgtgggtacatgtgacatgtgcatggtttcagccacaagttgcttttgctagtgatgagctgatggaacctgctattgggatattgaatattacgcctttgctattcatgaagatgtgtgtcatttgtaggcaaatacatggttcgtgtacacagtgctacaggtgctcaacttattaccatgccatctgtgcatcaagggcaggctataggatggagatacgctgcttggaaaaaaacggcaaacagacaacaaacaagatttcatattgtgctcatcatcgggcccctaatcctgacaatgttttgataattcaaactcctgctggaactatctcttcaaaaaaacttgttcagagcaatggcactgtagctgcttcaaggctgattaggaaagatcttcccaaggattcagtgtcagaagttgaaatttcagagaacttatctgcagcaagatgtcggttttatgttaagaaagaactaaagagatctcgggagggagcaattgcacaccgtgtaaggggatcctgtcaacatcgatgggatgaaatcgacagtttgaatccacctagggaagagagggatccagagtccttttctacttttaaggagcgtctacactatctgcagaaaacagagcataccagagtatgctttggtaggtcaggaattcatagatggggactttttgctcgtaggggcattcaagaaggagaaatggtgctcgagtatagaggtgagcaggtcagacgaagtgttgctgatttaagggaagaacaatatcgtgtacaaggcaaagattgttatcttttcaaaatcagcgaggaagtagtcgttgatgccacagataaaggaaacgtggcacgcttgattaatcattcttgcactccaaactgctatgcaaggattatgagtgtggggcatgacgagagccgtattgtcctaatcgccaagaaaaatgtctctgccggcgaagagctaacgtatgactacttatttgaccctgacgaggctgatgatcgcaaagttccttgcctctgccaaacggctaattgtcgtaaattcatgaattag

SEQ ID NO: 12694 - DNA, 4437 bp, Oryza sativa
  Clone ID: TFbOSC401520j.C1.o5.fg
atggcccgcgccgagggcttgccggagggggccgccccgggcgtcggggtggacctgtacgcgcaggccaggaaggccctgtcggtgcggacgccgttcgagggcgaggggacggcgcctagggttcccacgctgcccgcgcggctcgtgaactggtcggggcagagcgacgcgcggaagaagcacaagaagattcagccccaggacgtggctgatgtggagctcccgccgcagccagccacggagccctctgcgaagactggcgtgtgggagcagttcgaggcgtatttccggccggtgaatttggatgatattgatatgttaatgccaaagtttccgttcggctatggcgggctcgattcgtgcatcctcataccatttgtgggcagtggcaaggaattgatggacacagctgagacatttgatgtggctgtggctgaaacaagctcgtacttgggtctgggtggtgaagaaagagtcagtaacaaggagcatagcgaacggagtgagcgaagtgagcaaagtgttgagcaaggcatacatgaggtgattgtgcgacagttcgttggtaacaaggaacgcggtgagcagagtgtagagcagggcatacatgaggtggttgtgcaacaggagaattggccattggaagtggagcaagctactagcagtgctggcattgtatcatcaaaatgtgaagaagagggagaatcatcactgaattggttgctaggatcaaaggaacggtttgtgctcacttcagaacggcccaacaagaagaggaagcttttaggtgtggatgcagggttagagcagcttgttctgctaccgcgctcgggagctgaggctagttctgtatgtgatgtttgttgtttgggggagagtagtacggtgtccaatagcatgctcaattgcaaccgctgtaaggtaactgtgcaccagaagtgttatggtttgcatgttgtgcctgatggccagtggttgtgcacttggtgtaaggatttggagtcactgcagtcgttgaagaaagatgcggacaacaccttgtcgatgccttgtgttctatgcccaaaagagaaaggcgctctaaaacctgtcaaaggggagcctggtcaaacagcgcatggggggaaccttaaatttgtgcacttgttttgtagcctttggacaccgggagctcttgtggaagacatggaatcaatggaacctgttactaatgttggaagtgtccaggagaatcagtggaaattggtgtgcagcatttgcaaggttaagcatggtgtatgtgtccgatgtagtcatggaacatgccgaacaccttttcatcctatatgtgcacgagagtccaagcatcaaatggagatatggggaaaatttgggtatcctaatgtcgagctgagagcattttgctcaaagcattctactattggatatgccaattctctagagagaagtaactgtgcatctcaccagagtcctacagaagcaaggctaaaagatgcaaaccttatcactggaaaggtaccaaaactaagattcacgcgcaagaacaaggataaattcatgaactatgaagccactagctttaactctagtaaccttatcaaagtagagaccatagagcaagcctctttaccccacactgttagaagttcagattccctagcaatccaagggatggaagtggatactgacaatctctcggttggtgggaaccttatgagaaactctgctgatgttgctcttgttcttagaaagctaattgatcaaggaaaggttagtgttggtgatgtagcatctgaagtgggtatttcttcagaatctttggaagctgctcttgtgggtgaaaccaccactttttcccatggtctgaaactgaaaattatcaagtggctccaaaattctgcacatataccagctgctcaggcaaagattcttaaagggggcccaatggtggtgcataatagcaaaccaggcaggtctgaggatacaaatagtgtaaacatgaagaattcattggttccgaatgatgagaaaggaacaacagcttacttgtcagattctgctgtgatgaaatcctcatcaacaagatctaaagataataacaagattatgagggataacacagctgtctgtgcaactggagtaacaacccttttgcagaatggaataaaaaagatggctgaagcaggcgctgagcgtgagtgttcttcccctgctgaagattgtgctaaaggtactccaaaggaagagcatggaggattgatatcgaacaacatctctggcaatacacaatttggaacttccatggcgataccaaatgaaaataaaggtacatctcctggaaagaaaagatataacttaactgaggctgaacctggctcggagctggagggtgtctcttcattgaatcaatattttcctccaggtgataatgtaaaacatgagttaaacttggttgaaaatggtgttgggaataaccatgattgcaacgcagatcatgttcctggacagcccttttccaacttcaatgattcacactattatatccatccactcatcaaggaaaagatgactcagctttgggacaacacgttcaagcaagataagctggcaccatgtcaccctgaagatccgttatgttatcccgatgagagaaggcgtgtgggttcctcgataaaacttacagaaacaacagatgtgatggatcaagtttcaagagcaaaatccttgggtatccttgagcactcacctgatgatgaagtagaaggggaaatgctgtacttgcaagccaggctacttgacactgctgcctttctgaagcacagatatgaagatttaatagcaaaggttgtccagaatctctctcgtgagttggatgctttcagtaggagaaaatgggattttatttttgtcaatcagtttctccgtgatgttagagaagctaagaaacgtgggagaaaagagaagagacataaagaagcccaggccattctggctgcagctgcagctgcagttgtggcctcctcacgtaactcaactgtgagaaaagatgccaatgatgatgtagtacctgctaagcaagagaattctccaaaatttggcactggacctccaaacgttggccagcggacttcttcactactacgactcaaggatttgtcaaagccacccaacaacaaaatttcacaagataataaccgcagcacttttcatatgccaaattattccaaagaaaatgcactatactgtgatgtatgcatgcgaagtgagactgtgttgaaccggatatttgtctgctccagatgcaaggctgcagtccacataggttgctatagaaatattgagaatatttctggcccctggaagtgtgaactttgcgaagatatttcaccagaagacacttgtgttggtgatcaatcagattgcaatggcacaaacctgtccttagtgcagtgtgatctgtgccatggcacatcaggtgcatttagaaagactgcagatggacagtggattcatgctttctgtgctgagtggttgttggagactgagtatgtgaggggacaagatagtccagtcaaaggaatggaaagtcttgtaaaggacaaagatacttgctgtgtctgccttcatactgttggcgcatgtctaaagtgcaataatggggactgccaaaccacttttcatccttattgtgctagacatgctggtttctacatgaacacaaaaggatctggtggtattttgcaacacaaggcatattgtagcaaacacagcatagagcaaaaggaggctgatatgcaacagtatggacttgaggagttcaacaacatgaaaagaatgagggttgagttggaaaaattgcgactcttgtgcgagaggataattaagagagaaaaggtgaagcgtgagagggttctatgtgatcatgacatacttgccaaaacgaaggatactcttgttttctcctaccttacacatggagcaagttcagaatctgccactacttctgttaacaacaaatcatacagtggaaccatgcaaaggtctgatgatgtcacagtggacagtactatttctgggaaaaaggcgatcaggttttctctgaataacagggatgctgagataaacacagctgatagctcaaggacactgatatcgttcaaacggaagtttagtgaaagaggatcacttgctggtaagcagctcccgcgaagaccagttacctcacagaaattggaagctggagaaaagaagacgaaggataagaagaatagggaaacatttcaaaaggagctttttatgacatctgatcaagcttctacacagaaccaacgtcttccgaaggggtatgcatatgttcctcgtgactctctttctaaagacaagttgcggaatcgaaatacacaggcccatgaaccacaagagcctggtggatag

SEQ ID NO: 12695 - DNA, 5016 bp, Oryza sativa
  Clone ID: TFbOSC401369j.C1.o50.fg
atgctcgcgtcccgcatcccgctcaagcgctgcaccgccgccgccgtcgtccccctccccggggagttggagatggaggaggggcccaccccccccgccgggggtggtgaggggagcggcgcggcggtggtgcccgccaagcgccgccgcgagcgggtggtcccctcgcggtttagggactcggtggtgtcgctgccgctgccgcccgcgaagaaggggaggcccgcgaagaaggcggccgcgcgggagggcggggacggggaggtgtacgatgtggaggtgcgcgcggtggagcaacaaggcgcgacggcggcggccttcggcgccgtggagaccgcggtgtggcccggcgacgagcggccggcgcagacggaggaggagctgtaccgggcgtgcaggaatatccgcaggagcagcagctccagcgggttcagcggcagcgtggtgacgtcgctgagcaatgccggcgggagcgtggcgccggaggggaagcccgtggtggtggtggagtgcaagccgaagagggagggcggcgataaaaaggaggatttttactggccggaggatttcgtgctgggtgatgtcgtgtgggcgaggtccgggaagaagtgcccagcatggcctgcggtggtgattgacccactgctccacgcgccagcggtcgtgttgaactcctgcatcccgggtgcactctgcgtcatgttctttggattctcttctggcgggcatggcagggactatggatggattaagcaagggatgatctttccatttgtggactacttagaccggtttcagggtcaggctttgtataaactcaaggcaaacagattccgtcaagcaattgaggaggctttccttgctgagcgtgggttttgtgagctcgaaatggatgaggggtgctcactagagaagtctgtcaatgaccagtctgtccctgacgggttacaggaagggagtggttctaacaatgaccaggaatgtcaatcggaggctcaggttgttggcaaatcaactggatgttgtgatagttgtggtaatcgtgttccacccaagatcgcgaagaaaaagaagcaagcgggagagcagttactctgtagacactgtgataagctattgcagtcaaagcagtactgtggcatatgcaagaaaatctggcaccacacagatggtggaaattgggtttgttgtgatgagtgtcaaatttgggttcacgtagaatgtgacctaacatgcatcaacatggaggacttagaaaatgccgattacttctgtccagattgcaaatcaaaacgcaagacagtacctcctgttgaacaaatgaacactccgaacagttcagaatgtgctagcacttctaaggaaaaactgccggaaatgatacctgtgttctgctttgggatggacggaatgtatttacctaagaagcacatgatactatgccaatgtaattcttgcaaagaaaggctgatgagtctgagtgagtgggagagacatactggttcaaggaagaagaactggaagatgagcgttaaacttaagagcaatggggatccattggtaaccttgttggatgatattccctgcgcaaatgtgaagtcttctacaccaagtattaataaagaagagttgctgaaattgctaggtacattggctcttgagtttatgttggtttctgcagttgcaaattcttttagacctgtcaatgctagatggacaactgaacgttgtgctgtttgtcgatgggttgaggattgggactacaataaaattattatttgcaacagatgccaaatagctgtccaccaagagtgctatggagcacgtgatgtacaagattttacaaattgggtctgtcgagcatgtgaattgccgaaacaaaaaagagaatgttgtctttgtcctgtcaaaggcggtgctctcaagccaacagatattgaccaactatgggttcatgttacatgtgcctggtttcaacctaaagtctcttttcctgttgatgagacaatggagccagccatgggcatattgagcatcccttcagagtactttaagaaggcatgtgttatatgcaagcagatgcatggtgcctgcactcagtgctacaagtgctctacttattatcatgcaatgtgtgcatcaagagcaggatatcgcatggagttgcaatactctgaaaaaaatggaaggaacataacaagaatggtttcctactgtgcatttcacagtactcctgacccagataatgtcttgatagttaagacgcctgaaggagttttctcaaccaaatttttgccccaaaataatgagaaacagagtggtacaagacttgtcaggaaagagaatctacaggagaaagtccttcctgctaaaatttctgactgtccagctgcaaggtgcctaccttatgaaatgctgaaaaataagaaagaaccaggagaggcaattgcccacagaataatgggaccccgacatcattcccaagagtcaattgagggtttgaacgcttgcatgaaaatagaaaacaaaagggtctcttgtggtcgatctggaatacatggatggggactctttgctgctaagaaaatccaggaggggcaaatggttatcgaatatcgcggtgaccaagttagacgtagtgttgcagatttgagggaagcacgatatcacagggagaagaaagattgttatctgttcaagatcagcgaagacgttgtcgttgatgcaacagagaaagggaacatagcccgcctaattaatcactcgtgtatgcctaattgctacgcaaggatcatgagtgttggcgatgaaaagagccagataattcttatcgccaaaagagacgtctccgctggcgaagaactaacctatgactacttgtttgaccctgacgagtccgaggactgcaggtttttctctgcagttcagtttcagtttcagataggccgtgagtggcgctgctgcagccacccgagagttgaaacggacctcaaaacacttgctagaagattttggaaagttgctgccccttactggtggtcagaagataaagtgcaagcgaggctgaggcttgctgcagtatttgctcttacattagcaactactggaattagtgttggatttaactttctgggtcgtgacttctacaatgcccttgctgacaaggaccaggaacaatttaccaagcaactgctgtattacttgggaggttttgctgtaggaataccgattgtttatacaagaattatatcacatatcactagattttccttctttgtcttgagagactatgcaagggagaccctttctttaagatggcgatcttggatgacaagttattacatgaagcgctactttaaaaatagaactttctataagattcaatctcaatcactaattgataacccggatcaacggatcaatgatgatctcagtgcattcactggaaccgcgcttgcattttctctgacatttttaaatgctgccgtggacttgatatcattcagtaacatcctttatgggatctatccaccattattcattgttcttattgtctactcccttgggggcactggaattagtatcttccttggtaaaaatttggtcaacttgaacttcatgcaagaaaagaaagaagcagattttcgttatggacttgtccgagttagagaaaatgctgaatcaattgctttttatggcggtgaagaaaatgaattgcaacttttgttggatcgattcaggagggcttttgaaaaccttagcgaattgctaatagcatctcgtaatctggagtttttcaccaatggctaccgttatttaatccagatcctgccagctgcagttgttgctccgatgtacttctcaggaaaaattgaatttggagtaataaatcaatcagtgtctgctttcaatcatatccttagtgatttttctctcattgtgttccagtttcagtcaattagtgcattctcggcggttattgatcgtctaggtgaatttgatgatctgttggatggaaatggttcatctttatccaagcctgataacattgatgggatcaacataattttcaagagcactggtcctactgtactgagttccaatggatcaccgacacaatctaatccatccatggttcttgagatttgtaatttgacattattaacacccaggagtggaaacattcttattactgacctcactatggaactcaaagaaaaggaccacctactggtaatggggcccagtggaagtgggaaaacctctttgttacgtgctttggctggcctttggaccagtggtactggggacatcatataccatgtgagaggttccatggagcttcaaacatcaaattcaggtcctgatgagccatccaacatacagtcaaacggtgaagaactgctacaaagttcaaagcagagaagggataatggtatattctttgttccacagagaccatatatggttttgggaacccttcgtcagcaattgctctatcctacatggactgaagatgtttgtcattcatcaaataatgatcctcaaagtacagaccctcttacctttgaagtctccacatcagatggagttggttccaagtctgagatgcccacaactgatgaactgatcagagtacttgaggctgttaagttaggctatatattgcctcgtttcaatggtttggattctatgcatgattgggccagcgttctctctctgggggagcaacagcgtcttgcatttgctcggttgttacttgcaaaaccaactttagtcctccttgatgagtccacaagtgcactagatgatatgaatgagcgtcatctatacagtcagattgaagctgcagggattacttacataagcattggtcaccggaaaacactgcacaagttccacaacaaggtcttgtacatttcaaattccgattcaacggatagcaacccacgtaattggtacctaaagcccacagaacagatgtcgattgaagagtcatcctcatttgcttcataa

SEQ ID NO: 12696 - DNA, 2133 bp, Oryza sativa
  unsure (1)..(2133): unsure at all n locations
  Clone ID: TFbOSC403241j.C1.o2.fg
atggtggtgaacagccggccgctgaagagggcgaggacgcgggtggaggccagggacttcgctgggttcccgccggcgggggacggcggggctgccgggacgttccgggaggcggtgagggggttcctcgcgaggtacgcgcggctgctgcctctcccctctatcttctcgccggcggccgccgcggcaccgccgcatctgttgacgtggagggtgtcgctgcgggtcggcgaggagggggacgaggagggcggcggcggcgccgtggagctcaacgtcgttgaggaggatgtgctccgatcgcgatctgtgtattgtgaccagtgcagagtcgtgggatggagtggtcacccggtctgtgggaagcggtaccatttcatcatcgagaacgacaacaaccaggtgtgcggcaagcgccacagctgctgcctccgctgcgggactcccacagtcgctggagaatcaagatgcctcctatgcaactttgatatggatggcgaggagctggaggagtgcgggtacatgcatctggacgacaacacccacctgctgcacgctgtggtgcatgcaaatggttatggccaccttctgagggtaaatggccgtgaaggtggctcaagatgtctcacgggccgtgacataatgagtttctgggatcgcttgtgcaaggtgctacatgtgaggaaagtaactgtcatggacatatccaagaagcatggaatggaatacaggcttctgcatgccatcacaagtggccatccttggtatggtgaatggggatacaagtttggcgctggtagctttgcactaacctcagatacttaccaagaggcagtggatacgctttccggtatacaactcgcgttgtacttctcacatcgccagcccattcggacccctctgcagaacacgattgctctgtactgggcactctctgatcgccagcttgtgactgttcgggacctcttccggttcataatgcacctgcttcatcaagcacgcaagaagaacgagacatcaaaacccacaactgatgaacacaaagaagttgcatctaatgtgctctgcaagtggacaaaggaagatattgatcgggcagaaactgcaatgctcaaggtcctacgggttgttcagcctggacagtgggtatcatggcgtgcacttcggggagctgcatcgaaggctgttgattcacaggagctacttgactattctcttcgaggactgggtggaaaactgatggacgatggccatttcatagctgtccgctgcaatgctgagacgagtgcaattgaatacaggctggaagataactccaaccagtcagttgatgcggctgcgtttgggccttctgttgatcatcttctgcacgatctgaagttcctctataacgctttgctgaacccagaaaccatgttggcttcacagccagaggttataggtgcatcatcacacagtgcagcagcaaagattctcgactgcaagcagttcatcaaacattacgatcagcacaccccacgggctcctttgaacccattcctactttctgtgaggtgttccattgaacttcttgatcacccaaaagactacactgcaccaccggtggaactagtgcttttaccagcaagtgctacccttgctgaactgaaaatacaggctacaagggcctttcaagaaacatacctcatgttccaaagctaccaggttgaacagctccctgacttcccaaattttagtgacacaaccctcgtgaagcatgtgcttggctcaagccagctcgtgagggtaagaggaaggtgcactggggataaccgaagaattgtgcaattcaggatggaaagggggttggagaactggacggtcgactgcacctgtggagccaaggacgatgatggcgagaggatgcttgcatgtgatgtttgtggagtttggcaacacaccaggtgttcagggattagtgattttgatgatgtccctgagaagttcatctgcaggaagtgtgctagtccacgcagagaaangggtcgtgtgggtgnaggtgcaatgtggggtagcagaatgaatgcttccatgtcgtggctttacactatgaaaggcagccatatagtagaaagtggtgtcctgcaattttaa

SEQ ID NO: 12697 - DNA, 2151 bp, Oryza sativa
  Clone ID: TFbOSC403247j.C1.o23.fg
atggtggtgaacagccggccgctgaagagggcgaggacgcgggtggaggccagggacttcgctgggttcccgccggcgggggacggcggggctgccgggacgttccgggaggcggtgagggggttcctcgcgaggtacgcgcggctgctgcctctcccctctatcttctcgccggcggccgccgcggcaccgccgcatctgttgacgtggagggtgtcgctgcgggtcggcgaggagggggacgaggagggcggcggcggcgccgtggagctcaacgtcgttgaggaggatgtgctccgatcgcgatctgtgtattgtgaccagtgcagagtcgtgggatggagtggtcacccggtctgtgggaagcggtaccatttcatcatcgagaacgacaacaaccaggtgtgcggcaagcgccacagctgctgcctccgctgcgggactcccacagtcgctggagaatcaagatgcctcctatgcaactttgatatggatggcgaggagctggaggagtgcgggtacatgcatctggacgacaacacccacctgctgcacgctgtggtgcatgcaaatggttatggccaccttctgagggtaaatggccgtgaaggtggctcaagatgtctcacgggccgtgacataatgagtttctgggatcgcttgtgcaaggtgctacatgtgaggaaagtaactgtcatggacatatccaagaagcatggaatggaatacaggcttctgcatgccatcacaagtggccatccttggtatggtgaatggggatacaagtttggcgctggtagctttgcactaacctcagatacttaccaagaggcagtggatacgctttccggtatacaactcgcgttgtacttctcacatcgccagcccattcggacccctctgcagaacacgattgctctgtactgggcactctctgatcgccagcttgtgactgttcgggacctcttccggttcataatgcacctgcttcatcaagcacgcaagaagaacgagacatcaaaacccacaactgatgaacacaaagaagttgcatctaatgtgctctgcaagtggacaaaggaagatattgatcgggcagaaactgcaatgctcaaggtcctacgggttgttcagcctggacagtgggtatcatggcgtgcacttcggggagctgcatcgaaggctgttgattcacaggagctacttgactattctcttcgaggactgggtggaaaactgatggacgatggccatttcatagctgtccgctgcaatgctgagacgagtgcaattgaatacaggctggaagataactccaaccagtcagttgatgcggctgcgtttgggccttctgttgatcatcttctgcacgatctgaagttcctctataacgctttgctgaacccagaaaccatgttggcttcacagccagaggttataggtgcatcatcacacagtgcagcagcaaagattctcgactgcaagcagttcatcaaacattacgatcagcacaccccacgggctcctttgaacccattcctactttctgtgaggtgttccattgaacttcttgatcacccaaaagactacactgcaccaccggtggaactagtgcttttaccagcaagtgctacccttgctgaactgaaaatacaggctacaagggcctttcaagaaacatacctcatgttccaaagctaccaggttgaacagctccctgacttcccaaattttagtgacacaaccctcgtgaagcatgtgcttggctcaagccagctcgtgagggtaagaggaaggtgcactggggataaccgaagaattgtgcaattcaggatggaaagggggttggagaactggacggtcgactgcacctgtggagccaaggacgatgatggcgagaggatgcttgcatgtgatgtttgtggagtttggcaacacaccaggtgttcagggattagtgattttgatgatgtccctgagaagttcatctgcaggaagtgtgctagtccacgcagaggaaagggtcgtggtggtggaggtggcaatggtggtagcagaatggatgtgagcgctgcagggaggtgcaaggatgagataggatcatctgttggcggtgcaggcaaatttgggcgcatggcaactgttggatga

SEQ ID NO: 12698 - DNA, 3084 bp, Oryza sativa
  Clone ID: TFbOSC900067j.C1.o9.fg
atgaggaagggaatatgcaccgggcatattacttatacggggcggacacgaggcccaataacggagggcaaggaagcatcatcggcaatctgccgaggaagcgccaagcgtgaaaacggaacgacatggacgatggaaatggatgggggagatgaggcgaccagctcaggcacaagggaaaaccttggtatccctgaacgcgctgcaagatatggcgcatcattcccgtgtgtggaggagcatggagagaccaaagtcgggcaggccggggtccaggctcctagtagagaagaatgttcaccgggattcaagtggcagtggatcacccactacaggcactcatggggaagccggagggtgtgcgactgcgagctagggtttggggcggcggggagggggagggggggaggattggcggaggcggcggcggcgttggaggggttccttgcggatccatggctgctgaggccggcggcggcgggggagggggtgggggtggaggaggagggaggggtggcgacggtgcaggtggaggtgccgccggtggaggcggcggaggagggggaggaggaggccggcagggcggccgtgctgcggcaggcggccgccgcggaggactacgcgcggaggctggagggcgccgccgccgcgggtacgggtctcaggtttatgccaaatggattttcagtgcttcttacgctttgcttttttatttggggtgtagatacacacgactatgatgttgtcaagttggaggaaggagatgaagaggactggggccaagaagatgtgggcaatgctgctgtcaaggttatgtgtcgtatatgcttttcgggagaaaatgagggtagtacaaaagctgccaaaatgcttccatgcaaactctgcaacaaaaagtatcatagaagttgtttgaaaaactggggggaacatagagatcttttccattggagctcatgggtctgcccctcttgccgcagttgtgaggtatgtcgacgacctggtgatcccaacaagttaatgttctgtaaaaggtgtgatggtgcttatcactgctactgtcagcaaccgtcgcacaagaatgttacccatggaccatacttatgtccaaaacatacaaggtgtcacagttgtggatctggtgtacctgggagtggccatagcacaaggtggtttctgggttacacatgctgtgatgcttgtggacgattatttgtgaaaggaaactactgtccagtttgcttgaaggtttatagagattctgaagtgataccaatggtttgttgtgatgtttgtgaaaagtgggtacatattgagtgtgatggcatcagcgaggaaaaataccagcaatttcaatcggaccaaaaccttcagtacacatgtggagcatgccgtggcgaatgctcccagattagggacacagaagatgctgttagggagctttggaagaggcgggatgtagttgatcatgaccttatggctagtttaagggctgctgctgcactgccttctttggaagatgtctcaccatctcatcctaactcagatgatgaaaaacttggtgcatatgtaatgaaaaatgatggtagaaacacactcaaattctctttcaaaagcaacagtactaagcctgcattagattcatctgaacaagagaagaatgctatcaagagctcagggtcaaataagaagcattccaagaagaaagggaatcaaaataataaaacagttagcgagcaggatgagatatttttggagaaaaggaatgaaactaaatcattgggtagtttgggagatcaaattgcagatgttactcgtgataagagttcatttaaaaatgatgccgatgcgtttgtgctgtcttcagctcaaagtgcagagaaggctttgaaattacaatctgccaaagctgcagcacataatgctgatatgatacccaaagtcaagattaaaggaactaaggttccgagtttgcatttcaaggatgtaggcgaggaaaatgctgccaagagtgacacagggaaaggtaccaagttggttattcatatcggttcacgacacaaaagtaggagtggctctcccaagtctgaaatgtccaattctcagaaagagcaagagctggtttcaatgcatggagggaaagttgatgtgacaagccagttcaaaagctctagaagtgaaataaaagaaaaaagtgtaatgaagctagttagagagactggagtacaacaaaatagccttctaggagatctaggtgcttcaaaaaagcatgcaaccggaaaaaggagcaatgctatagtttctgcaatggaaaatgcaagtgaaagtggtaccagaagcagatcgtttggacaaaaacaatctgttaatcatctgactgagaaccaggggaatgcttcattttctgtgaacaactctcctgacagcttgaagccatcattgctcaagcttaaatttaaacgtccaatttttgagcagccaagcactcagtcttctcaaccagaggagccgggcacctgggcttcaccgcaagaggagttaaatgttgctaaaggccagagatcaaagaggaagagaccttcattagacaagatggatggttcggaaagtaaggctccagctgccaagagacatgagcagagcacaggagaagaagcaatggatgcgaactggatcctgcgcaagttgggcaaggatgcgattgggaagaggattgaggtccagctagcttctgatggcaaatggcatcagggggtagtctcgaatgtaatcaatggcactttgtgccttcagttagataatggtaggtctgagaacatagagctgggaaagcgggcaatccgcttgatagcacaaagtcaacttcctgccaccagggtagtaagcagacctctccaggctccagcatttggatcgtcgcagtctctgattcatgggagattgggaggtctgaagcgcattggcttcattttgacttctggtagtgtaggaacaaacaactgggaaggctttttaggggccaccctggatgtagaagaaatgcctgatgatggccatgtacatgtagctgtagctgctgaatga

SEQ ID NO: 12699 - DNA, 804 bp, Oryza sativa
  Clone ID: TFbOSC416032j.C1.o4.gm
atggacgagggaggcggcgctggtgctgcggctgccgccgccgggaacgcggcgggggcggcggtgcaccacaacgcgcggtccgcggaggacgtcttccgcgacttccgcgcgcgccgcgcgggcatcgtcaaggcgctcaccaccgatgtggagaagttctaccggcagtgcgaccccgagaaagagaacctgtgcctttatggattgcccaatgagacctgggacgtgacccttccagctgaggaagtacctcctgaacttccagaaccagcactgggcataaactttgctcgtgatggaatgatcgaaaaagattggttgtcgctggttgcagttcatagcgatgcatggctactgtctgtagcattttactttggggctcgctttggatttgataaggaagccaggagacggctcttcaccatgattaatggtcttcccactgtatatgaagttgtgacgggaattgccaagaagcaaacaaaagtctccaacggcagcagcaaaagcaacaagtccaaccctaaaccatcgaagcaatccaattctaacagcaagcctgcaaagccacctcagccaaaagatgaggaagacagcggcccggaaggcacagaggatgaggaccaggcttacatgtgtggcgcttgcggagagacttacgcgaacggtgagttctggatctgctgcgacgtctgcgagaagtggttccatggcaagtgcgttcggatcacccctgcgaaggcagagcacatcaagcagtacaagtgccctggctgcagcagcaagaggagccgagaatga

SEQ ID NO: 12700 - DNA, 4329 bp, Oryza sativa
  Clone ID: TFbOSC400485j.C1.o3.fg
atgccaccggttgcgtccggctccggccggaagaggcagctggtgctggagtccagcgattcggaggcggatgagttctttgtctcgacgcggcgcaaggaggatgatgatgatgatgccggaaatgccggcggcggaagcggaggaggtggtgatcagggtggggaaaaggtggtgactgttagtcctgagaaggtttctggtgccaagtctactgatgaaggaggtggttcagacaagagcaagggaagtgaggtgggtaagagtgttttgcaacctgatgtgaagaggatcagaactgaggctgcccatggtggcggcagcggaagcggtgggagtgtatcgaaggatggaaccggcgggaaaatgctgcgcccggggttccccaagtggcgatttgagaagccggaggtaagggcagggcgggttcttgatgagaaaggtggggtcgagacgaaggtaagcagttcccaaaaggttaaggaccatgcatcgagttcggtttatgagagaagacggccagagccactgaaacctgagaaatcgacgccatcgaagactaaccaagaggttataagggtacaagggaaaagcggtgtcttaaagatccgtccgaagaacaataaggtggctagtgaaactggtgatggcaagaacctgccgaagaatgctaaggtggatggggatactggtgatggcaaagttctgccaaagaagactacagtggaggaaaatggtgatggaaagattttgaccaagagtggtgttttaaagctcctcccaaagaacaataaggtggccaaggaaaccagtgatggcaatcctcgaagcaagaacactaaggtggttggggaaaccagtgacgccaagattctgatgaagaacaaggcgaatagggaaagtggtgatgataaggcaccgaagaactgtacggtgaatctagaaactagcgctggcaagattttgtccagaaacactaaggaagatttgaaaaccagcgatgtctgtagacaagataaggagaaaagcgatgcaattgatgtgtcccaaaaacagggtgcagatggtgagaagagaatcacagaaaaactagtctcccccatcctattgaggaaaagtgacccaagtgtagtgggaatttctttgggccagaaaatgaagcagcaaaattcaaaggcgcaactgaagatatcctcactaggccaacgtcagccttcacttaatttgaaagatgagaagaataagaaaaaaagattgcttgatcataaaatgtcaccagaaaatttgtccaagaaagcaaaaccaaatgccattgatcaggatacatctcgtccttctcttgagaagcatggaataaagaaggaaaggaaagggcctcgttacacaatgaagcagaagctcaggggtcagataaaggacattcttttaaacaatggatggaaaattgatctaaggcgcaggaaaaacaaagattatgaagattctgtctatgtttctccacaaggaaatggctattggtcaatcactaaggcttatgctgtgttccaagagcagtctaaaagtgggaagcatacaggtaaatcatctaagcataaagcaggtgttgcagatgctgcctgtaatgccatatcagaaaatgatttagcaatgctacagaggaatgtggtgaaaaggaggaccaagaaagaacttggtgcttctaaaaagaagtatgaggacagcagcagcaggaactccaaagacaacaatgctggtagaagttctggaaacaagcatcaaagcagtggagttaggggatgtgcgcttcttgtccgtggtagtactcatagcatggaaggcaatgtggacggctattttccttatcgatggaagcggacagttttatcatggatgatagatatgggggttgtttctgaagatgcaaaggtcaaatatatgaataagaagggcacacgggcaaggttggagggtagaattactagggatggcattcactgcggatgttgctctaagattctcacagttgctaagtttgaacttcatgctggttcaaaagagcagcagccctatgaaaacatctttctggaagatggtggggctacgttgtcacaatgcttagttgatgcgtggaagaagcaatcacaatctgaaaagaaagggttttacaaggtagatcctggtgatgatccggatgatgatacttgtggcatttgtggtgatggtggcgatttgctctgctgcgataactgcccttcaacttttcacttggcttgcttaggaatcaagatgccttctggtgattggcattgcagtagctgtatatgtaggttctgtggttctacccaagaaataacaacatcgtctgctgagttactttcttgtttacagtgttcaaggaaatatcatcaagtttgtgcacctggaaccatgaaagactctgttaaagctgaatccaattcctcaactgattgtttttgcagcccaggatgtagaaagatttataaacatctgagaaaactacttggggtaaagaacgctattgaggctggattttcctggagcctggttcgctgttttcctgataaactagctgcacctcccaaagggaaagctcatttgatacattgcaattccaagacagctgttgctttctcagttatggatgagtgctttctgccacgtattgatgagagaagtgggattaatataatccacaatgtcatatataactgtgggtcagatttcaatcgtttaaattttagtaagttctatacatttattctggagcggggtgatgaagttatatctgcagcagctgtcaggattcatggaactgacttagcagaaatgccattcataggaacaaggggcatatataggcgccaagggatgtgccatcggctactcaatgcaattgaatcggccctttcctccctgaatgttcgaagactagtaatacctgccatacctgaattgcaaaatacctggactactgtttttggttttaaacctgttgaaccttccaagagacaaaaaatcaagtctctgaatatcttgattatccatggcactggtcttctagagaagcggttgcttgcaacaggcactattaaccaagagaacactactgttaatgatatgatggatgctcaaacacatgttgaagcaaccggatcccggacacctgttcatttttcctgtgaattaccagtgggtggtgatcctgatattaagcatcatgatgactctcatcctttagttgggaactccaaaggcttgacacttaatctgccttgtgttcctgaagaaaaaactgcagaattgacatctccagtattagatgttgttcagtgcatgcctgaatctgaaaatactcaagaaatgaaaaatggagaaacagatgcgacactgacttctgaggacataattgcagaacagaagtatgaagataaatctaattccagtcttacagattcatctgctattcccatgacagtggatccaggctcatgttcatccaatgagactgtgaaaggagaacatcacacatctagtgaaccttctgttgaagctattctagtaagagacaaacctgaaccttccatctcttgcaacgttaccaaccaagaagacaaaaactcttccatggttcctgttgatacgacagttcatttagccactatagttgggaatcatgatattcagaattcagtggaagtcaaaggtatggaacataatacagctaaggatcaaacttttgttagtgctgtagctaataatgttgctactactgaagatcccagtgattctgtagctgactgtgaagtgccaatagtgaggtctattcagcagaaggatgaggttatcgcagacaaaaatgcttgcgcaactatagatcaaactgctgttgacgatgtagctaataattttgttgctaccactgaaaatgacactgattctacagctgaacttggagtgtcaatggagagatgtatccagcaaaaggttgaggttatcaaagacaaaagtgattcaccattgagaacttctataagcaaagttatgttggagaaatcggatcaaatgaagtctactgaaagtgatagtgttaaaatgaaggacatggcgattgaggtgaaagtcacagttgagaacttcagtgaagcaggtaaaccagcttcagcgcttgtcatgtcaaatgacattaatggtgaagttatggctaagcctaatctaacttgtggggatgatcaacttcatggaggggatgggacatacaaaaatagcatggaagatgacctagcttccagagaacctgttaatgcatga

SEQ ID NO: 12701 - DNA, 1167 bp, Oryza sativa
  Clone ID: TFbOSC401369j.C1.o51.fg
atgggggagccgccccctgccggagaggggagcggcatgatgatgccggccaagcgccgccgcgagcgggtgttaccgtcgcggttcaaggactcggtgctggtgctcccgacggccgccgcgaagaagggcaagcccgcggaggccgcggcggaggggggagttgtggacggggagctctacgacgtggagctggaagaaggggatcccggcatgctgtggaccggcgacgagcggccggtgcagacggaggaggagctgtactgggcgtgcaggaacatcaggagaagcagcacctccacctccggtagcttcagcagcagcatcttcagcggtagcagcgcggtgacgtccttgagcaatgccggcggcggcggggggaatgggcggccggaggggaagcccacggtggtggtggagtgcaagccgaagagcgatggcggcgagaggaaagaggatttctactggccggaggaattcgtgctcggggatgttgtgtgggcgaggtcggggaagaagtgcccggcatggcctgcgctggtgattgatccactgcttcatgcgccaagggtcgtcttgaactcctgcatcccgggtgcactctgcgtcatgttcttcggatactctaatagcggcctcagggactatggatgggttaagcaagggttgatctttccctttgtggagtacctagataggtttaagggccaaactttatataagatcaaggcaagcagattccgtgaagcaattgaggaggctttccttgctgagcgtggcctttttgagctcgaaacggatgaggggtgctcactagagaagtctgtcaatgaccagtccatccctgacgggttactggaagggtctggttctaataatgagcaggaatgccaatcggaggctcaggttgttggcaaatcacctggatgtgatatttgcggtaatcgtcttccatgcaagatagcaagcaaaaagaagcaagcgggagaacgattactctgtaggcactgtgataagctattacagtcaaagcagtactgtggcatatgcaagaaaatttggcaccatacagatggtggaaattgggtttgttgtgatgagtgtcaaatttgggttcatgtagaatgtgaccagacatgcatcaagatggagacatgtagtatgtag

SEQ ID NO: 12702 - DNA, 5967 bp, Oryza sativa
  Clone ID: TFbOSC900258j.C1.o11.fg
atgccaactccatctcaaacgatcgtcttcggctccatcactggccttgtcaaagaaaaagaagactcttatcttgagttctcttggtggttccgtgaggattttggaggggttaatggtttgttgctctgttcatctggtgctttgcatctaggaacaaatgctgcagatggagcgcatttgactgagtttgctgtgcagctgccacattttgaggggcttcacttaaagaacactgctctttatgatgggaatcagtttatgccagcatttggtcttgctcattgtctgagcatgagacaacaatttacttccatggaccgtgatatcatggctgatggaaacatagtgcaaaggtcaattcatttgcgcagaaagagaagggatcttccacagacatcatcattacccaagtttgctgagaaccacgagcttggaagtgccaatatctttatggatccatctttttacacaaaagcaacagagtctagttctacagaaaacaaaagttcatcaaagcctccaaaatttcttggggaaaatagtagccgtcgaccacatcatcgtactgttggcctacctgttcaatatagtgatttctttatcaccagtttgggagaaatcgataaaaggccaagctaccataattcctaccagatatggccagttggttttacgtcttactggcatgacagaattactggttcactgttcgagtgtgaggtgtgtgacggagggaattttgggcctttgtttaaggtgagaaggatatcatgttcagtgttccctcttccagatgcatcaacaattctctctcaaaatagtacaagaaaggctgagacaatagaaacaaatgaaaacaacactttgcttgaagatactgctaatgatacagatgataatatcttaatgctcctatcagactcttctgagaccaatcaagatttgttatcatgttttagcaatgatatggagagcaaaatgacttctttaggttgcaatgatttgcatagttcaaataggtcggtaccaacagtaccgtcacactctgggactgacaaaattggcgagtttacgtttgagggaacatctccttcctcagtatggaggatgatttcttgtgctatgatggaagcttgtgaaaaaatgtacaaggaacatggccatttggtgttcttctgcacacatggtactgaaaagcattcatttgacagtgggagtggatttcaggactttaatggtccttacactccattaactagattttgctcatcttatgggcccagtataccgagaattgtagaaaaggagaatgatgtggagcctacttattcactactcaaagaatggctataccaagatagaattgggtttgacttggaattcgttcaagaaattgtagaatctcttcctagatctagggcttgttcaaattaccagttcttgtgcaacagggctgaattcgtctcttctttgacagttgcaagtggttcacttagagttgtacataaaaatggtcagagtaatggagacgtcatgtcatatggcagacatgggtctgtggtgactgggctacaggatcatacccagcctagtggttttagaatccgtgaacttcctctgggacgtcctattagcaataagcttccgccagagttggcaggagaggttctccagatatgggaattcctgggacgtttctctgaaataattggcctgaaagaaattccttcatatgagcagctagaagatgaacttattgacccatggccaatttgtgcagatcagaaagagaagttatcaaatgacattcacagggatcacacttcgccgattaattcccctgcaaatgtttctacatcatattcaaatggtgaatcgggtctaaccagtaatgaagagattgtatctttgttcatccctgttgaaacttcttctatgaagaaagctgctcaagataaatcggcagctcagacgcttggaagatgcagtggcgtagtgttgcctggggttcaccttacactctttagggttctttttggtgagctattatctaaggttgcaatttttgtagatccaaacattgatcctaaagaatcaaaaactaggcgtggaagaaagaaagacactgagaatctcatttcagcaaaagaatttaaatttgacatgctaacagctaacaagttgacttggccggaattggcaagaaggtatattttagccatttcgtccataagtgggtgcatggatttatctgatatttcaagtcgagaaggagtgaaattattccgctgtctacaaggtgatggtggtattctgtgtggtgcactacctggggttgctggcatggaaaaggatgcgttgctgcttgtggaggctgaaaatttgatatgcaaatcttcggtgaatgaagaaagtaaggtttttatgatggatcaaaaggatactgacatggtagattctcctgaggtgtctgctactgataataaaacattgcctgactgggcaaaatcactggagcctgtgagaaaattaccaacaaatgtggggacacgaattagaaaatgcgtttatgaatctttggagagaaaacctccggaatgggcaaggaaaattttggagcattcaatcagtaaagaggtctacaagggtaatgcatctggaccaactaagaaagcagttctatctgtgttgacagaagcatgtcgtgtaaaagtaccacataatccagaaaagccaagaaaagagagaaatgctatttccatctcagaggctatcttgaagaagtgccgtattgccctgcgctctgctatttcctcagatgaatccaaactttttgggaatttgctcggaactactctagtgaattccaatgaaaatgaggatgaaggcatactaggattccctggtatggtgtcccgccctttggacttccgcacaattgatataaggttggctatgggagcttactatggatcatgggaggcttttcttgaggatgtccaggaagtaatacgcaacctgcacactgcatttggtgatcgccctgatgtgcttgaaatggttgttgcattgtctcagagttttgagtcattgtacaagacagaggtgcttgaccttgttgagaaatttgacaaatacctctcggacaagaatgctggttcagaaatgcacgaggagctacatgatattctaactgcagcgaacagcttacctaaagctccatgggaagatggcgtttgcaaagtatgtggtattgatagggacgatgatagtgttctgctatgtgacaaatgtgactcagaataccacacttactgcttgaatcccccactagcccgtataccagaagggaactggtactgtccatcatgtatgttaggtcaaacgaaagcacatcatgatcagggtgttcaagatgtgaaacggcagcaaaagaaatttgttggggaggaagcccatgcctttcaagaggaacttaataaattagctacagcaatggaagagaaggaatattgggaccttaacatgcaagagaggatatatttactgaaatttctatgcgacgaaatgctcaacactgctctaattagagaacatctagatcaatgttcagataagttaggcgatcttcagcagaagttccgtgcttcaaattttgaattgaaagatttgaaatataaggaggagatgaggacttcatatgctagacaaagtagatctagtaaaactgaacagcattttaacaacagttctggacccgtggaaaatcaacagcagtgcacgcccacagcattggaccatctggaagaggctgaacagggtaatgttggagttaacctaaacaacccagctgatggggttcctgatgggcaattgaatgtaggcaagccttacaaaagtgacaaagacatatccagtgcatctatggttgaagaacgcaaatcttcaggactttctgaacaaccatcaggaatggctattgaccagattgatggggatgctattgatgaagggtcccagagttgtgagaagaggtcattaggtgccaagagcagtacatgtgataacttgaacttgaaagacactgaatttagcacacctggaagagagttgcctgatgaaagagccagcacatcattccaagataatcttgaagcatcatcaactaaatcaattgagcttgatgctgataataatgaaatggatactttatcggatgacatttcaaaattgcaggattcaattagcttactagagtcacagattaatatggcatcatcgagaagagagtgtctgggtaaggattccattggtcgattatactgggttataggaagaccgggtaaacgtccttggttggtggctgatggaagcatgctgaaacccaaggagagagatatcagtatggttaacagttatcccccatctgcttttgattgcaaaggttggaattcagcatctattttcatttatgaatctgatgaggaaatccagtgccttcttgactggttaagagactatgacccaagggagaaggaactgaaagactctatcttgcagtggcaaagacatttctgtcatcaaagcagttctcctctcgttgatcctccaatttctggtccaaagggtgaacagcttatggagcttccaaataccaaggctgcagtaattttggaacaaaagtatggtctgcaattggaccaggacacaagtgatctaccgaaaaagcgaggaaagaagataaagttaagttctgaagatagaacatatcgctgcgactgtttggaacctgtatggccttctcgataccattgtttaacatgtcatgagacttatctcatatctacagagtttgaggggcataatgatggaaaatgcagtaaaatccaccagtctcctgatgaaagcagagaaaatgatgagccaaaagtgaaggttaccaaatctgatacgaaggaaaaagattcccttgaatgtagctctgtcattgaaccgtccagtgacagaaaattgatgcaatgcccatatgactttgaagaaatttgcagaaagttcgtcacaaatgattcgaacaaggagacagtaaagcagattggacttaatgggtccaatggagttccatcatttgtgccttcacctgcattttttcttgaacctgcaattgtacaaagtcaaaacagaaaagatgatgaactcaaggattggacctcctctttagaggaatgcaatgcaatgtctgctcaaaagctagttcaagaggtttccaaatctggtcaaagttgtcctggcaatgtgggtgatgagaaggtgcaaaaatctaaaaagcccacccctgataatacttctggtgaggaagcacattctacaacaggcaagccaacacgattgctagctgttaatggggggttggttccagagtcatccttgaggcctcttataggacgaaactctcacatacttaagcagcaaaagataaacttgcttgacatcgaagcagccttgcctgaggaggcactgagagcctcaaagtgtcagcaaataagaaggcgttcatggcgtgcatttgtcaaagatgcagaatcaatatcccagatggttttggcggctaacttgttggagggcatgataaaagctgagttcttgaagaacgattggtggtactggtcttccttcacagcagctatgaagacatcaactgtatcctcactcgcgctcagggtctacactctagatgattgtatcatctacagtaaggatcaagttccaagcgttgagccagctgacaatacaaggttccagaaggaagaattggtactccatgtgcgagcattcgatcttgatgccaccatggggggcgctctggggcgttgtattgatcatttgtttgatgtttctggcaagtttgcaacatctgataggaatgtagattcatcttgcgacagatataattttgattgtaactaa

SEQ ID NO: 12703 - DNA, 564 bp, Oryza sativa
  Clone ID: TFbOSC400909j.C1.o25.gm
atgaattggatttcgtcgatcttcactccaccagaagctccagatcccatcaatctcatctcccatcgttgttgttcccccggctccatcgctttcatcaagggctggccgacctcttccgcaatcgacgcctctttcgccacggggtgcggctggccgcaacttgtggtgaccaactctgagatagtacgtgacaaggcttccattgaagatgaagccatggataatggcgcaagagcactcatcgagttgtcacagggcactccagggagcttttgtaaggtgcctaagatcatcctttgtgatggttgtgatgagggataccacctctattgcttgatcccaccattgacattagtgcctgaaggggaatggcactgctcgtcctgcatagtacaagaggaaaaggagacgaagaggaggctccatgggaaggacattgccaccaatgtttccatgctcgagacagatggctttgctgaacttgaagctgccaatgtgctcatgctattgaagaattcgagcaccgatggagagattgtggtgtcacctgtgtctcagtag

SEQ ID NO: 12704 - DNA, 1158 bp, Oryza sativa
  Clone ID: TFbOSC401197j.C1.o44.fg
atgggccgccgcgcgctgccgccgtcgtcgtcgtcgtcgtcgtcgtcgtcgacgacgaccacctcgccggagctgcggcggaagcgcacggccgcgccgcccccgccgccgtcgccgcggaggtaccgctcgatctccgacgtcatgcgccgctcgctgcccgtcgacgcggcgccccccgtggcgcgcgcctacgagagcacgcggtgcgacgtgtgcgggtccggggagcgggacgaggagctgctgctgtgcgacggctgcgaccgcggccgccacaccttctgcctccgccccatcgccgccagggtccccaccggcccctggttctgcccgccatgcgccccgcgctccaagcccgtcaaaaggttcccgatgactcagacgaagatcgttgatttcttccggattcagaagggcgcagaggatgccgaggcggagaaatatgggctttttcaagatgttaagaagcgaagaaagcgttcccttgttatgcacaagaagaggaggaggatactgccatatgtcccaactgaagataaagttcaaaggctcaaacaaatggcttctctagccactgctatgacatcttcgaagatgaagttcagtaatgagctgacttacatgcctggtatggctgggagatcgtgtaatcaagctacactggaagaaggtggcatgcagattcttccaaaagaggataaggaaactatagaactttgcagaaccatgcaaaaaaggggagaatgccctccccttcttgtggtgtttgattcacgcgaagggttcacagtgcaggctgatgctgatattaaagatatgaccttcatcgccgaatatactggagatgttgattttttggaaaacagagcaaatgatgatggtgacagtataatgactcttcttttgacagaagatccttccaaaaggctggttatttgtcctgataagcgtggaaacatttcccgtttcattaatggcattaataatcacactctggatggcaaaaagaagaagaatattaaatgtgtccggtatgacatagatggtgagagccatgtcttgttggttgcctgccgtgatatagcttgtggtgagaagctatattatgattacaatggatatgagcatgagtacccaactcatcattttgtctaa

SEQ ID NO: 12705 - DNA, 3441 bp, Oryza sativa
  Clone ID: TFbOSC401058j.C1.o97.fg
atggatggtgttgacaaggataaagggaatgggaaggtgcatttcagggattcctctccccaggaagctttccgaacctacaagaggcgccggcagccacggccggagccgcaacagcaaccgcagccgcagccgcagtcagagccggaaccacagcaacagccacagccacagccacagccacagccacagccagaggcagaggcagaggcagaggcagaggccaaggctgcagatgttctggcacggcaggtgactgaaacattttggaaaagtagggacattggatggaagcatggcataatgatcgacgagaacagacaacactggaagtgcatgtattgtcacctgactagatatggtggtggtgtctctagacttaagcggcatcttgctggtgatctggatgtcaaaatgtgcccaaaagttccagctgacgtctctgaaaaaataagggagcatttgcggaagaaaagagaaaggcgaaagaagcgagctgcacaaaatcgtgataactgtgtgacggctaagagcacctctgatgatatcaagtctggcaaagatcctttacccgttgattcagaggtgctgactggagtagacactgttcttgaagaagttactaaccaaacgaaccatgataatcaggatcttacttatcccaaggctaccatgttgttacgagggataagagatattgggtgggagcatgcagtggatcttgatggaaataaaagacgatggaagtgcaagtggtgttctttatgtcgaagtggtggtgtaactacattgaaggctcatcttactgatagtagttgcccaaatattcctaaggaaatatcaaaaaaagtgttgaactttattgaagagaaaagggcagcacgccatctttttaatagcgctgcaaaatctcctttcaatgtcaaatttgacgaggatgcagttaatctctcagaaatacaggtggaaggtactccaccattgacagatgatcgacaacctttaggaaattccttgcatatacaaacatcagagtgcaccattaatgagtttgaaaaggtggcagctggaagcaaccaacagggtgcagaacatagcaaccaactacttaaccatggtgaacagctgatgaaaagcagcgatcaacctgaggagcactgcaccttggaacatggaaggtgccaagtacttgacaataataagcagcagactatggacaataaaactgataatccggaacacaaagaggtcttgaaacaccctaaaaaaactaggtttaacataaggaagcatatagttatcgttgatgaatctgcaaggcattggaggtgtagatattgtggtttggatgggtatggcaaaacgtctaggctccattttcatcttgctgctgtgtttcgacatcctaagtgcccaagtgttccaaaagaagtttttgcaaaggcacggcatcatattcacttaaagagaaggctcaatgtgaaaaaggctgggcaacaagctcgttcaaggccacatattcttgggcaatcgagtcagcaacagcagaacaacaatccggtactttccaattacccaacaagattgagggacaatgcatgggaacattcgcttattcatgacaaagagaagggccattggaagtgcaagtggtgcagtttagagggttatcatggcataactagattgaagtggcatcttgttgggtggcagaatcgtcctcaatgcctaaatgttccagaagatgttgctaaaactattcgggataaaatgatatcaagagagaagcagaaagaaggaagattgaatcttgatgttattgacagttgcaacatgccatgctcttctgagagtttacagtttgatcaagagaattttgctgaggtaatgcagggaaaaggttcttctgaagattttaatcaagctgaaagacaatcaaacacattgaacacagtatgcaataccactcatcctccacagaacagcaacaattatcagggacttcaagaaaatggattatatagtagcaaaaacaaatctgagaagcaaactgaaagatatgactgttggagtcactggcgatatgttttagatggactgatgcatttgccaggtgcactagagggtcctggcattcagagttgcatccgtgatgtacttctttacggttctgctgaatttggaactgttggggacaaagtggaaatggattccaacagaaaagtgtcaagtgatgggaatattgctaagtgtcagagtgttcttgtggatgttttaaagtcagagaattttgccttattgtgcaatgtgcttggcagaactgtccatcaagatgagcaaaggactaagtattttgattttaccatgattgactcaaggatgaaaaatggagattatggccgtgcaccattattattcaaacatgatttgaaaatggttgaaagagagaggggatcagatgatagtgaagagaatctgaagggagctgcggcgaccaatttggaacccatgaacatggtcaagtcaaatgcattggtactttcaacctcacaaggcttcaaccagttggatcaaccagatccaatggatgtttgcgatgaacaaaacggtactaactgcaatgaatgtggcaaggtagcgaaaattgatagcatcctcacatgcaagagatgcatgctagcattccacgtctcatgcattgaacctcctgtgccatccacttcaactggaagctggtgttgtaaaacctgcagcaccatctgtaacgaatcagctgaagttggcatggccttggtccattatgaaccaaatcgtttgcacggacattgcgtcgcatgcaaggaccttgagttttgcaggcctccaaggtgtgaggaaactgccagtgaaagggcacctgctgataactccagagcaattgtgattcccagtgcagagcctgttgaggatgtggaattgtcagatattgatgtcaggggcttatgcaagatgtgtggaaatcccgaggagaaggacaagagattcttggtatgtggtcacacccattgtctatataagtactaccacatttcttgcctgaaggctacacagatcgctagtgacaagcagctggacaagccctgctggtactgcccatcgtgcctttgccgagtttgccattctgacagagatgatgacctgaccattctgtgtgacggctgtgatgaagcttatcatctctactgcataacaccccgtcgaacttcaatacccaaggggaaatggtactgctcatcatgtgcgatagagagagcaaaggaggggatggcgcggcatgagaaaaggatgctgaaactccataggaaggatgatcctgggctgcaaggcatgagatatgaaatggtggacatgatactcgctgctgcggagatgcttagcgatgatgagcagcaggggacctga

SEQ ID NO: 12706 - DNA, 235 bp, Oryza sativa
  Clone ID: TFbOSC400756j.C1.o2.gp
tcttggaggagctgctgctgcagtcagggcacttgtagtgcttgatgtgctccgccttagccggggttatcctgacgcatttgccgtggaaccaccgctcacagatgtcgcacccgatccagaactcgttcgcgttgtagaggccaccgcaagttccgcagaatgtctcgttgtgttcttcgtcgtcgtcctcgtactcctctgcgacaaccctggagcgctttacctgcccttc

SEQ ID NO: 12707 - DNA, 891 bp, Oryza sativa
  Clone ID: TFbOSC400756j.C1.o3.fg
atggcccccgcggcgcaggtggcgtcgaacccgcggacggtggaggacatcttcaaggattactcggcgcggcgcggcgcgctcgtccgcgcgctcacctcagatgtggacgagttcttcgggctctgcgacccagataaggagaatttgtgcctgtacggcctcgccaacgggagctgggaggtggcgctgccggcggaggaggtgccgccggagctgcccgagccggcgctcggcatcaacttcgcccgcgacgggatgaaccgccgggactggctctccctcgtcgccgtccactccgactcgtggctcgtctccgtcgccttcttcttcgccgcgcggctcaacggaaacgaacgttggcgcatgtgtctgcatgtgcacatgtatcccgtgctcttctttttgtttcctttctttgctttgagtgaattggagtcatgcgttctggatgtgctggctgtagtgtactggccgttctattttaagaagtctgcgtatgctatgtcctggaagcggctcttcaacatgatcaatgatctacctactgtatatgaagcattggttgacaggaagcacgtcagggataggtctggtgtcgatagcagcggaaaatccaaacattcaacaaagagaacaggcgaagggcaggtaaagcgctccagggttgtcgcagaggagtacgaggacgacgacgaagaacacaacgagacattctgcggaacttgcggtggcctctacaacgcgaacgagttctggatcgggtgcgacatctgtgagcggtggttccacggcaaatgcgtcaggataaccccggctaaggcggagcacatcaagcactacaagtgccctgactgcagcagcagctcctccaagaaaaccaggctatag

SEQ ID NO: 12708 - DNA, 1432 bp, Oryza sativa
  Clone ID: TFbOSC900059j.C1.o1.fg
gacatcaaagattggccggaatcctacttcctctgctaggagatccaagaatgaatccccaggttcaaagtattgcaattcatctgctaggggatccaagaatgcattcccaggagtgaagactactagcacgggaaggattacaagaaaggataagggattgcataagttggctttcatgagtggtgttctgccagagggtaccgatgttggctactatgttggtggaaaggttagcccttcgcagtttgaagcccatgctggccgtgctgctcgacgcaaaccgtaccacaacatatatatgtcaaatggtgtttcattacatgaactgtcagtttcactttcaaaaggtcgaaatatgtcaaacagacaaagtgatgacttgtgcagcatttgttcagatggtggggagcttctcctttgtgattcctgcccaagagcttttcacagagagtgtgttggctttactactatcccaaggggaacttggtgttgtcggtattgtgagaatagacaacagagagaaagttctttggcatataaccacaatgcaatagctgctgggaggattgacggaattgatccaatggaacaaatatttacaaggtccatacgcattgccacaacaccagtgactggatttggtggctgtgcactgtgcagtatgtcaggattcatggacaagcagagtgtattaagtcgaagtaggccagattatgatgatgagctggcagtactagaccagctccatgatttcagcaaaaagaaattcagtgcgagaactgtgctgctctgtgaccaagccttgcctgagggagcatggtattgtactgcggactgcgttaggatcagcgagacactgaaggacttacttagccgtggagcagagcctatttcttctgtagatgtagaaattataaagaggaaatatgaacagaaagctctaaataaagatggagatcttgatgttagatggagggttttgaaggacaaaagttcagcagacagtaaattggttctctccaaagcagttgcaattttccatgaatcatttgatcccattatccaaattgctactgggcgagaccttattccagccatggtttacggcaacactgtagtatctgcgggtcttttccgtgttatgggtagtgaaattgcggagctacccttggttgctacaagtagagatagtcaaggcttggggtatttccaagcgctgtttggctgcatagaacgattgttggcatctctgaaggtgaaacattttgtgctgccagctgcagatgaagcggagtctatctggacacagcggtttggattcgtgaagataacccaagacgagctgcgtgagtacctcaagggtgggcgaacaaccgtgttccagggaacatcaaccctgcacaagctggtcccaaaattggatggctag

SEQ ID NO: 12709 - DNA, 5223 bp, Oryza sativa
  Clone ID: TFbOSC400295j.C1.o8.fg
atggacggggggacggggccgggggcggagctgctctcgccgggggaagccgagtggccgcccgagctccgcctcccgcctccgccgccgccgcatcctcctcctcctcccccgctcgagccggctccgccatccactccccagctccgcggcgaggcgtccccgcccccgcctccgcctccgcccgtgggaccacccggcgcggcggtggtggccgccgccgcgaggaaggaggcgtccgcgtccgccgaggggtttgatgactcgcacttcctcggatcgatcatgggggcgcccgcgcaccagcaccagcaccagcaccagcagccgcctgccgtggggccgccggtggtggtgaagaggaagagagggaggccgccgaagaacagggatggagcggcgccgcctccgccgcccaagccggtgaagaagagggaggacgacgaggacgtggtgtgcttcatctgcttcgacgggggcaatctcgtggtctgcgataaaaagggttgcacaaaagtctatcatcctgcttgcatcaagcgcgacgaatcattctttcgatctcgggcgaaatggacatgtggttggcacctatgcagcacctgtgaaaaggcagtacagtacatgtgctatacttgtacatactccctctgcaaaggttgcatcaaacaaaagccagtcaaattctttggtgtcagagggaataagggcttctgtgatacctgctatagcactatactgttgatagaatccaaagatgatcgtgccaaggctaaggtggacttcgatgataaaaataattgggaatatctcttcaagttgtattggttggatcttaaagggaaacactctctaacattggaagaacttgtcaatgccaaaagctgttggactgttcgtagcacttccgctaggagagaaaaggaagattcatccaatgacctctatgatgcaaattttgaccttgatgccagttctgatggcgcctcaagaaaacgaagacggaatagtttttcagggaaaaggggacggaaacgccaaaacaatggtgctgaaagcttacctaagagagtgcaaaatgaaggaatgacttttataggtgacacacaatgggcatcatcagagctcttggaattcattgggcacatgagaaatggtgatatttcttatatttcccaatttgatgttcagattcttctgcttgagtatgtaaagcaaaaaaatcttcgtgatcctcgcagaaaaagtcaaattatttgtgatgcgaggcttgccaatttgtttaggaaaccacatgttggccactttgagatgttaaagcttttggaaatgcattttcatgcgaaggagacggtaaatggtgatggccaaaaaggcattgactcagattcagctcaaatagacagtggaggatatagtgatatgccaagtaaattatgctctgataagaggaggaagattcataagaagattgagagagaatcaccagctaatctagaggattatgcagcgattgacatgcacaatatcaatttgatttacttgcgccgcagcttgctagaggatcttattgatgataatggcacgttctctgacaaaattactggtgctttcgtgaggataaggactccttgtgttggccaaaagcaagatatttaccgcctggtgaaagttcttggtacacataaagtagcagaacggtacagcgtcggtaagaagacaactgatcatgcgcttgagatattaaatttagataaaaaggaggttatcacgatggatacaatctcaaatcaagatttcacagaggaggaatgcaaacgcttacgccagagcatgaagtgtggtttgattacccgactaaaagtggtactgttgatcaagattcattatacgggagacatccatgagaaagccaaaatattccaactgctgcgagttaatgattggttagaaaatgaaaagcagagactgagccatctacgtgatcgtgctagtgaaactgggcgcagaaaacaatatccttttaacttaatcaaagatttgcatgcctatggtcatcatagattaatctatgaagcgttcaattcataccatcattgcgaaattattatttgcatgaggatacatttcttcatgcatactttactaatggagtatgtggagtgtgtagagaagttgcaacttctgggcactcctgaagaaagagcacgcatcattaatgaagatccagaagtacatgttgacccatgtatgtctcctgattatgaatctgctgaagaattggatgttaagaaagctgttgattcgacaagtaggaatggatcagacctgttatttcttggaagaaaaggaatcgaaacaaactctctgcagaatcatagacaaaattgttctgccactagtcatcacacgactacaagtccacctactgagggtatgactcatggacaaggagaagaagcatcgtttgcatcgtcagaaattgtatcaggtgacatggaaccagaaaaagtatggcactacaaggatccttcaggaagtgttcagggcccattcacacttttacagctgtccaagtgggcagcttatttcccacgtgacctgagaatatggctaacatttgagagtgaacaaaactcactgcttttgactgaagttctctcgaaacaacaaaaagatttcattcagccttctcccaaagttgacaataataggtcaacatgggaaggcgttgggcaagatagagttgactcaagtttgactggaaataactcttcctctcctattggttataatgtgatctactcttctcggttgcctagcccatctgctgactattgtgcatcagctagagaaggcccaaaccttccgagtggaaccttgccattcatgacaagccagaaaacacaaaaggatcctcagatgttgcatggccaggcacagcatcagggtgattattcatgtaccatcccgtcatctgtggtttcatatagaccagctggttctcatgatgagtggccccctcgaggcaacattggtgaatggaacaatagtcaggatagtggtggtatgtggagcccaaccacacctcacatgagtcggagcaatttggagcatcagcctgacaggtgtattacgaagaagcaattgcagaatgattccaaacgtaatacgctagcaggatctgcagaaaatctaaattcccaaatggattttggttcacagaaagtacacattcctactccacaacaacctgagagagatcttgccacttctgttggtacttcaaggcaatttgagtttaaaacttgtcatcaggaaggctctcactggagttcaacagcagactccattactcatgatgggcttcaattatctcttgcttcagcaaagcctgagagctgctctgcagtaaatcctattagagatggagattccagttcagcttctcgtgtgcctaatcaatcaggagctcatgtctatagcccaccacacccagctacaactaatttaagcaagagtgaggagactatgaatcagtgtaaatcgtgtgagcctgaagcatcaaataaatcacgcaagcctgatgcatcacatgctccagttaatcaacatcctaagcctgaaagtgatccattgttacctgatactcaagattttgagcgcacgcatcctagcccaagtactgaacatgacacaaaggagccattgaaggatcaatcgaggtcaacatcagtagcacctgaagggtcgggtacaatggcacatggacagtcttccatagcttttatatcagaagcatctggcccactttctagtaaaattgttggcttgcaaccacccaaggatacatcatttcttgtcgaaaaagatataaaagatggaggttccattacacaaacagagcaacaaaaagaagagagtacagcatttaagaaagagaacgtagctgttgatcctatctctgacagtgaagcaatagtatctggtgtgttggaatctttgacagagacatataatctgcatgaagaaaccgctttggaaaatttcacgccaacatctgccgaggaagaacaaccgcaatgctctacccctattgcattatctccttgggatgaaacaagtgactatcaaggtgaagctgttgattctgctctatggggtgtccaagatgaccaaaacaatgaaatgtggtcattgtcttcaccaacacctactctccaaccttcaggtattggagctgataccaaaggtgcttcctgtgctatagaagaggtgatagtagcccaaggaaatagtggtgttgttgaaccgtcaccagcactggagaagaaaaggattgaaaaagtaccaagtgcttccatagatcgtggagtaccagagcaggtaaaaccaaaatcagatgctgcattatctccagaagagagcagaaaaccttcaggtttgcaactatcaagcacatatctacaagggagcacaaaatcttcaggtttgccaccgtcaggcacatctctagatgggggcatagaaccttcaggtttgctaccttcaggaacttctttggagtggggtacaaaaatttcaggtgtgcaatcctcggcctcatctctagaggggagcaaaaaggcttttgttaggcaaccatcaggctcttcactagagggaaacacaaaagcgtcagaaaagcttcagcatggcaatcatcaggttcttcgcctgttgcagggagctcaaaagcatcaggttggcagccatcacctcgcgagagctcgaaatctaagcctaattccacatggggtgccggccaaagccgcaactcgtcttcgcaccaatcaacaacaccaacagctaaatactcatcagaaaccccaaggagacaaggaaacaacaacacaaattctgctggctggggagactctctcggaaacaagagctggcattcaccctcaggcaatgcgagcagccgaggcagccattctagccaccaccatgaccggcacaatcagagcagcgaaccatggcgtggtggctcaaatcattccaggagatcagatcatcgtcaagaacatggcaacggtggctcgtcgagatcatcgtcgtcgagggggcaatctcaaagggggatctgtagatactacgagaatggctactgcaggaagggcacttcctgccagttcctccaccgttgaaaacgccctcacatttttgtacagccctaaatga

SEQ ID NO: 12710 - DNA, 1942 bp, Oryza sativa
  Clone ID: TFbOSC421069j.C1.o1.np
atctgtctgtcacaggaccagaccacttctcactctacagcaacacagtctatgatactacgcttctgcctcacctgtcccgcgactctactgcttctgctcactttgtccaacttgacaacctctgtcagaattttggtacgccaggcgcaaaaggcagttgctgctaaaagaaaacctcaagcttgggagaagtatgccaagaaaaggccccgtgtgttacgtatcaatgacgatgatcttttgatcacagctatggtgaaaaatagggatcttggctatgcaaagaagtttacaaagtttaagagctcaaagaaatgtggcaggctacttgctcgaatgtccggaaaaggaggatcaaatctgttgggtgggaagagagtaagtttggcacggaaaacagttctctgctggttgattgccactggctttctgaccgtaaaagatgttatacagtaccagaatctgaagagcaacgaagttgttaaggatgggcaggttacctgggaaggcattctgtgcaattgttgcaccaagaccttttctatatcagacttcaaggttcatggcggttgcagtttaccaaagtcctcattgggcctctttctacagtctggcaaatcgtacactctatgccaggtagaagcttggtctgctgaatttctaagtaggaaatgtgatgcatctggtagaaaagttgaggcgatggatgaaaatgatgatacgtgtggtttctgtggagatggtggtgaattactttgctgcgacaattgcccatcaacatatcatcaaacttgtttgtctgaccaggaacttccagaaggcagttggtactgccataactgcacatgccggagttgtgggaatccacttagtgaaaaggaggtttcaacattctcggctatcttgaaatgtttgcagtgtggagattcataccatgatacttgcattgaccaggagatgctcccctgtggggataaacaatccaacatatggttttgtgggagatactgtaaagagatatttattggattacacaatcacgttggaatagagaattttcttgacaacgagctttcatggagcatattgaagtgcaacactgatgggcagaagctacattcttccaagaagattgcgcatatgacagaatgcaatacaaaattagctgtggctcttactatattggaggaatgttttgttcgcatggtggatcctagaactggtgtagacatgataccgcatgtcttgtacaataccagatcaaacttcgctcgcttagattaccaggggttctatacagtaatcctggagaaaggtgatgagattttatgtgtagcatctatcagagtacatgggaccaaagcagctgagcttccatttattgctacttctgtggattatcgccgccaaggaatgtgccgaagacttatggacaccattgaaatgatgcttagatcattccatgttgagacattggtcctttctgccatcccagagttggttaatacatgggtgtcaggatttggtttcaaacccattgaagataatgagaagaaacaacttcgtaatgtgaacttgatgttatttcctggaacatccttgctaactaaaagattggatggaattacagctgccaatgctggggaagttcgaaatccagagcaaataaaaatcaatggaaggcgggaggagctgggacttgcggcgggtgtcgcgcggggggagggggacggcgaggaagtgcttggtcttggagatggggcgggagcggcggagctcgacgacgtcgccgaccttgaactggttgtccgggtcgtgcgcctggtacttcttcttgatgcgctcccgccgcttgtactttgggtgaggagccagccgcaccacctccacccccaccgtcttgtccgccttcgtcgtcaccacacgccccgtcagctgc

SEQ ID NO: 12711 - DNA, 3288 bp, Oryza sativa
  Clone ID: TFbOSC900258j.C1.o16.np
atggggagcaaacagatagtagctgttcttcaagtaggtggagaattcaaaactgatgatgatggacagatgtcctattctggtggagaggcgcacgcgatgcatgtgaaaagtgattggacttttaaaacattcaaacatgagatatcttcaacgctcaataacctcaaacttgactcctatgtgttcaagtacttccttccgaggaataacaagactttgatttcaatttccaatgacaaagacctaaaacgcatggttgaattccatgcagagtcagagacaacatatatttatgtcatgaagaaggctgacaacagggtaaaaacatctgccgtggtgcctgctgcttctgcagatcatgctgtagcagcaactactccagatggatctaagaggcaaaagatttgtgcaagttgggagaatgcgattactggagctggtcaagtgtttgaaggtccaaaggaattccgtgatgcactacacaagtatgccattgcacataggttccattacagatttgtcaagaatgactcttctcgtgtcactgtggaatgtaccgctgaaggatgtccatggcgtatacatgcatccaagtctcctgcaaagaaggatttcatgattaagaaagtttttggaagtcatacatgtgaatcagagtcagtcaaaagtcatcgtctagcgtctcaaaagtgggtggccagtgttattaaggaaaaattgcgtgatagtccaaactataggccaagagatattgctaatgatcttcagcgggaatatgggctaagcctgaattactcccaagcttggcgaggcaaatcaatagcccagaaagaactatacagttcacatgaagaggcatgcaaccagcttccttggttttgccaaaggattgtcgagacaaaccctggaagtgcggcaacagtagaggccttggaagattcaaaattccgcttctttgttgcatttcatgcctccattcaaggttttgtgcatggctgcagacctctcctctttcttgatgtgatatctgtgaaaccgaacaagcattggaagctgttggctgctacctcagttgatggtgaaggcgatatgttcccagttgcactctctgtagtggacgacgagagtcaagaaaattggcattggtttcttgaacagctaaaagcttcattgcctgtgtctggagaactaacattcatatcaaatggcaaatgtggtctgttggatgaggtctctcttatatttccagatagctatcatggctaccatgtcaactattttattgaagaatttaaggcacaattggatgacagttggagtgaagaactaaaagatacaatggttgagcatgttaagaaagccatgtattcatgcaaagttgatgaattcaaccagtgtattgaactcatcaaagttgaatctgataagcttgctgaatggcttttggagactaaacctgagaagtggtcagatgccttcttcaaggggtcgcgacttggccagtacacctgcaatgttcccgagacaattcttcagtgggtccccagtagatatgagctctcagtagtgcagttggttgatacaatcagatgcaacttgatggagatgatgtatacgcgcagggaatattcgaattcatggacggaaccgctaactccatcaaccaatcagaaaattcaggaagagatgggcaaagctcttacacacagtgttgtttgctcaacaggcaatgacggaaacaataatgtgtttgaggtatgcgatggcgctgtcaatgttgtcaacattgatacatgggactgcacctgcagaaagtggcatgtctctgggatcccatgctcacatgcaattgcggtgtttgagcgcactgatcataacccacttgacttctgtgccaagtatttcacaacagagtgctaccgcttgacctatgccatgtcaatcaatccaatacctgacattgttgtggctgctccatcaactgacccatcacaaggcgaggcattacatcaatcaccgattctaacccggaggcaggttggaagaccaaaggaaaagccagctgatcctcgaatcgcaatcaaaagggcggtgcgctgcagcaggtgtaagggttatgggcacaacaaggcaacctgcaaagtccctatcctcatcgatagatacacatcaacccgttttacttaccatgagaacacatataccccttcccggggtgctaatgggttctcgcgccgggtacaccagccaaaacacaccagcgcatcaccaccagaaacagccgcgcggacggacacagccaccaccaccggggcacgcgcaacccgtgcgtccacgctcccccaccccaccccccgcgcagtcatcgacagcgagacctctgacttttttgcggcccccatccgactccctgacacgtgggtcccacacctaccgcagcccacacgtcagcggcacaaccgcaaaggaggaaggcctcatcagcgagaaacctctgaccttttgcggcccgcatctgagtcaccgacatctgggtcccactccaccacggcctcatcatccgccccacacctggccccccgactcgactctccgcgaattcccctctcctcgcttaaccctctcctcgctttgctcgtgctttgctttgcttgttgctctcctcgcccgacggccccggccgccgtgggcggcgccgtggtgagccaggtggggatgcttccttacgaggcgcgtgaggtggcgatggggatccatcgggacgcggtggcgcaggcgcaggcgctgagggtggcggcggcgagcgcgatcgagtcggtgacggcgagggcgccgccgttcgggccgccggcggcgcggcacccgggggaggcagggcgtgggaacccgccgcccccgtgcgcggcgtgcggcctccccgagaaccccggggggaccatcgtctgcgactcctgcgagcgcgggttccacctcgcctgcgtccgcgtctggccgccgctcatgccgccgccgccgccgccgccggccccccccggcgcgcgtcggccccgcgccaccgccaacgaggactggatatgccccgagtgcgagatgcgtggcgcccgcaccaacaggtggaagctcggccccgtgccgctcgacatcaacgtgcccccgccgagcaccccggacgcggaggaccccgtcgccgtcgccaccagagacgtcaccaggcagttatctcagctctcatttcctcaactccttttgcttacggctgacttgatccgttggtctaaaaagtgc

SEQ ID NO: 12712 - DNA, 1113 bp, Oryza sativa
  Clone ID: TFbOSC401605j.C1.o16.fg
atggacgcgcagtacaacccgcgaacggtggaggaggtcttccgcgacttcaagggccgccgcgccggcctcgtccgcgcgctcaccgcagatgtggaggatttcttccggcaatgcgacccggaaaaggaaaacttgtgcctttatgggtttcccaatgagcattgggaagtaaatttgcccgcagaagaggtgccacctgagctcccagagccagcattgggcattaactttgcacgagatgggatgcaggaaaaagattggctgtccatggttgcagtgcacagtgatgcatggttactttctgttgcattttactttggtgctcggttcggatttgataaaaatgacaggaagcgcctgtttggtatgattaatgatcttcccacgatttttgaagttgttagtgggaagagtaaagccaagccaccgagtgctaataaccacagcaatagtaaatcaaaatccagcaataaaacgaagtcttctgagcctcgggcgaagcagccaaagccgcagccccagcccccagtgaagaacgaaggccgcgaggaggaaggcggcccggacgacgaggaaggcggcggtggcggcggaggaggcggtagggaggaggagcacggggagacgctgtgcggcgcgtgcggggagagctacggcgccgacgagttctggatctgctgcgacatctgcgagaagtggttccacggcaagtgcgtcaagatcaccccggccaaggcggagcacatcaagcagtacaagtgcccctcctgcagcggcggcaacgggcggtggcggcggcgtcagcggcaacggcaagcgtgcgcgcccgtcctaagtactaaacgagaagccattataagccagtacctcgtgagagatgagagaagcaaaaacacaagcacgcatgcccggagtccactgataagtgacaacccctatgaagtgattagtgatattcgcatcatgttagctgaacagtacactactaatgcacgggaagacgactttgatgcaaaacctaatgacaaggacaaccagggcgaaggaaacgtggcctggggtggtataaacaaagaattgtacagcttacaagttacaatccagaattaa

SEQ ID NO: 12713 - DNA, 5373 bp, Oryza sativa
  Clone ID: TFbOSC1881j.C1.o2.fg
atgccccccacgaggcccaagcggcggcgcggcggctccgcgcgatcccgcggccggaagaagcagaagcgcctcgacgccatccacgatgtcgcgccggtatccgcccctcccgccggagccgccgtcgtcgtcggcggcggcggcgagagcgaggattccgacgcggagggcccccgacggagcacgcgggtgcgccgcgcgccggccctgctcgacacctcgccgctcccctccccgcgccgtaagagggcgcgcggcggcggcggcggcggggtggccgggtcgagcggcgggagctcgcggaggagaagcagaggtagggcgaggggcgaggcgggggttgcccgcgagattggcgaggaagaggaggaggaggaagacgacgaggcggggaacgtggtgtggcgctctcggctgcgggatagggtcaaggggaaggctaagctggataagcgagttaggagcctctggttcgacgaggactacgaggtggagctgaaggaggaggaggaggtggtggtggaggaggaggaggaggatgaggaggagggggatgaggaggaggaggaggagcaggttaggacattggtggtggaccttcgggagggagctgaggaagagacaatgggcgagggaagtgggagcttgccaatgcgagggagggaagtgatggatagggaaatcaatctaaccatcgatttgaatgtggaagaacatgaggctgtcgagggtgtcaatgtggtggaagaggaagatggggaaaaaggaggcgaagcggatgaggagaaaggagatgcgattggtcctggaaatgatctacacgaaggcaagcatgaggaggtaggggacgaggagggtttacatgagaaggagagaactgaagagctgggatcagcagtactagaagggcgaaatggtgatgagctaccttgcaatgagaataatgctgaggatggcactggcagttcacatgaacacgagcatcttcttgtgcaaaatgagcagactgtggaagagagcaacctttgtgttgagcagcaaatggaactggatggttctagtcctagtgagcaattgaaagaggttcagcaggatgtacagacaggtggtgcctcaaatgtagtactgcccgaggaggccccaaaggaaggagtccgcaaatttccagtttcggaagaaaaacagggtaccatggagattaaagaagggagacgttgtgggctctgtggtggagggactgatggaagaccacctaaggttgcattacatgatacagttgacagtgataatgaagcctatgagggggctttgccttcagaggatccaaactatgatatgtgggacgggttcggtgatgatcctgggtggcttggaaggttattgggtccaatacatgatcagtttggcattgctcgtgtctgggttcatcagaattgtgcagtttggagtcctgaggtttactttgctggtttgggctgcctaaaaaatgtaagagcagcactttgccgtggaaggcttttgaagtgcagccgatgtggcagacctggtgcaactattgggtgtcgagttgatcgatgtccgaaaacctaccatttgccttgtagtcgagcagaagcctgtatatttgatcaccggatgtttcttatagcctgcaatgatcatcgacattacttccaacctcaaggagataaatatgttgaactgctcagaaaaatgaagataaaaaagatgaaggcagatatcagaaaggtgtcacatgatgcatggagaaaggacatagaggccgaggaaaaatggttagagaactgtggagaagatgaggaattcttgaaacgtgaggggaagaggctaaacagagatctttcgagaattgcacctgtttacataggaggcacttctgaaaatgaaaaggcgtactgtggctgggagtctgttgctgggctcagtaacgttattcagagcatgaaggaagtggtgatactgcctcttctgtatcctgagtttttcagttctttaggtcttacacctccaagaggtgttctgctgcatggccatcctggtactggtaaaacactcgtagtgcgtgcactaataggggcatgctctcaggggaacagaaggattgcttattttgctcgaaaaggtgctgattgtttgggaaagtatgttggcgatgctgagagacaactaagacttctgtttcaggtagctgaaagatgtcaaccttcgatcatattttttgatgagatagatggcttagcaccttctagatccagacgacaagaccagacacacaattcagttgtggcgactttgctttctttgctggatggtttgaaatcacggggttcagttatagtaatcggcgcaacaaatcgtcctgatgctattgatcctgctcttaggaggccaggaagatttgaccgtgagatatacttcccgctccccacctttgaggatagatccgctattctttcattacacacgaaaaaatggccaagtcctatttctggggcattcctctcagttattgcaagccaaactgttggatatgctggtgctgatctgcagtcaatttgcacccaagctgcaataaatgctttgaaaaggacttgcccattgaaggaaatcttactctctgcagagaaaggatttgagcatgggcgacttcctctaccatcaattcttgtggaggaaagggattggcttgctgctcttgcagctgctccaccaccctgttcacagagagaagcagggattgctgcaaatgatctagtttcctctcctcttgtctcctatcttgtgccgtgccttcttaaaccattgctgcacctttttatctccctctatttggatgagcgaatctggttaccttcatctcttctgaaggcatttgcttctattaagcaagttatcttctcatctatggagaagaataatgtgcctcacacattttggtcttcctatctcccatctttgatacaacagaaaggtattgcaaaaagaattgcatcaatcttgtcaggctatggtctaatagcttatcaactaggaaaccatgattctgtgttaaatcacaatgaacagcacgagaagtttgatgcccacagattgaattccaccggttctcacccaaaaggaggtttagcacataaattatcaggatttagagctttagctgctggagcgcccagatcaggccaacaacatctgatccgttgccttcttcatggttttgtgggtcatactgtaatacacaagcttgatcttgcaactatggcacaggagggaaacggtgatattcttagtggactcacacaaattcttcaacacacaataccaaggttctctgtgaatgttgacagctactttacctgggatgaggttattgacgcatgctgtttgcggatatcacatgatttagttcagcagcatgttcaacttttgcatgacagggctcataacaatcatgatgaacagaaagaggtctttgttcctatggaaattagtgcaccaggtgaacatagatccagtgggagtaaggaagccagcatgttaacgaagtatccattgaacatggacaagcatccctcatgtggggtttcttcaagagagcatcctactcagctgggcacatgtagtgctcagcaagagccaccaacatctaatgttgaagataaagaggacaatactgagaaaattgatttcaatgagaaagtcgcaacaaatcgttctaatagaattgtgaaggacagtgaatcactagctattatggcctttggaattcagatactacagcacccgcaattttctaaactttgttgggttacatcgaaactacgagagggcccctgcactgatataaatggaccatggaaaggctggccatttaattcctgtttattgcaaagcactacagctgataaatcattatctggaggaaacaatgttcttaagggcaaagagaagattccgtctgtcagaggacttgttgctgttggtctattagcatatagaggtgcttatgcatctgttttggaaatctgttctgaggtgagaaaggtcttggaactgttagttggacaggtccgaactaaaattttggaaaagagaagtcgatatcggtacttccatattctgtcccaagttgcttatctggatgatatcatgagcagctgggcatacacctttcaaaggttacatagtgaaaacaggagagtaaaaacaagtccaaaggtaactgttggaaagtcatccacaagagaatgtcaaggcgacagcaacactgcagaagcaaacatacttggtgctcctgctggctgctctgaggcccaaggcactcctggccaacatacagatgaccttgaagttattcctgctcactgccctagtgagatgcaagagaattcagtccaacatgctccaggccatcttgaaatccatggcattgtctgcgaccttgacaatgataatgtgacatctatatccagcataaatgcagtggaacctgatcttatccattcagcttcacttgatgtgcacacagattcacttaccccagcagatgcagtaataaatgatgggcaatcttgtggggttgacaatgatgggcaaatgtccagagtaatcaatggagaagaaaaccacatatctaatattgaaagacctgaaagccacacagtatctgttgcggatttcaatgagttgcaaaggaaaaatgctgttgcatcctcaactagtaccgacagtgcaggaacatccaggaacatggtgtcttctgaagctcgtggaagtgacaatgagcggaatactgatttccctgtggatgatgtcaaattaggtcatttggttaatcctcaatcacaggataccatgaaaagtctctcagttctgaaacctccatgtctctacaaatgttgccctgtgtgtttcaatgctgtttataagatggttcatgatattctttcaaattcagtaaggcctagtctgcattgcttagcagtcgatgatatgcatgaccttttgtcatcatggtcagtgaatcttctagcaacagttagaaaatggtatacttctcaaggtattgttggctctgaagaaaattctggagaagggcattgtgtttgtagcagtgataatggttgtgttccaagggagtgcacatgccatttggaaagcaacgaagatgctggaactataaaggatgagagctattatctaagtggacagccattaagttttttctttaaagatggtgtattgataccaccagatatcactgcaccaactacacttcattgcagttatatgagattatgtgtttgctcgataccaggttcaatttctatgttcaatcggatctcgagttga

SEQ ID NO: 12714 - DNA, 392 bp, Oryza sativa
  Clone ID: TFbOSC401827j.C1.o19.gp
agaaacaaggcatgaacaaatttcctctaaaggctacaatgtaacagtatccatatctcaaatgaacaaccacaacagtaaccgaccagtttatgaaacaaactatcctgtaaagtttcttcttttttgttttccagcatctaccacaacagtgcgcaatgttctagagcaaattcttcacatctgccgccaacttgggactggaagagggatggcaagtatcatttgattgatcagcttagtcagcagtagagagccacagcagcagctccatggtttttattgcctactcttcttggagctgctgcaatcagggcacttgtagtgctttatgtgttccgctttcgctggtgttatcctaacgcatttgccgtggaaccaccgctcgcaaa

SEQ ID NO: 12715 - DNA, 4038 bp, Oryza sativa
  Clone ID: TFbOSC403329j.C1.o21.fg
atgaaggatttggagaagtctacctccttggaggtggacgactctaccattgatggtgatgtggatcttggtggagggctcactgtggtggggaggaagaggaaagatggaaggggttccgtggatgagaatggggcctcgacaaagaggattttgaggtccaactccatgaaaatgcatgtggatgctgagacagcggggggtgtggctttggatgtttgcaagggtgacattttggagaagaaacagtgtgatatcatagcagagggtgatagaggaggggtgctgacagttgatacttgcaatgctgaggaagatggggaagtgactggtgcggtagtgagcgatgctgtggttgaggcagttaggtgttccgcaaataatgtggaaagtttgggtcttgctgaggttgaaattgctgaagggaatgggttggacgctgacattcaggaatctgatggtgagatggataaggcagatgacaaactgtctacaccttctgaggagcagaatgaatctggaggtggaacaagtgttgggggcatcaatgactcccaggaaaacaagggggttaatgggctttgccagggagaggtcatagacccattggctacagcaaatggagatgaattgagcatgggtttaagcagaagcgcaagtggacgagaatctattgagcaagaggataccgttatgtgcgctagtgatgatcagaaagttgagaaccattgccagtttgacgataagcataaagaagctgaaatttctcagattgagctcgcagttgataaccacattatgctaactgattgcactaaccaaaagaaggggatcgacagtcctgtgaatgaaaccaagggggattcaactcctgacattgtttttataaggagaaaatcaataactagaaaaacatgtgaagcgaagcaggtgaaatctgaagatgaggttcgatttgagaagcgagttacaaggtctgctactgttagacagagagaggtttctgctagcatgtgcgtaggtgctacaaacgatgctaacttggaaagcaaagaaaggaaggaagatgttcatcattatacaaggaaagtgggcagcaccgtgcgctcaaaagttcatcacacaggggtggcagaatgcgacactgatacaaagaagaaactaaaaggaactgttaccactcgaagaaactcagatgccattgctaatgatgatcctccaagtatcacgcagaacaaggaatcaaaaactcagatgaagatcgatatcaagtctcaaccactcacaagaaggggcagcatagtaaataaaacagaagacgcagtttctgggttagaccagaatatctgtagttcagccatcactgataaaaatgatatagagctcacagattctgaaggagttaaatctgagaacaaggccgctgtgaggaagtcaatattatcagttggcgctaagattgttgccagtaagaagaggatattggaatcaggacttgataaagctagtggagagtcaccagttgcaataccatccctaaagaaggcaagagatacatcctcagacactgagctagagcaaccaaaaatgtcttctggaaagaaacttaccagaaataactgtggctcaagtaagaaaggtatgtcgacaagacggcaacatcagagtcaaacagctaagttgagtacatctgtgaattgctccaataaaaacgaatctaagctatcacagaatgaatccgatgatgatggaactggcagtgatacttccttgaagaacacttgtgtaagacgtactcgaagtggtggtgttgtccccaaaaaacaagaggattctagtgaatctgaggaaccgatcatactgagaaaaaatcatcaaagaggaaaatattctgggaaaagggctggatctacaccaaggaaagttaaagctcccaaaggcaatagaaaggaagtcaaggcttccagtttgaaatcttcgggtccaagtgagcagataaatacaggaagtcttcgtgaagaaaaacaaaaaataagtgatcatatcaagggcatgcttctagatgctggttggacgattgatctgagacccaggaatggcagaaattacttggattctgtgtatatacctcctagtggtaaaggatcttactggtctgtcacaaaagcttatgctgtgttccttgaaggtatggaatctgagaagaagggcagagctaaagatcagcgaccctcaaagaaatctgtaggtagccctgggaaaagtcatgtttcagaggaaatccttagcaaattaaaaagaatagtcgttaataaacgaagaaccaaagtagaacttcagaagttgaaaaagaggaaacatggtttactgaaaaagcagaaaacttccaagcgcaactcaaggggttccaaaaataaaatttcaaattctagaaagttgcatttaggcagcgaaagaaaaaagcgaggtggttgtgctctacttgctcgtggatcaaataaggatggtggaagcagcactaacggttttgttccatatgaatggaaacgtacagttttatcctggttgattgatcttgatattattgatatcaatgcaaaactgaaatgtgtggatgaaacccactcaaaagttttactggaaggtgtaaccactagggatggaattaactgcagatgctgcagcaaggtctttacagtacttgaatttgtggctcacgctggcgggccagtcagcaaaccttatagaaatgttcttgtagatgggctggacactgaccttttgcattgtctcattaatgcatgggataagcagtctgattctgaaaggcaggcctttttccctattagcactgagactgatgaccccaatgatgacacatgtggtatttgtggtgatggaggcaatttgatctgctgtgatggatgtccctcaacattccacatgagttgtctagaacttgaggaacattcaaggcaggatgctcaagacattgctgaggttgactcttcactctgtacttgttcccagtgcgaagaaaaatatcacccaggttgctctcctgagactactaacacatccaatgtctccagtcaggcatgcgatttattctgccaacaaagttgcagactgttttcaattagatttctgggcggcaatgatatctatggaactgtcaacagtgctctcatgcagtcattaagatatatctatagtttattttcctgtgatattcattataggggaaagctgtttgagggattgcgtaatcttcttgctgtgaagaaggatcttgaaccagaattttcatgcagaattattcagcgtattcatgaaaatgtaccagaaacagttgttgctttggatgagagggttgagtgtaactccaagattgcagttgctctttcgttaatggatgagtgctttcttccgattgttgaccaaagaactggcatcaacttgatacgtaatgttgtgtacaactgtgggtcaaattttgttcggatggacttccatgggttttatatctttgttttggaacgtggagatgaaataatagccgcagcatcggtcagaatacatggaaccaagttagcagagatgccattcattggtactcggaatatgtatcggcgtcaagggatgtgccgcagactgctagatggaattgaaatgatcctcagctccctcaatgttgagaagttgataattccagctatcgctgaacttgtggacacctggacatctaaatttggatttagttcacttgatgtttctgaaaagcaagaagtcaagtctaccagcatgttagtttttcctggaacaggtcttcttcaaaagccattgctaaagaaaacttcacctggggaaaattcaagctctcaagaagttgatggtgttttctctgagctcgagtctgggaaaacttccaatgtggccaatgaagactctctttgttctgcaaatgctgagactcaaggttcggctgccccatgttatggggacaacagcaaagatgctagtgcttgcaatgattga

SEQ ID NO: 12716 - DNA, 493 bp, Oryza sativa
  Clone ID: TFbOSC401520j.C1.o8.gp
tgtgcaagaaaaattatctgcaaaacactgattctaaataacttaaatgtatatatacatatagttcatctaactaaaatagtaaaatggagacatagggtaaaatacataccatgactacatcggacacatacaccatgcttaaccttgcaaatgctgcacaccaatttccactgattctcctggacacttccaacattagtaacaggttccattgattccatgtcttccacaagagctcccggtgtccaaaggctacaaaacaagtgcacaaatttaaggttccccccatgcgctgtttgaccaggctcccctttgacaggttttagagcgcctttctcttttgggcatagaacacaaggcatcgacaaggtgttgtccgcatctttcttcaacgactgcagtgactccaaatccttacaccaagtgcacaaccactggccatcaggcacaacatgcaaaccataacacttctggtgcacagttaccttac

SEQ ID NO: 12717 - DNA, 2190 bp, Oryza sativa
  Clone ID: TFbOSC900333j.C1.o1.fg
atggtgatcgcggtggaggggggcttcgtgcacgaggaggaggaggtggaccacccaattcgctacctcccacttggccgcgtctactcctcctctgctccgtgccctctccccaagaagccccgctccgccgaggacggcaagccccccgtgatcgtctactaccgccgccgccgtaagaagccgcgggtcgaggggccacctccctcgcctgccacagcaccaccgatgctgcacccccgggaggacgacgaggatgaggaggttacacggcggaagggttctctcaagtacgagctgctgagcctggggcaagccccgcccgcattaggcggggatggggaggagcccgcgcggcggcgctgcctgaggcgtagcggaggggctgagaggaggggttacttctctgaacccaagaggcggcagcggcagggcgtgcacaaggaagctgcctcctcggctgggaggagatggttggagttggaaattgaggctgcggatccactggcctttgtgggattaggatgcaaggcaaaagtaaagtatgatgatggcgaatcagaggaccttaacctagctgatgaaaggataaaattttctatttcatctgaagaaatgaagtgcaggaacttgaaatttggaatttccaatctgaacaagaggggctatgatgagttgcttgcccttgctgttagccttcatgattaccaaggtcttgatccaggtgatcttgtgtgggctaaacttacaggtcatgccatgtggccagctgttgtggtggatgaatcaaatgttcctgctaacagggctttgaagccaggccgactagatcagtcgatacttgttcaattctttggtactcatgattttgccaggtttctctgcacacagcttctcccagaaaatatgttgcaactacagaaatccatggaaaagggcagttctgatgctaattccaataaagatgtacattcttgtgacaatttatctgaagataaaacagctgaaagcggaggggattatgatgagatgactccaatagaactaggaaatcttcgtgtgagcaaattaggtaggatagtaactgactcagactatttccataacaaaaagcatatatggcctgaagggtatactgctttcaggaagttcagatcagtgaaagatccacatgtagtaatactttacaaaatggaggtactgaggaattcagatataaaagctcggccattgtttagggtcacatcagaagatggaacacagattgatggctctaccccaaatacatgttggaaggagatatattgtagattaaaggaaaaacagcgcaatgtggcctctggattggacagagatgtttgtcagggatctggttcctatatgtttggcttttcaaatccacaaatacggcaacttattcaggagttacccaatgcaaggtcatgcttaaagtattttgaaaatgctggagacacctttcgtgggtatagagctgttcatgtaaattggaaagatctagactattgtagtgtttgtgatatggatgaggaatacgaagacaatttgttcttgcaatgtgataagtgccgtatgatggtacatgctagatgctatggtgaactcgaaccattgaatggagtcctttggctttgcaacctgtgtcgacctgaggcgcctcgtgtttctccacgatgctgtctttgtccagtaacaggacatgcttttaattatattaatcctaactttggtacagaaacttgcttaaaagatgtgaagagaatggaaccgattgatggattgagcagaatcaacaaggaccgctggaaacttctatgcagcatttgcggagttgcttatggagcttgcatacagtgttctcatcctacctgtcgtgttgcatatcaccctctttgtgcacgtgctgctgatctttgtgttgagcttgaagatgatgacaaaatccacctcatgttacttgatgaggatgaggacccatgtattcgtctactttcatactgcaagaagcacagacaaccatcgactgaacgtccatctcttgaaagtaaccttgctaagcctgctgtggtagttcagacagatgcagttccaccatccggttgtgcaaggactggtaagagagcaaatgtttacttgaggctaagagcaagttttgtcaagttttctgcataa

SEQ ID NO: 12718 - DNA, 2997 bp, Oryza sativa
  Clone ID: TFbOSC900332j.C1.o8.fg
atggtgatcgcggtggaggggggcttcgtgcacgaggaggaggaggtggaccacccaattcgctacctcccacttggccgcgtctactcctcctctgctccgtgccctctccccaagaagccccgctccgccgaggacggcaagccccccgtgatcgtctactaccgccgccgccgtaagaagccgcgggtcgaggggccacctccctcgcctgccacagcaccaccgatgctgcacccccgggaggacgacgaggatgaggaggttacacggcggaagggttctctcaagtacgagctgctgagcctggggcaagccccgcccgcattaggcggggatggggaggagcccgcgcggcggcgctgcctgaggcgtagcggaggggctgagaggaggggttacttctctgaacccaagaggcggcagcggcagggcgtgcacaaggaagctgcctcctcggctgggaggagatggttggagttggaaattgaggctgcggatccactggcctttgtgggattaggatgcaaggcaaaagtaaagtatgatgatggcgaatcagaggaccttaacctagctgatgaaaggataaaattttctatttcatctgaagaaatgaagtgcaggaacttgaaatttggaatttccaatctgaacaagaggggctatgatgagttgcttgcccttgctgttagccttcatgattaccaaggtcttgatccaggtgatcttgtgtgggctaaacttacaggtcatgccatgtggccagctgttgtggtggatgaatcaaatgttcctgctaacagggctttgaagccaggccgactagatcagtcgatacttgttcaattctttggtactcatgattttgccaggtttctctgcacacagcttctcccagaaaatatgttgcaactacagaaatccatggaaaagggcagttctgatgctaattccaataaagatgtacattcttgtgacaatttatctgaagataaaacagctgaaagcggaggggattatgatgagatgactccaatagaactaggaaatcttcgtgtgagcaaattaggtaggatagtaactgactcagactatttccataacaaaaagcatatatggcctgaagggtatactgctttcaggaagttcagatcagtgaaagatccacatgtagtaatactttacaaaatggaggtactgaggaattcagatataaaagctcggccattgtttagggtcacatcagaagatggaacacagattgatggctctaccccaaatacatgttggaaggagatatattgtagattaaaggaaaaacagcgcaatgtggcctctggattggacagagatgtttgtcagggatctggttcctatatgtttggcttttcaaatccacaaatacggcaacttattcaggagttacccaatgcaaggtcatgcttaaagtattttgaaaatgctggagacacctttcgtgggtatagagctgttcatgtaaattggaaagatctagactattgtagtgtttgtgatatggatgaggaatacgaagacaatttgttcttgcaatgtgataagtgccgtatgatggtacatgctagatgctatggtgaactcgaaccattgaatggagtcctttggctttgcaacctgtgtcgacctgaggcgcctcgtgtttctccacgatgctgtctttgtccagtaacaggacatgcttttaattatattaatcctaactttggtacagaaacttgcttaaaagatgtgaagagaatggaaccgattgatggattgagcagaatcaacaaggaccgctggaaacttctatgcagcatttgcggagttgcttatggagcttgcatacagtgttctcatcctacctgtcgtgttgcatatcaccctctttgtgcacgtgctgctgatctttgtgttgagcttgaagatgatgacaaaatccacctcatgttacttgatgaggatgaggacccatgtattcgtctactttcatactgcaagaagcacagacaaccatcgactgaacgtccatctcttgaaagtaaccttgctaagcctgctgtggtagttcagacagatgcagttccaccatccggttgtgcaaggactgaaccttataatatccatgggagaaggggccaaaagcaacctcaagttatggctaccgcttctgtaaaacgtttatatgtagagaatatgccttatattgttagtggtttctgccaaaatagagtaggccatgatgctatcagtgaaccaattcaatcagttggctttttggatgttgcacatcaagaagctgttggcaacgtgtcttctatgattgaaaagtataaaagcatgaaggctacattcaggaggagactagcttttggaaagtcaagaattcatggatttggtgtctttgcaaaggtttcgcacaaggcaggcgacatgatgattgagtacatcggagagctcgtcaggccaccaatatcagacattagagagcggcgcatatacaactctttagtgcctgaaggttatatgtggaaaactctggtaaagttaattggtttgttcatggagttcaaccttaaagctttgatgggggtcatcatcacgacattccttggtgctgggacgtacatgttcaggatagatgatgagcgtgttatagatgctacgcgggcaggaagcattgcccatttaattaatcattcttgtgagccgaattgttattcacgcgtcataagtgttctcggggatgagcatatcatcatttttgcaaagcgggatataaatccatgggaagagttgacttatgattataggtttgtttcgagtgatcagcgacttccttgttattgtggattcccaaaatgccgtggagttgttaacgatgttgaagcagaggggcaatcagccaaaataaggggatcgtatttagaattgccccagggtactggattgcgaactgtgctccttcggggctag

SEQ ID NO: 12719 - DNA, 2400 bp, Oryza sativa
  Clone ID: TFbOSC400342j.C1.o6.fg
atggggaagggaggggaaggggcggttcccgtgggggagagcggcgggcggcggcggaggaggccgggcgaggacggaggcgacgacgacgacgaggagtatgtggtggaggaggatgaggaggaagagtgcgacgaggatctgtctgcctcgagcgccggcgagggaggagagggcacagacgaggaatacgaagagggtgatgaggacgaagaggaggatgagaccccgcggccgaggcagcctgtcaagagccgcgagaatgggcggaaggggaaggcagacccacccgttgcgcgatctcgtcgacgtaagtacgaggatgacgatgactactcggaagaagaagacgatcgggtcgacgagtacggcgaggatcttgaggaggaggaagaggatcttgaggaggaggaagaggaggacgatgaggcgccacgatccaagcgcatgaagaaacgtggtggccgcaacgtggaggggaagcttcctctggagcgatcaaatcgccggaggtatgaggaggacatggactttgaccctgacatggatgaggaggaagaggaggaggatgttgatttcgatcctgaagtggaggacgaggaggaagaagattttgaggatgaggaagatgatgaattggaagcgactaaggtgagggttaagaatatggggcggcgaaagtctactttgaatcagcgacgagggaagatgaagagcagctctaaggtggccagtcggaaggtgggttcagtcaaggcaaggaacgctgcgtctataagacggaggcagaaaaaacgttcaatgcttgatcgttatgaggatgacgacttcattgtggaggacgaggttatggctgattggcaaccaaggaaaaaggctagaattaggaagcagatggaggttgatcctccgacaccagtttttgaggctgagatatggcctactattgattcagacacgacagacttcgaatttgtaacatccgatgaggaagcagccattgctgagcctactagggttattaagaaggggaggaagaaaagggtatttgtgtcagattcatcctcagattctgaattcgttgtatcagataaggaattggggaatttgaaggagtctgagcctccagagtctctgaaagtgctgccttcatcacccaggaagatttctgttacaggtaatggggagcacaaggggaaggagaaaaaggaaccacaggaggctggaagggcaacgtgcgggatttgcctttctgaagaacagagagtgactgtgcagggtgtgctggattgctgttcacactatttttgctttgcatgcatcatgcaatggtctaaggttgagtcaaggtgtccgttgtgtaaacggcggttcacaacaatcacaaagtcgtcaaaggaggatactggtttggaactgacaaattctgtaattagggttgaagaacgtgatcaggtttatcagcctacggaagaggaaataagacgttggctagatccatacgagaatgttgtgtgcatagagtgcaatcaaggtggtgatgacagtctcatgttactatgcgatatttgtgactcctcagcacatacttactgtgttggtttgggaagagaagtacctgaaggaaattggtactgtggaggttgtagactcgatggcgaagcacattcataccataatcatgtgaatggcaattctgggatgtttggtgcaatttcaccaattggcacttttgaaaggcaagggattgatctaaatgtatctccaagagagattcctaggggaaatcattctgttgagtctcaagcttctactgcaggagcatcaactccatctggaaggcagacaaacgcaacgaattttagaagacgtcaaatgcatgactggatacgcagtttgctttctagaccaaggacaacacttgggccagttatgcatcataatggtgtgcatcagagtggttttgtaccaagcactgaaccagaccacatgaacttttgcgcaccattagaatctgacactttacacaacactgggtctgtaccacaaagtgaaccaagccagaacttccatgttatgtcagaagccaacacttcagagacttcctttggaaggcatgcagctctttctgaaagacgtcaaatttatgaacgttttttcatgttgctatctagaccaagcccgactattagaccggacttgtgccataatgcctcagagcatggtagttctgtaccaagagttgaaccaaaccacatgaactttcatgctccgccagtagccaacagtccacaaactctgcttgatggcattccaaaccgcagcaatggtttttcttttactcaggctcacagtaattttgtagatggaaacaacttccaaggaactgaaggtgtctag

SEQ ID NO: 12720 - DNA, 3312 bp, Oryza sativa
  Clone ID: TFbOSC400766j.C1.o6.fg
atggccggcggctcctccccctccccggccgccgcgcccatccaggtgcgctgcgccggatgccgcggcgtcctcgccgtcggcccaggcatgaccgagttcatctgccccaagtgcggcatggcgcagcgcctccccccgcagctgatgcccaagccgccgccctcctcctcctcctccgccgccgcgacccccgcgcctcccgccccggcggcaccgccgccgcctacgtcccggagaggaggcggaggcggcgcggcccttccgcccccgcaggcgcagggggtggaccccacgaagatccagctcccctgcgccaactgccaggccgtgctcaacgtgccccacggcctcgcccgcttccgctgcccgcagtgcggcgtggagctcgccgtcgacctcgccaagctgcacaacttcctggcctcctccaacaacaacgccgccgcggcgccgccggacaacgtcccgccggcctcgggacccgcgtcgcgggcgcctttggtgcctgcgcctccgcccgccccgttcccccccgtgccgacgccaggcatgacgcaggcgccgcagatggtgcctggcgcgttgatcccgatggtgcttcccatcactgatccgcctgaggagatcaacgaggttgcaattgatgttgagcgtgaagaagatgaaggtggtactgttggagaaacgttcactgactataggcctcccaaactctctcttggtctgcctcatccagatccaatagtagaaacttcttctttgtcagctgtacagcctcctgagccaacttacagcttgaacatcatggatgaattggatgagacaaaggccttgtcttgcttgcaaatcgaaacattagtttatgcttgtcagcggcacctttatcatctccctactggtgatagagcaggttttttcattggtgatggagctggtgttggtaagggccggacaattgctggattaatatgggaaaattggcaacagggaaagcataaggcagtgtgggtatctattggctctgatttgaagtatgatgctcgaagagatttggatgacgttggtgcaaaatgtgtacaggtgcaccctttaaataagctaccatattctaagctagactcaaaggccattgggatcaagaatgggtgccacaaggccaaaaatctcattcctgatgcagggagccagcccactcgcactggatctctcgagaaaggtggtgtgggcgctcttgaacttgttgccatggacatgaaagccaggggtatgtatgtttgccgcacactaagttataagggggttgattttgatattgtggaggctccccttgaggaaagaatgatgaatatgtacagaaaggcagccgaattttgggctgagttccgccttgagctcctatcagcaggtgaatcatttacagaaggcatttcaaatcaaatatggcggctatattgggctagccatcagcgtttcttcaggcatatgtgcatgtctgcaaaagtacctgctgttgtgaagttggctaaggaggccctggcagagaataagtgtgtggtggttggtcttcagagcactggagaggctcgaacagaagaagctatcacaaaatatggtgttgaaatggaagactttgtttctggtcctcgggagctgcttctaaagctggtagaagaaaattaccctctacctccgaagcctgattcttttcaacaaggtgaagaaaaagtcacagaaattcaccgtaagcggcattctgccccagatgtatcatttaaaggacgtgttagaaaagtagcaaaactggtagaagtgagtgatgatgacagtgatgattactctccatctgagtcagatcatggatcgacagagtctgatgaggagtttcacatgtgtcaaatctgtaacacagaggaggagaagactctgttgcttcattgttctggttgttctcgacatgttcaccctggttgtctgacaccaccttggactggggtattaactgatgactggtcatgctacacatgcaagaagttagaaggagaggaaaatgaacaagatgctcatgtagctgatttttcacagaggtatgatgctgcagtagagaaaaaaaagaagattttggatatgatacgttctttggatctccctaacaatcctcttgatgacatcattgatcagctaggaggccctgacaatgttgcagaaataactggacggcgtggtatgctaataagagcttctgacggaaaaggcgttgtttatcaggcgcggaatgcgaaagaagtgtcgatggagatgatcaatatgcatgaaaaacagcagttcatggatggcaaaaaactaatatctattatatctgaagcaggatcagctggcgtttcgctgcatgctgatagaagggcaaaaaaccagagaagaagagtacacataacacttgagctcccttggagtgcagatcgtgcaatacaacagtttgggagaactcatcgttctaatcaaacttctgcaccacaatataggcttctctttacaaatcttggtggtgaaaagcgatttgcatcaatcgtagcaaaaagactggagtctctaggagctttaacgcaaggagatcgcagggctggaccttctctgagtgcttttaactacgacagcaattatgggaaaaaagccctaaccatcatgtatagaggaataatggagcagagttactttcaagatgaccaggattcttttccagttgttcctccggggtgttctgacaatcaatctagcatccaagagttcattgctgaagcaaaagctgctctagtatcagttgggattatcagggatgctgtagtgtgcaatggaaaagttgctgggaagctttctggtcggattgttgactcagatatgcatgatgttgctcgttttcttaaccgccttttgggactggctccgaaaatccagaatagaccgttcacattgatagcttgtcaggcgcgtcaactgtactttttactttcaccattgaccgaggagttacttgggaggcaaaaggatggtgctggttcttctaatgatgggttttacgagtccaaaagggaatggatgggaggaaggcatttcatacttgcttttgaaggctcaatcgaagggatgtataaaataattcgacctgctattggtgaagcattaagagaaatgcctttaacagaactgaaaagcaagtacaggaaagtgtcatcaatagaaaaggttaacaaaggttggcaagatgaatatgatgcttcgtccaagcagatactgaagagaatcagaatcagttaa

SEQ ID NO: 12721 - DNA, 2235 bp, Oryza sativa
  Clone ID: TFbOSC401951j.C1.o1.fg
atggtcgagcatatggattggcagccggtgaccaccctcggccccaatttctcgccggagctgcatagcctgctcctctccgaccaccgcgcgtccttgctctccctcctccgccgccaggacgacgagctccggaccaagatcaagaaccacctcctcgcgctcggatggaccatcgcctccaagcccaagccccctggccttgcgcccaggctccgctacgtctcccccgccggaaccaagtcctactactccctccgccgcctcatccagaccatccacctccaccaccatcctacccaatcccaatcccaatctcaatctgattcttgcggttgcggagatacccctcttcttcttgaggaatctgatgacgaccaataccaagaacaacaagaagatgatgccatcgcggggtacgttgccttcatggaggagcagaatgccaggcgcgaccgcgggcagggaaatgatgaggagcagaggtccatggccaaggagcttcggatcaaggctaaggatcagctcaggtcgtcgggatggacattctccatgaaggtcaagtacaacggccgcgaggagctgcgctacacagagcctcgtggccgctcccacatctccctcatcaccgcctgcaaggcctaccttcttcaccacacgccgtcgacgacaatggcttcatgcagcaacaacaacaacaagagaccagcgccacccgctgcctgcaagactgccacttctagcaagaagaacaagaagaagaaggcgagcctgcagcaggcgcgcgttctgcgtccacagccaagaaacgaggaggggaatgcgctgacgacggcgcgcgcgaggacgctgctgtcattgctgatcgacaagaagatcctggcgccgagggaccagctcatctacaccacgaagcgagggctcatcaccggagacggcatggtgaaatgcatgtgcggcggctgcatcaacaacaacaacaagaggagggtagcagagtacacggtggccgagttcgcggtgcacggcgacggcgatgtcgcctcttcctcgtcacggcagccttgggcgcgcatgtttgtgggtgacggcaggtcactgtcgcagtgcctggtgcagctgatgatggcggacgacgaggcgggctccggcaggaagaagaagaagaagaagtatttgccgtatgtgtggcgtggtgcaagggtgaagcggaaatgggaggaggacgacgactacgtgtgctccgtgtgccacgactgcggcgagctgctcatgtgcgaccgctgtccgtccatgttccaccatgcctgcgtgggtttggagtccactccgcagggcgactggttctgcccggcctgcacctgcgccatctgcggctccagcgacttggacgatccaccagctaccaccaccacccaaggattcagcagcgacaggatggtcatctcctgcgagcagtgccgacgagagtatcatgttgggtgcatgcgagagagagacaatgggttgtggtatccagaggcggatggagaggggccatggttgtgcagtgaggcctgctcaaagatatacctgcgcctcgaggagctcgctgtcgtccaagccccttgtcgttcagttgcttcgggcttgtcattggtggtgttgagacgcggtgcagcgagagacggagaggaggaggagcacgccaagctgtgcatggccttggatgtgctccgcgagtgtttcgtcaccctcatcgagcctcgcacgcagaccgacctcactgccgacatcgtcttcaacacagaatcggagctgagacggctagatttccgggggttttacgtggtaggactggagaaagccggcgagcttatagccgtggctacactgagagtgtatggagaggaagttgcagaagtgccgctggtagggactagattcgcgcgtcgtcggcaagggatgtgccgccttctcatggatgagatacaaaagttgcttggtgagatgggggtggagaggcttgtgctgccggcggtgccggagatggtggcgacatggacgggaccatcatttgggttcagagagatggggcaggctgacaggcaggatgtagcacaccatgccatcctccgcttccagggaaccatcatgtgccacaagcagctacctcctcaacctcaacctcaacctcaacttgggcacacaacgacgaccccagcaggaagaattccaagtccaataccattgtaa

SEQ ID NO: 12722 - DNA, 5295 bp, Oryza sativa
  Clone ID: TFbOSC401375j.C1.o5.fg
atggcgtcgttctactgtgtccgtgtgcagattgacagcgccagtctgcgccacatcctccgccccttcgccgcacagggagcggcgccgccggagcagctggccgcaagccatccgagctcgcagtacggccagcccgcgagagcggcgccgagcacctcgttgcttgctcaggtggctgggaaccatccccatgccacccatgtttcggaccggaaggcgttgtttggcatgctcaatgcaggcaatgctgctaatgtcattgatcttactcgcgcttccccgctcggaggcgcggagcctctgcccaagcatccgaggcacggcttggaagccagcagcagcgttgagcagccctcctgcttggggccgttgtttcagaacacaagtgcaaatgtgcagggtagttttccaggggaatgttcagttaacaatgggatatcccaaggcgccatccagtttcaggactcgagcacatgcgcagtgcagaaattgccatcccaatcaacccctcgccatcatcctgcgcttctaggggatcagatatgcgtctcctgtctgaatgttggtggtgaattctttgtcggtgaagctgggatttttggagttcgttgcttttgtcaccggctgagaatgtctgtggctaagttctgtgagcattcaggaggacccgcagaaaaagctggtgaaattgtcattatggataatggcatgactattgtacaatggctcaagtactgcatgggggttggagcatccatttctgacactaagtgggactggccagaatgggcatatatgagatattcttcagaagaatactggactaaaagtctccttacaacgaacaataacatggaaaaaacagggctattcagtggacatggaaaaagcactggacatataaacaatccagtttattccagtgatatccacaatgaggttggacgattcacttctgttgagaagctagtgaataagccagatgaaacattttatagaaagagtgtcggtttacatgaagctttctcaaagaatccagctatacagcagagttcgaaaataaacttagcaaatcatatgatccatgacatgaacatgaactctattagcaggccaagtgaacgaacatattcaacagcaaacatgggaataacttacagtagaaatcatttggcacatgattatgcaaactttctggagaaaaacttaaataacttgtctcgtagtcctggtcctagttctacaagagttttgagcaatgacagtagggcatgcatgcctgatgtacctcacaaaataattcaagatggttcagaatcacttggtgcagatgcttatccgaagcaaactaccaaagccaacaaaactatagaaaacattgagccatcatttggtacaggtaataggaaacgatcacttgatgtttctaatggaaccagccattctgaactcaatgagattacagatgatgcagcaaagaattcatttatttcattatttctttcacatcttgagagaaatagtacatctgagtccattgatgatgttctcaacagtaatgagcattaccttcttaaggctccagatgttgcatatagttccgatcgtttaaaaactgcaagtacacaagttgagacaagggcaaatgataatcagttgaagttggcacctgccattattcacacgaaaaggatatcagatagcaggtctcttccagttccagtggcttccaagggatatgttcatcaagatgtacttcatgcaaatagtcaagagcctttaataaatggggactgcctgccacatttgctgcctagtcaacctaacgccggaatctccaaaatttgcgcagaagtttcttctccagtgaattgcaggtgttgtaatcatgttgctgacaaatcccatcttgcacattctgagactggggctccctgtttttatgatagaacggaaaatcaatgcatagatgctgttgcaaagctcaagaagattcttccaaacttggttttagagctggcaatttctgccgatctcatttctgtaatgatggcactccagttccagcccatagggctagatgaagtgcgcacccgctctactttcataccaagatcctcattatgttctagagagcttatgttgcagtcctgttgccatgcatgtcccattgatgggtactacagaagttctatgggacacacagccaacagcttgactaagaacactctgcttgatgcacctaataatacagaatgtagtccttaccgggatggaaaatgctgctgctctttagccccaaaatgtttggcaggttatggatttacaaagcactgtgttgctagaatcgatcaaactgatcatacagtacaaaagagcaaggatgatggcatgcaagctgctgccagatgttgcacgctaggggagagtgaaaaattaatatgccagtgctcaagcgagataattgctagaaaaagcgactctaaagcttctttccagaatgaggtctctactgaagtattgaaccgaccttgtgttcctacattacagcagctgaagaatgtaacagaagcatcggctgtaggtggccattggccctatgaaactgtaaaagagaaagcgagtgcttgtagagattctggaatatttaaagaactaaaatccggtttctcttctggattctccagcgatgttgtgaccaagttttctgcatcacctgaattgaacaagtatggtcttgaacacaaaaatcttgtgtttgatgaagggtcacgaattgagaaatgttcctcatccagctatttgcctattagtacaggatgtgaagaagcccaaaatagtttttctagatttcacctggagccatctttagtgaagcacaaaaataatcaaatttctgagggaagtacacggaaagaacatgagaatgagggacaatgttctgaaatgtcaaagaaaacacgaacattgaggtgctgtgcaaacaaatcagaatccgatgattgtactaggaaaattgatctgtcatcccgggaaggggattctcaaccgcagcataaggctggtccattttcacgcagagtatcaaaaaccaagaggaaacatcctcccacgcatctgaataaacatgtgaaacggcttcacagcaactgcaaagttctcaatgttgacaatgaacggtcagatgatgagggcatttatgttggagaatcaaattcctctgatagaaaaaagcaagaagataatatgaccactttggatagaacaaaatgccaacagcaagggagtcgattgcttgtccgcaaactgccaaaatatgtgtctctgaattgcattgtaaatgaaactaacagtgaagatgcctgtagtgggagtgccagtattgattctagtttgattgctacaggaataactaatgataatcggaaatctcccaaaattgttccactcaatctgattcttaaaaaggctaagagatgtcatgctatcaaacccctcagtaagacagaaaatatccatttttctgaggaaaagagttcagatggttctgcagataaatcttcctctggtgacagaagtttcagtccacaagatgaactgtggtctcccaaaaagaataggtattcatctaatgtctcgaggccacacgtcaagactgactgccaaagtccctgctgtgtacttgaagaagatgagcctcttagccttgcagatatggggacaagtcagctgtcagcatcaagaagtagaggaagtaagaatcaaagagcatgcatatctcttaataggatggagagatatatacaaaggcctagtttagatgcttcatgttgtgtttgtggtatctcaaacctggagccttccaatcagttgatagagtgcagcaagtgctttatcaaggtgcaccaagcttgctatggtgttctaaaagttccaagaggacaatggttctgtaagccctgcaagatcaatacccaggacacagtctgtgttctgtgtggttatggaggtggagctatgacaagggcattgaaagcccagaatattctcaaaagcttgctgaggggtattgcaactgcaaaaagatcagataaatatgtttattcatcaggaaatgtgaacagtgagtgtacaagcaagttacatggggaatatgtcaggcatgattcatttaatggacacagatcaagaagcttcaatgctatatcttcttttggtataaaagaagcttcaataggtagtgcacgtggggacattatcagcaagtcgtggacctctaatcgcaattccagtctacttggtccacgaacaaggcagtgggttcatgtggtctgtgggttgtggacacctggtacaaaatgcccaaatacaatcacaatgagtgcttttgatatatcaggggcttcacctgccaaaagaaataccgaatgctcaatgtgtaacagaactgggggctcatttatggggtgtcgtgatgttaattgctcagttctctttcatccttggtgtgctcatcagaggggtttgttgcaaagtgagccagaaggcgagcataatgaaaatgttggtttttatgggagatgcctggatcatgctatgcttgatcctaatcatgttaatcctaagaaggaatgcttgaggagcaatgactggacatgtgcacgtactgaggtttttagaggccgaaagggagactcatttggtgctaatcgtagcaggaaaccagaagagaagtttggtgagtgcagtgtttcccaagaacagatcaatgcttggatacgcataaatggatcgaaatcttgcatgagaggacagaaggaatatgtccactacaagcagttaaagggatggaagcatttggtagtgtacaaatctagcattcatgggcttggtctctacacatcggagtttattccacgtggctctatggttgtacagtatgttggtgaaattgttgggcaatgcgttgctgacaaaagagagattgaataccagtccgggaaacggcagcaatataagagtgcttgttacttcttcaagattggaaaggaacatatcatcgatgccacccgcaagggtgggatcgcaagattcatcaaccactcttgccaaccaaactgtgtcgcaaaaataatctcagtaaggaacgagaagaaggtagtgttcttcgcggaacgccacataaatccgggggaggaaattacctacgattatcacttcaaccgagaagatgaagggcaaagaatcccctgcttctgtagatcgagaggctgcaggagatatctgaactaa

SEQ ID NO: 12723 - DNA, 1824 bp, Oryza sativa
  Clone ID: TFbOSC400426j.C1.o15.fg
atggagttcgccgtcggcagcgggagcgtgcgtgatctgccgccttccaagcggttcaagtacgtcggcggctccagtctcgggatggcgccgtgcctgccggcgaggaagcggttgtgcccgccgatgctggaggcggcggcggcggcggcggcggccgtccccgtttgcctcccggcgaagaagcgggcttatgcggcggcggcggcggtggaggggggcggtttcgctctgtgcctcccggctaagaagcgcgcctatgcgccaccggtggatgatgccgtcgcgccggcgtgtcttccggccaagaagcgcatccacgcgccgccgccgccgccgccggatagtggtgcttctccctcagtcccgactacgaagcgcgtcgacactctgccaccggcggcggcggataaggctgctatttctccgagcatcccggtcccggtcaggaagcgtgttcacgcgccgcaaccgccgccggcgccggcgccggagaaggcggcggtttctccgagcatcccggtccctgctaagaagcgcgtcagcgcgacggcggcggcggcggctactgacgcttctccccgcgtcccgttcaaggatctcgtcaacaccctgccgccgccgagagacgccgccgtttctccgagcatcccggccaagaagagcgcccgcgcgccgccgtccccgaaggacaccgccgctccggtctcggtttgcctaccgagcaataagcgcgtgatgccgccgtttctcccgccatcgccgcctccatccaaggagtcggatggagctcgcgtcgccgctgttaaagaagccaagcctcaaggatccaataaacgtggcgccaccaccaattcgagcgtggcaaatggtgtggaagatgattatgcaagagctgaagcatccaagattcaagagaagcccaagattccggagaagcctatcaatcatgaagaaatcaaggagcaagtgtcgaagaaacaaagatcaaacacttgcagagaatcgaaagatcaggaatgcaatcaatcctgcagtgctattagtgcgaagcaatctgaagtcgaagcactcgagaaagcttgcaaagcgattgatctcaacgaagcagcacgggaagaagactcctgggatggagagagagtggcgcgagagccaacgcaagaggccatggcggcggcggcggaggaggaggtggaagaggaggacgacggcgtgcactgcgcggtgtgcgggagcaccgacggcgacccgtcggaccccatcgtgttctgcgacgggtgcgacctcatggtgcacgcctcctgctacggcaacccgctcgcctcgttcatccccgacggcgactggttctgctccgtctgcaccgccgccgccgccaagaagagcaagggcaacaagccgccgccgccgccgccacgctgctgcctctgcccggcgaggggcggcgcgatgaagcgcacgacggacgcgcggtgggcgcacatcgcgtgcgcgctgctggtgccggaggtgttcttccgcgaccccgacggccgcgacggcgtcgactgctcccgcgtccccgcgcaccgcttcgccacggcgtgctacgtctgcgagagcggcggcggctgcgcgctcgagtgctcgcagcccaggtgcggcctagggttccacgtctcctgcggcctcgacgccggcctctgcatcgagtaccaggaggccaaggccggcggcggcggcggcggcgtcgtcgccggcttctgcttggagcacaccaagctctgggaaaagcaacaattgacaggcaagtacaagattgtgtcaagagggcagaaatga

SEQ ID NO: 12724 - DNA, 5325 bp, Oryza sativa
  Clone ID: TFbOSC401733j.C1.o15.fg
atggagggagcagccgccgccgccggcggcggggagatgctatccccaggtgaggcggactggcctcccgagctgcggctcccaccgccgcccccgccctccgccgcatcggagggggagccgccgcccgcgcgggccgcggtggggatggatgactcgcagttcctcggatcgatcatcggcttgcccgcccagccgccgcaggccacggccgaggcgctcgcggtggtcggggtcaagaggaggagagggaggccgccgaagaagagggacggggcggcggcggcgacggcggttgttcccgcggcgaggcctgcgaggaggagggaggacgaggaggaggtcgtctgcttcatctgcttcgacgggggcaacctcgtcgtgtgcgatcggaggggatgccctaaggtctaccatccggcctgcatcaagcgcgatgaggcattcttccaatctcgcagcaagtggaattgcggttggcacatatgcagcagctgtgaaaaggcagtgcactacatgtgctatacgtgtacatactccctttgcaaagtatgcatcaagcaaggtaaatttttcagtgtcagggggaccaagggcttctgcgatacctgttattcaactatactgttgatagaatccaaagatgaaggtgatacaaagattgttgttgattttgatgatcaaaatagttgggaatacctgttcaagctatattgggtggatctgaaagggaagctttcattaacattggaagaactaactagcgccaaggctcgatggaatgcacctactacttacactaggaaagaaaaggatgagtcatctgatgacctttatgatgctaataatgacgatgatgctggttctgactgctcctcaggaaagcgaaagagaaattcttcgagaaaaaagggtcgaaaacgtcggaaaccaaattctgattgtagcattgccacaaaaaaggttgagactgttactagagatgatggaaccctgcccaacaaggtaccaactgaagaggcgtccttgccggtagacaccaaatgggcttcgccagagctactggagtttgtagggcacatgagagatggcgatcaatcttttatttcccagtttgatgttcaggctcttttgcttgactatataaaacagaacaacctccgtgaccctcaaagaaagagtcaaattatctgtgactcaaggcttcaccgtttattcaggaaaacacgcgtcgctcattttgagatgttgaagcttttggagatgcactttattgtaagtgagccttctgcagtaaatgatggtagccaagggattatcaatcctgattcagctcaaatagatcatgccagtggatataatgacatggcagcaaagttctctcctgataggagacgaaggatgcatagaaagatggaaagagaaccacaggctaatcctgaagattacgcagcaattgatatgcataatattaacctaatttacctgcgccgtagcttgatggaggatcttattgatgatcccacattgtcagacaaaatttctggtgcttttgtcaggataagaatttcgggacttggtcagaagcaagatatgtatcgtctggtgaaagttgtcgggacacataaggtttcagaaaaatacagcatcgggaagaagatgacaaattttgcacttgagataatgaacttaaacaaaaaggagattatcacgatggacacagtatcaaatcaggattttacagaggaggaatgcaagcgcctaaggcagagcatgaagtatgatctaattagccgactgaaagtgggtgatatccaagagaaagccaagatcttccaatttgtaagagtgaatgatcttctcaacactcctgaggaaagagcacgcagaattaatgaagttcttgacgtgcatgttgactcgcatatggatcctgattatgaatctgatgatgaatttggcaacaagaaagctgttgaacgtagtgtaaattgggcaagatcagatccgttcgtttcacccgttaaagttaaatattcgaacagttcacaaaagaatggtgatgctacccgccatctcaaaaacctgtctaaacaaaatacagagcgtaaatcaggagcagcaagaaactttgagaattcccattcaccagttggtatggatattccaaaatctggcactaatgtaaagagtaccaggtgtgaaactacgtcaccttcatctcatggggttgtatcaagtgacatggaaccagaaaaagtctggcactacaaggatccttctggaaatgttcagggcccatttactcttgtgcagctatccaaatggacaagttacttcccacgtgatatgagagtatggcttacatttgagagtgaagagagatcattgctgttgactgaagtgctctcaaagcaaccaaaagattttggtcaacctgcatctgttactacaagtagtaagtcgacagtagcagacactggacaaaacagaaacactgaaattgttgatctcaacaaagctccttctcctgttggttatagtatgcttaattcttttgaaaccactgttcagtctactaagcattctgctccagaaagggaaagcgtgaactctttagatgacaggttatcacactcgactgactcagttccaccaaaggacgctaacgcttcaaatagtcaagcaatgtgtcagatcaagcattcaggctctcttccatctcctggaagtccacatcaacgatcagacttgcaccatgatgaagtacagggaggacgctctggtgaatggaacaatcaacacaacagtgaactgtggagtccatccatgccgcagacaagttctagtgcacacagtaacgtggaatctcatcacgatcattatccttcgtggtcacaggttcaacatgatcctaaaaatagtttacaagcaggttctgggaaggatctgaattcgaggtatgatattgcgcagaaacttcctagtcaacggatcacgagagatgttcccagccctgtatttgcctggagtccatctgagtccaggactgcttccagtcaacatgaaggttcttgcttgagttcaacaaccaatctatgcactcatgatgaacttcattcttcaattgcttctgcaaaggctaaaagctttgctccagcaactcctgttgaagacagaggttcaagctcaccctctggtatgctgagtctctcggaaagagcaccaatctgcagtccacagtcagctccttctgcgtctgcttctgatacatgcaagatggaggagaacatgaatcaacaaaaaacacttgaagctgatatatcaaacacgtcagttaatcagtctccacagtctaagattctccctgaatcttctcctgataaccaagatgctgaacatgaatatcgtagtccacctccaatatctgagagtaaagagttatccccacagtcaaggactacccctggatcttctcctgataaccaagatactgaacgtgaatatcctagcccgcctccaatatctgggagtaaagagatatccccacagtcaaggactatccttgaatcttctcctgataaccaagataatggacatgaatatcctagtccacctccgataccggagagtatagagctatctccgcattctaaggctctccctgaatcttctcctgataaccaagatattgaacctgaatgccctagtccacctcaaatacccgagagtaaagagctatctcggcagtctaagattctccctgaatcatctcctggtaaccaagatattgaacctgaatgccctagtccaccgcaaatacctgagagtaaagagctatctcagcagtctaagattctccctgaatcctctcctgataaccacgatattaaatgtgaatattccagtccaactccgatacccgagagtaaagagctatctctgcagtctaagattctccctgaatcttcttctgataaccaagatattaagtgtgaagatcctagcccaactccgatatctaagagtaaagaggtgtctccgcaatctaagattctctctgaatcttatcttgataaccaagatgttgaacgtgagtgtcctagttccattctgataactgagagtaaagagcttgctgtggacctccctggatcaatatcattagcacctgaaaaaacagcttctactgatgtaggtgaaaactcttcacttgcttttatttttccaaaatctactctggctggggatgatgctttgaaatcagtatttgatatggcaaaggcgcatttagaatgtgaagattcaaaggttaaagaagaactgtatgttgaatcaactgttgttataagagatgacatggttgttaatcctgcctctggagttgagtccatagacatgtctgaaaatctcttggaatctttgatggagcaaagttgtggaactttttacatggatggtacaacagccttagaaggttttctgtctggttcaacgaaggaagaaccgcaatgttctagccccattgctttatccacatgctctagccccattgcattatccccttggggtgaacatggctactatcaaggagattctgttggttcttctttatggggtgtccaggacgatgatccaatcggtaatatttggccattatcctcacaagcaccggctctccagtattcatctggtagcactgctcattttattgatgaagcaactgtcacccatggaaataatggagttgttctaagtagcacgccaggggaggaggtgggtttaccaaactcaggtgtttgcacagattggggattggttgagcaggtgaatccagaaacaaatgatgcatcggtatcaatgatagacaagaactcaggattagtagattctcaaccatcagcaaatgatggctcagatgtgggtactgcacggaacactaaccataatactaacttgtccctcaaccatgaaacagcggtacccttgagtagaagttctggagaagcatcaagaaaacacggatttattactgacttgaatgttgctacttcagaggaggcgttagggaacaccaagaactggaatccatatgctggtaatgctaatcggggcagccagcggaatcatcaccgtgacaggtactctcaaataagcgaatcttggcttcttagctcaaactactctaggagtaggtctgatggatttggcactggtggatcgtcgagatcaaccccaaggggacaaactcagagggggatatgtaaatttcatgagaatggctactgcaggaagggtgcatcttgtaactacctgcacccctga

SEQ ID NO: 12725 - DNA, 1086 bp, Oryza sativa
  Clone ID: TFbOSC400429j.C1.o18.fg
atggggcccgcgacgccgctgcgccgccggacgagggcgcggccggccgccaccagggcggagggcggcagcggcggcgacggcgacgacgacgacgttcgctgcgaggcgtgcgggtccggggagtcggcggcggagctgctgctgtgcgatggctgcgaccgtggcctccacatcttctgcctccgccccatcctcccgcgcgtccccgccggcgactggttctgcccctcctgcgcctcgccgtcgccgcactccaagaaatcacacgcggccaagaagcccaagcagttcccgctggtccagacgaagatcgtggatttcttcaagatccagaggggcccggcggcggcgctggcggcggcggcggagtcgtcggaggggaagaagaggaagcggaaggtgggtggcatccgcttggtctccaagaagaagaggaagcttctccccttcaaccccagcgacgacccggcgaggcgcctccgccagatggcgtcgctcgccacggcgctcaccgccaccggcgccgtcttcagcaacgagctcacctacgtccccggcatggctccccgcgccgccaaccgcgccgccctcgaatccggcggaatgcaggtgctaccaaaggaggacgtcgagacgctgaatctgtgcaagaggatgatggcgagaggcgagtggccgcctctcctcgtcgtctacgaccccgtcgaggggttcaccgtggaggcggacaggttcatcaaggatctcaccatcatcaccgagtacgtcggcgacgtcgactacctgacccgccgcgagcacgacgacggcgacagcatgatgaccctgctgtcggcggccacgccgtcgaggagcctcgtcatctgccccgacaagcggagcaacatcgctcgcttcatcaatggcatcaacaaccacactccagatggccggaagaagcagaatctcaagtgcgtccgcttcgacgtcggcggcgagtgccgggtgctcttggtggcgaacagggacatctccaaaggggagaggctgtactacgattacaatggatcggagcatgagtacccaacccaccattttgtatga

SEQ ID NO: 12726 - DNA, 3690 bp, Oryza sativa
  Clone ID: TFbOSC101008j.C1.o5.fg
atggcatgcgctccctcttcacacctggtacatatggatgttctggctgtgatatttctagaagaaagaagtgaaaaatcctcactttgttttgagtttggagggagagagagtagaggaaggaaacctccctccggatccaggaaatcctcatccatcctcatgacttccgacgagctcgccggtgagggtgaggtcgacggcgcggagctgatcctgtcgctgccggaggacgtgctcgggctcatctccgcccacctccgcccgcgcgacctcctcgccctctccgccgcctcccgcagcctccgcaacgccgtctccaccgccgacaaggcgtggctcgcccagtgccgccgcctcctccccaccgcctcccacctcctcgcctggcgcaccgccctcgcccactcctccctcgccgtctgccgcttcctccactccgccgccccgctcctcggcctctgggcccaccagaaccccgagctcggcaacctcgtcctcgccctccctggcttcctctccctcgtcgccgtccgctccatcccccaggagctctccccgcgcctcctctgggcccccgtcttcgagctcctcgccgaccaccgcggccaccccgccttcctcttcctccacggcgccgcccacgactccctcttccccggcctcctctcctcctccctccaccccctcgccaacaccctcttcctcgaggcccacacctccacctccacctcccacttctcccgcctcgccttcgccgaccgccgccgcctcctcaacgccctcgtcgccgcctcccgcctcaccctcccccccgatgtcgccactgccccgctcttcgcgcgctccgacgccgacctcccgctgctcgccgcgcgccgggaggccatgctgcgcctgcacagccagtctggcgggggcatggtgcgcagggccgagatcgaggcgctgctgatcggggccaggaagacggcggcgctgccggccgacaccgccggcgacaagatgcggctgcggaggaccttctcggtggtcgccggttttgtcaggaacagcctgcggcagatggtgacacggtcggcgtccgccaattccagggctgagtacgcccaccccaagcatctgccattggacgagttcctgcgagccggagagagcgtcggcctgagcctccgtggcgcgcggatgaggctgtctatctaccggaattggccaagcatgcatgacaaccggtttgtgctctacaagctgacgacgcaggcgcccatgcctggccgggagtatgccggtttgtggggaggcacattcgggtggccgccagggcggccggaggatgagcgcaaacctggcaaggctctcttcttcctactcctctcctatgaggaggacagcgaagggaagcttcagctgattgcaaccaaggtgttggagggtacacactatgtcgtgcatccgaatgggtcctctatgtttatcgtgcgggtcggtgagccatccactgagacttttccgtggcaaaccgatgaggagtcgcgtgctgtggagatcaatagaagctttgctggtgagggcattgccaccgggtatgggttcaggtatcctggctcaaagcccggatcgctctttgtcctcctggatggccggcttgcatttgtttggagagagaacaaagctgttctcaccttgcaaaggctggacctggaggatatgataaggagaggggagcgtgtgccttcattgccgccgatacccaacttcgcctacctcacaaagtcttactccaatgtctttgctgtggcacctggcagcacgagcttcccagcttctccaaggtttatctattttggtaattcagttgtgagcaaaatcagacgctttatgctaaactttagatataaactaaaatgtcaaaatttagcaaatgagctacagtcgcagatccagcctcctgatgataacatcatgagtattgattacctgcgtgctattgctacgtctacagctgttatggtagaatataaatggaggagtaaaagaaacgctactagttgtatttgggcctttgggggcgtatggagcgttgattttggtccagcccggcctttgccactcatggccaacggcgccaattctaagaaagacgccaaggcccaacattggattagctggagggacactctccacggcttcctccaatcccctgctattagccagggtggaggaattcagacctgcatccgtcatgctctccaacacaatccttgcttgctcaccaatggtgttgttgttcacactgaattcaaaggtaacccagctcattcccaaggagaggaagcaaaagtgcagcaccctaatggtgctgctggaggcaaggtggtttctgcagatgctgctatacaagatgcggctgccgcagcttcttccgaagctaacaaggcaatgtgtaataatgccctcttcgacattttggtctcccagaaatttgccttgttgtgccatttgctacttgggaccttccatgtcaataaacctggtgatgtcatcgacttggaaaaaatcgacgccaagatgagaaatggagactatgcccacaaccctgcactatttgacgatgatatccagcagatgtgggagaagtttgagcaagttggccaagagatgacaggtctagcgagcaacctttcaaccatttcacgagtttcataccaaaagcaggcttctggattttctgaagctgaggtggctgagcacagaatagaggaaataagtttgccgggtgctgtccacgttgtcacaaaggagtcgactaccaccgtgcagttggccccatgtgattctagtcattctacaataccgaaacgaactgtgccacctggacgtgatctgtgcccttgcgatggttgtggcaccaaggtagatgttgaagaaggcctaatctgtgatgaatgtgacaccatgtaccactttgcatgtgtcaagctactcaatcctgatattaagcaagtcccagcaatctggcattgttcaacctgcagcttcaagaaaaaagaattggctgcagataccacgaataatgttgcccatgactgcttgcatggtggtaactgtgttttgtgtgaccagctcgagctggtgaagacagaagaagaagatcccaagcttcccataaaaattgaattagctgaagaaagagaggggagctccgtctcaagcatgggggaagacaatgaaccagacctgtcaacaactgccctgtcaaacttgtgcaaacactgtggcacatgcgaagacgatgacaagagattcatggtatgcggacatccttactgcgtttacaagttctatcatatccgatgcctgaaaacaagccagcttgcaattgagcaacaaaagaagcttggttgctggtactgcccctcttgcctctgcagagggtgcttccaagacaaggatgatgaccagatagtcatgtgtgatggctgtgatgaaggttatcacatatattgcatgagaccagcacgcaacactatccccaaaggtaagtggtactgtacattttgcaagatccgcagggcagcggaaggaatgcataagtatgaggattctgtgctgaaaatacatgggaatagtaagcatgcttgtaatgtgaatcagtcgaaggattctgaaggtgatggtactgaaaagtga

SEQ ID NO: 12727 - DNA, 1845 bp, Oryza sativa
  Clone ID: TFbOSC421502j.C1.o2.fg
atggatcaagcgaggatctcgttcttcccggatggtctccgtgtgatgatcatcgacgacgacgcaaaggccgtcagaagggcaacggcgacgttgtcccaactgcagtacgcagtggtggcgacgcactccaccgcaagcgctggtctgcgtgccctctccggcgacaacgtggtagaaatccaagccatcctctgcgatgtccacaaggtggtctcctccggcttcgacttccgccgcgtcgtcgagtccgagcttcgcatccccgtcatctaccttctgtcgaagatggaggaggaggacatggtcgccggcgaggacgcggagttcctgaaccacctcctgctgacggcgacctacatcgtcaggaagccgctcaaccccaccgtgatggcccggctgtggagggtggtggcatggcgcatgtactgcctggaagaaaggattcaggccaatgtcgctgccaatgctggcgctggtggcgaagacgacgacgacgacgacgacgtagttatcgtcgaggagccccaagtgcacttcaaggtggtgagaagaacgtccggtggcagcaggaagaggcagctgacaatcaacgtcgtcgacgacggcaaccgcggcagcggcagcggcggcggcggcggcggcggcgcagatgccaacccaaccaggatactgcagcacatcactagcaacttacaggaattccgcacgaagcaccagaagaaggacatggccatcgagcgtcccctcatctcgtcggactccatgttcctcaaagccatcctcccgacgctcaaaatctcaccatgcaaccccctgaccctcactggcggcatcggttcaagcagtgtcgccgcggaggccttcgctggcggcagctcttcagctgcaccacttcaaattccagttttccagcagcaatccaccggcaatggcaacacggtgattagcttcagcaacaatgcttcaccgatggccatgcgtgcgccaaccgacaatactatgatatcgttcaacaatgtctctgctgcgccggtcgccaatgcggtgatctccttcagcaacatttctaggtctgctgccatgcaggcaccagcggcaagggggcaacatctgtccggtgatgtccagcagctggattttccccagcagaagctgtactttgggcccttctcctaccaagggcctccgccaccttccatgcacaaccacatcaacctactcccgccgacgtcctcccctgtgacctgctccatggacaaaggcaaggttcctattatcgagctcccatatgggatgcctgtggatgacttcctcgtcagtcaaaccacatatggcggtgccggaccatccatcggagccactgacgctgctgccgctgcgtacccttacacagatgcaccgagcaataacgttgcaactggctgtctcatggtgccaccaatggggccagcattcagtatcactgagccaactgtggtggcccaaggtgagggcaccggcaccggtgtcgacgccggcacatcagagaagaacgcgatagtagaagcaccaaacaaccccgcgccattaatggtactggatcaggttgctgctgatgctgcaatggatgttcaagaagacatcatgttctctttggaatctcttctggggccggactatgacctgctacctatggaagacgttagtgctccggacaccgctgcagccggtgatgcagctggtggctcactggacggagaggaaggcggcatggacattggttgggatctcgacctggatgacatcctggtggagaacgttaatgacttcgcgttcctggacaaccttgccgggagcgagtag

SEQ ID NO: 12728 - DNA, 567 bp, Oryza sativa
  Clone ID: TFbOSC407404j.C1.o6.fg
atgtcgtcgatcggcgccggcgcaggaggagccgtggtgggggcggccgtggcggcggtggcggtgggcggcggggcgccgccgcacgtcctcgccgtggacgacagctcggtcgaccgcgccgtcatcgccggcatcctccggagctcccggtttcgtgtgacggctgtggatagcgggaagagggccctggaactgctaggctcggttgcggtgatatgcagccgcaattttctcatgttcctttggctcgctcatcatcttgcaggaaccaaatgtgagcatgataatcacggactactggatgccggagatgacgggatacgagctcctgaagaaagtcaaggagtcatccaagctgaagaagatccccgtggtgatcatgtcctcggagaatgtgccaacaagaatcagcagattaccgagcacttaaccattgttcttccatctttgctctgttcgattggtttattaaccagatgccttgaggaaggcgcggaggatttcttggtgaagcccgtccggccatccgacgtgtcgcggctcttcagccgcgtgctaccatga

SEQ ID NO: 12729 - DNA, 867 bp, Oryza sativa
  Clone ID: TFbOSC405568j.C1.o1.fg
atgctcaatgtcatggtaatcgatgaagatagacgtcatgcctactctacaagttccatgctcactcaattcaacttttgtgtcacagtgtacacaagccccatcaaagcgctggattttcttgagaatcatgcacaagattttgatttggtactggcagaggtgcacatggaagagctgaatggttttgcatttcttacggcttctaggaagattcataaatccattcaagtgattaatctaaaagttgtacgaatggagaagataaagggtttgcttcaagatgactcatctaaaaatacgaaggtgatcaagaacaagggcaccactgattgcaatcaaattgctactcatgttcatcagatgcaagtcctcaatggagatgatgtttacaccgctatgagaagatccttgcatcttgggactatctttgatgagtccaactattccaatgatccttgcagcaatgaatataaagttggagaagatgagattggaggttatggctgtgccaatgaggcaaatgccacacactcatctgatgatcacaatgttgttgttcctgatctatcctgcaatatagcagatgatgtttcacaggagattatgagcaaggctactacttgtgttgatcatcggaagcaagacaccacacgaactgatgggccagcagctatgagtgctgatgaagctaatgctacattctcaactggtaacctgcagcaggttaatgtcattgtgacctgcaatggagatggttcacaagagagcatacagaagaatacttgtgatgaccagcatgcccccacaggaagtaagccagaaactttcagacttgtgaactattcagactccgagagcgattaa

SEQ ID NO: 12730 - DNA, 759 bp, Oryza sativa
  Clone ID: TFbOSC405568j.C1.o4.fg
atggctcaaagggtaggacactctgctgatggggtttttgtcatgatcgttgatgaagataagtcacatgccaacttcgcaagaggcatgctctccagcctcaattttcatgtgatagtgtactcaagtcctgtgaatgcactcgtttttctggagaataacgcacaagacgtcgctgtagtcttggcagcagtggacatgaaacaattgagtggttttcagttcctcgaagctgcaagagtgaaacgccaggaccttcaagttatcatgatgtcagctgagacaacaatgtccacaatgatgaggtgtgttaaactcggtgcacgttttctagtgaagaagcctcttaacgaagaaactgtaggtaatctgtggcagcatgttgacctgaaagttttgaagatggagaagatcagggaattactgcaagatgaaaataatgaagaggaggaagtgaattcctttgaagctaagaaggctgattcagttaaagttcaatcagatgagaagggacatgacaatgctaaaatctctaacactgctgctgctgaagggtctgatgaaaaagtctctagtggtgatggtcatgtagtgcctaaagcgtataataatgtgaatgttgaagagagcataggtagtaacaatacttcaggtgaacaagtctccgacaagatcaagagtgatgcaagagttggggtgatccttgtggactacccagattttgaggatgatgagaccaagaaacccacaagcacttag

SEQ ID NO: 12731 - DNA, 882 bp, Oryza sativa
  Clone ID: TFbOSC421794j.C1.o4.fg
atggcgactaggcttggcagggaagccaggggggagcggtgggttcaggggatagcggcctacgtgcatgggggtggcaggctaggaacacctgacagggagaggtggcggtggggagaggtgacacggttgaggaagggggctgaggtagggagagagtacgggcggagcaggtgggagtacgacgggcaggagacgttgcctggggacgggaccccgaccccctggtacagtacgggcatacgtactatgagggtgccggcggcggtgacgggagggtgcggatgcggtgtcgacggcggcggaggttgctgccgcggtggtggcaagctcgccgactgggaggaggggaaggatgatgagatgaagagtgtcgtcgtcaagggctggacgaggatggcgcaagtggtgccgctgcacgacaacgcatcggcagaggacgacgacgacgacgaagaagacgatgacgaagatgatgatgatgatgacgacgaggacgatgaggaggaggcggcgccgccgtacgtgatggccgtcgatgacagctccgtcgaccgcgccgtcatcacggcgctgctccggcgatccaagtaccgcgtcactgccgtagacagtgggaaaagggcgctggagatattgggctcggaacctaatgtgagcatgatcatcacggactactggatgccggagatgaccgggtacgacctgctcaagaagatcaaggaatcgtctgagctgaagcagatcccggtggtgataatgtcgtcagagaacgtgcccacaaggatcagcagatgcttggaagaaggcgcggaggacttcctgctcaagcccgtccgaccggcggacatctcccgcataaccagccggatgctgcagtga

SEQ ID NO: 12732 - DNA, 1833 bp, Oryza sativa
  Clone ID: TFbOSC404834j.C1.o7.fg
atgcaaaacagcattgatcttgttttgacagaggttgttatgcctggtgtatctggaatttctctattgagtaggatcatgaaccacaatatttgcaagaatattccagtgattatgatgtcttcaaatgatgctatgggtacagtttttaagtgtttgtcaaagggcgctgttgacttcttagtcaagcccatacgtaagaatgaacttaagaacctatggcagcatgtgtggagacggtgccacagctccagtggcagtggaagtgaaagtggcattcagacacaaaagtgtgccaaatcaaaaagtggggatgaatccaataataacaatggcagcaatgacgatgatgacgacgatggtgtaatcatgggacttaatgcaagagatggcagtgataacggcagtggcactcaagcgcagagctcatggacaaagcgcgctgttgagattgacagtccacaggctatgtctccagatcaattagctgatccacctgatagcacttgtgcacaagtgatccacctgaagtcagatatatgcagcaatagatggttaccatgtacaagcaacaaaaattccaagaaacaaaaagaaactaatgatgacttcaaggggaaggacttggaaataggttctcctagaaatttaaacacagcttatcaatcctctccgaatgagagatccatcaaaccaacagatagacggaatgaatatccactgcaaaacaattcaaaggaggcagcgatggaaaatctggaggagtcaagtgttcgagctgctgacttaattggttcgatggccaaaaacatggatgcacaacaggcagcaagagccgcaaatgcccctaattgctcctccaaagtgccagaagggaaagataagaaccgtgataatattatgccatcacttgaattaagtttgaaaaggtaccatacacctgtggcttccaatcaaggtgggacaggattcatgggaagctgttcgctgcatgataatagctcagaggctatgaaaacggattctgcttacaacatgaagtcaaactcagatgctgcaccaataaaacaaggttctaatggtagtagcaataacaatgacatgggttccactacaaagaacgttgtgacaaagcctagtacaaataaggagagagtaatgtcaccctcagctgttaaggctaatggacacacatcagcatttcatcctgcacagcactggacgtctccagctaatacaacaggaaaagaaaagactgatgaagtggctaacaatgcagcaaagagggctcagcctggtgaagtacagagcaacctcgtacaacaccctcgcccaatacttcattatgttcatttcgatgtgtcacgtgagaatggtggatccggggcccctcaatgtggttcatccaatgtatttgatcctcctgtcgaaggtcatgctgccaactatggtgtcaatggaagcaactcaggcagtaacaatggaagcaatgggcagaatgggagtacgactgctgtaaatgctgaacggccaaatatggagatcgctaatggcaccatcaacaaaagtggacctggaggtggcaatggaagtggaagcggcagtggcaatgacatgtatctgaaacgcttcactcaacgagagcatagagtggctgcagtgatcaagtttagacagaaaaggaaagagcgcaacttcggaaaaaaggtgcggtaccagagcagaaagaggctggccgagcagcggccaagggtccgcggacagttcgtgcggcaagctgtgcaagaccaacaacagcagggtggtgggcgcgaagcggcagcggacagatga

SEQ ID NO: 12733 - DNA, 602 bp, Oryza sativa
  Clone ID: TFbOSC8667j.C1.o1.hg
atgtcaaaaccatcgccgccctggaaagcgacgcggcgatcgaacgcgatatcatatcgaatcatctccacttctcgatcttcttcagttggccgtgccaggcgtcaccggatccgcgccttcagatttgggaaagttgctggctgcatcgccaagatttggctggggaaagttggtagcaaccgagaaatcgtccgatcaggaggatttcttggctgagaagagaaaaacatatctgtgctagctttgccttcttccatggcagtggctatagaggctccgttccatgtcctggctgtggatgatagccttcctgacaggaagctcatcgagaggctactcaagacctcttctttccaagttaccactgttgattccgggagcaaggctctggagttcttggggctccatgatcatgaggacagcccaatttctactcaatcagatcagcaggaggttgcagtgaacctgatcatcacagactactgcatgcctggcatgacaggatatgatcttctcaagaagatcaaggaatcgtcttatttaagggacatcccagttgtgatcatgtcatcggataacattccttcaaggatcaatag

SEQ ID NO: 12734 - DNA, 675 bp, Oryza sativa
  Clone ID: TFbOSC400220j.C1.o88.gm
atgacgccctccaggacaggtaggggaccggcggcggcgggagccgcctcgcctcgcctccgccgcgctcgcctcctccgcggcacctcgccgccgctcgcctcctctgccgccgccgcctcctccgccgcatcctcggccgccgccgctcgcctcctctgccgccgctcgctgcctcatccctcgccgccgctgccgctcgccgcctcatcccccaccgccgctcgccgtcccctgcctgccgctgactgtaggagagatatcgatctgatggccacctgcaggagccgtggcgtcgagaggggcggcgcgccgcacgtcctcgcggtggacgacagctccgtggaccgcgccgtcatctccggcatcctccggagctctcagttccgcgtgacggctgtggacagcgggaagagggcattggagctgctaggctcggaaccgaatgtgagcatgattatcactgactactggatgccggagatgaccgggtatgaactcctgaagaaggtcaaggagtcgtccaggctgaaggagatccctgtggtgatcatgtcctcggagaacgtctctacaaggatcaacaggtgcttggaggaaggagcggaggatttcttgctgaagcccgtgcagccgtcggacgtgtcgcggctgtgcagccgcgtcctccggtga

SEQ ID NO: 12735 - DNA, 384 bp, Oryza sativa
  Clone ID: TFbOSC400542j.C1.o8.fg
atggctcgcaagatgatcagggtgctcctcgtcgaggacgaggagatcaatagggtcgtggcgagagcggcgctgaaggcggcaggcggcggcgacgtcgtggacgaggcggagaacggggaggtggcggtgcagcgggtgcgggacgcggcggcgccgtacgacctcgtgctcatggacaagcagatgccggtcatggacggccacgaggcgacgaggcggatccggggcatgggggtgaccacgccgatcgtcgccgtgtcgagcgacggcctccccgccgacgtcgacgcgttcatcaccgccggcgccgacgacttcacgtccaagcctctgtccaaggagaagctgggagtcatccttgccaaatttagacttgcttaa

SEQ ID NO: 12736 - DNA, 3147 bp, Oryza sativa
  Clone ID: TFbOSC412867j.C1.o3.fg
atgagggaggtagaagaagttagcaaatggagacgccgttgctgctacttctggatcctattcccgttggctgtgattgcaacatgcatgacaatcacagtagtcaccttctgctcctctacgatgtacatgacagaggtgatgggtgaggccaccaagggcgccatggattcggctttgatgcacatcgccggcaacatgcgacctcttcttgaagcaaatcgctcagttttcaccattgccaacaccttgcatgttcagggcaacatggcttccttttctcatgtgggacccaagctgttcttggccttctccatgcagccgctgcaagctcaaatctcctacgccgccgtcgatggcgccgccttcgcctactaccgcgccggcggcggcgacggcgaggcgagagcgatgttcgcgaggccgaacggcacgtggttcacccaggcggttgatccggcgaccggccggcccgtcgggaacgccacggcggcggcgccgcaccagcagctgccgcccaacgtgacgcggctcctgctcgacggcggcggcggcggcgcgtctctcgccgacgggtgggcgcgccccggcgtgcggatgctgttcctctcggccccggttggcggcggcggcggcgcggtctccgccgccgtggccgtcgacgacgtcgtcctccgtggcgccgccggccttaggcagctccgtgacctgggcatgtactacgcggtcgccggcaacggcggcgccaccgccgcaccaccagcaccggagccggcggcatatagatctttgctcggcgacggcgccgcggcggaggagatggcgttgttctcgagcgtgaagtgcaccgcgtccgccattgacgcgccgcccaagctcgacgtgcacggtgtcaagtctgacaagtacagattcgcgtgcaccaactttgacatatccggagtacaaatgggtttcagggtggtgctccggaagagcgcgatggtgggcgtgttccggcggggcggcgtgacgatggtggcggtggcgtgcgcggcggcggcggcggcgacggtggcgtgcgtgctgatggcgcgggcgctgcggcgggcggtggcgagggaggcggcgctgggcgccgacctcgcgaggcacagggacgcgctccggcaggcggagcgcaagagcatgaacaagagcaacgccttcgccagcgccagccacgacatccgctccgcgctcgccgccgtcgccgggctcgtcgaggtgtcgcgccccgaggccaaccccaacatcgtcgacaacctcaaccagatggagctctgcaccaacaagctgcttgatatactgaactcaatactagacacaactaaggtggaatcagggaaggtgcagctggaggaagtggagttcaacatggcagacgttttggaagaatccgtggacatggcgaatgttgtcggcatcaccaaagggatcgaagtgatctgggatccctgcgatttctctgtcatgaaatgcgacaacatcatcggtgatagtaagagattcaagcagatccttgacaaccttcttggcaatgccatgaaattcacacaagaaggtcatgtaattctccgggcttgggccaataggccgattgcgaggggttcaatcggtgctccttcgagatttgcttatcgaagcctcgagaacaatttcttcagcttcttctttggagcaaaggaagacagagtctcgcagaattctttcaatcctttgcagaatgatcccaactcggttgagttttactttgaggtagttgatactggcattgggatccccaaggagaagagagagtctgtgtttgagaactatgttcaggtgaaagaagggcatggaggcactggtcttggacttggaatcgtgcaatcctttgttcgtctgatgggaggagagataagtatcaaagaaaaggaaccaggggagagaggaacatgctttgggttcaatgttcttctgaagactagtggaaaccaagcagctgaagaagatatagaggaagggccatcaacagtgagtgaattagacatccgagcctcagtgttcagggagactaactgcttcaagggttggcattgcatcctctttgttcatggtgatgagaccagaagagtcttgcaagcttggatggagagcattgggatgaaagtttggatggtcccaggagttgagtccatctcttctacattggagaaggcgcgatcctcccgcgatgattgtgatgtcgatcgatgcttcagctccaaggagatggtcagccaggttcttccaactacattgaggaacaataatatcatggcacgcaatcttggagagcatcatccacttggcatgcttctcattgttgatgtgtcaaatgggcagcttgagaatattcagagacaggcaagagattttacccaaatgaggagtcaagttccatgcaaatttgtctgcttgactgatctgaggacctcttataaagattttagaaggtttgaggagatgagctgcgatctcatcttgcgaaaaccggtgcacgggtctcggttgtactctcttcttatgactctaagagatgtccagtcctcgcctatgcacagatcatctcttgttggccatgagaattatgtcactaggcatcaagattctgcaaatattgttgcattagctgaagttggacgcttggatcaggggctaaaaactgaagaagataggccattggatggcatgcatgtgttgctggttgaagacactttggtgctacaaactattcagagaaagatgttgaaccaactaggagcaatagttgaattggcaggggatggagctaaggctgtggatatgttcagagatgctattgagagagcaagtgtttcagaagagcatagtgtacccttgccctatgatgtcatcttcatggattgccagatgccgcgaatggatggctatgaagcaactaggcgcatccgcgaggaagaaagccgctacggaattcgcactccgatcattgcattgactgctcattctatggaggatgatcttcagaaggctattgatgttgggatggatctacacatgacaaagccgatagagaggagaagaatagtagaagctgttcatggtgtctgcaaaggcaaaaactga

SEQ ID NO: 12737 - DNA, 1998 bp, Oryza sativa
  Clone ID: TFbOSC406972j.C1.o7.fg
atggggggtggagtggaggagaggaaggtggtggacttggaggacggggacggggaggaaggggaggatgcggcggcggtggcggcggggtcgagcagggagacgcggatgctgccgaggatgccggtgcgggtgctgctcgctgagggcgacgactccacgcgccacatcatctgcgcgctgctccgcaagtgcgggtatcgagttgccgcagcctctgatggtgtgaaagcgtgggacatactaaaggaaaaatctttcaatatagaccttgttttaactgaagttgaacttcccttgatgtctgggttcctgctgctctccacgatcatggaacatgacgcatgcaagaatatccccgtcataatgatgtcttcaaatgattccgttagcatggttttcaaatgcatgctaaagggtgctgcagatttccttgttaagccaatacggaagaatgaattaaggaacttatggcagcatgtttggagaaaacaactgtccagcggtgttcttgatgtgcagcatactcaacaagaagataatcttacagaaaggcatgagcagaagaccggagtgacgaaagctgaacatgtgactgaaaatgttgtccacaagaacatggaatgcagtgaacaagaaagtgatgctcaaatgtatttagcccttcagatctgcatcaatgttggtgaactaatttatcaatttttcaagtcagcgaaatgtcacagttcggtcctcttgggtattgcaaaatggagtacatatgacaacagtaagagttcatgtacaaggtcagaactggaggctgacagtaggcaaaccaacaatttactggaatataagcagccaatgggaaggcatttctccaagcctgaccacaagaacaccgagaaaaatggagggactaaaattcatgcatctaatgatggcaacttgattccacggagggaagaggatgcatcactgaggaggatgacatgttcaaatgatattaattgtgagaaagcttccagggatatggagctggttcatattattgacaatcagcagaagaataacacacatatggagatggatgttgcgagagcaaattcccgtggaaatgatgacaagtgcttttccattccagcacaccagttagaactttctctcagaagatctgactacagtagattagagagccaggagaaaaatgaacgaagaacactgaaccactcaacttcatctccattttccttgtacaactgcaggacagcatcatctaccattaatgctggtgatgctcaggcatgcagcacctcggcaacacatatagatcttgaaaacaaaaatggagattccaaaactccctctcaagacaagagggaaacaaaccaacctcccattagagttgtaccatttcctgttcctgttggaggactaacatttgatgggcagccattctggaacggtgcacctgtggcatcccttttctatccacaatcagctcctcccatttggaatagcaaaacatctacctggcaagacgcaaccacacaagcaatttctctgcagcagaatggtccaaaagatacggatactaagcaggttgaaaatgtagaggaacaaactgctcggagtcatctaagtgctaatcggaaacatctccgcattgaaattcctacagatgagccgcggcatgtttctccaaccaccggtgaaagtgggagcagcactgtgctggacagcgccagaaaaacgctcagtggcagtgtctgtgacagctcttccaaccacatgattgcccctactgaatcatcaaatgttgttcctgaaaatcctgatggtttacgccacctgagccaacgagaggctgcactgaacaagttccggcttaagaggaaagacaggtgctttgagaagaaggtgcgataccagagcaggaagctactagccgagcagcgaccgcgggttaagggtcagtttgttcggcaagatcatggtgtccaagggagctag

SEQ ID NO: 12738 - DNA, 3075 bp, Oryza sativa
  Clone ID: TFbOSC415694j.C1.o3.fg
atggggaagccggaggcgaggagtgggtggaggaacgcggcggcggcggcgtgggtgctggtggccgtggcgtgcgcggcgtacatgcactggcacctgcggcgggagaccatggaccgcgccgaggagcggctcgtcagcatgtgcgaggagcgggcgaggatgctgcaggagcagttcggcgtcaccgtcaaccacgtccacgccctcgccatcctcatctccaccttccatttcgagaagttcccgtccgccatcgaccaggatacatttgcaaagtacacggcaaggacatcgtttgagcgcccactgctgaatggagtggcatatgcgcagcgtatcttccatcacgagagggaaatgtttgagaaccagcagggatggattatgaagacgatgaagcgacaggctgcgcctccacaggatgagtatgccccagtgattttttcacaggatacggtttcctaccttgcacgtatcgacatgatgtctggggaggaggaccgggaaaacatcttacgtgcaagggctaccggcaaagctgtgttgacaaacccattcaggttgcttgggtcaaaccacttgggggtagttctcacttttgctgtgtatcgccctggtctagctgctgatgcatcagttgaggagcgtgtggaagcaactgctggttgtttggttgttgtggtctcatcaaatcaaatccctactaacagatatcttggtggagcttttgatgtggagtcactcgtggaaaatttgctgagtaaacttgctggcaatcaggatattgtagtgaatgtgtatgatgtcacaaatgcttctgaacctatggccatgtatggtcctcaaagtccagatggtaaagtgtccctcttccatgtgagcacgcttgactttggtgatcctttcagggcgcatgaaatgaggtgcaggttggtagcttctttctcatggcataaatttgttggttgcttcttacttggctcttgcactaattctggcaacctgagcaggtataggcaaaagcctcctctgccatggtctgctatcactaatcctttgggaacttttgttatatggatgcttgtggggtatataatttgtgccgcatggtctcgctatgataaagtttcagaggattgtagaaagatggaagagctcaaaactcaagcggaagctgctgatgttgctaagtcccagtttctggcaactgtatcccatgagatcagaacacctatgaatggcgtccttgtcgtccagcgatctaaaattctaccttttgatgtaggaatgctcgacatgctcttggggacagatctgagtatgactcagaaggattatgctcagacagcccagatgtgtggcagagcattgataacactgataaatgatgtacttgatcgggctaagattgaagcagggaaattggagcttgaggcagtgccatttgacctgcggtctctcatggatgatgtgatctccttattttcttcaaaatcaagagagaagtgcattgagcttgcagtgtttgtatgtgatgatgttccaaaagttgttattggagatccatggagatatcgacaaatactgacaaatttggtgggaaatgcagtcaaattcacagaacggggccatgtatttgtgcgagtctgcctggctgagaactcaaaagtggaagctaatcaagtccttaatggaaccatgaatgggaaagacggcaaagttgagactacagctaatggcgccttcaatactttgagtggttttcaagccgcagatgagcgcaataactgggattattttaagctgctgctatctgataaagagccccatatggatgagcttgagtgcgacagatcttatcaaaatgattgtgactgtgtgaccttgatgataagtattgaggatacaggtgttgggatcccattacatgcacaagatcgtgtttttacgcctttcatgcaggctgatagttcaacttcaaggaactatggtggaactggcattggtttaagcatcagcaaatgtttagctgaacttatgggcggtcaaataagtttcactagccgtccatttgttgggagtacatttacattctcagctgtcctcaagcgctcatgcaaagatacttcaagtgattcaaagaggagcttatctgaggcactaccaactgcctttaagggaatgaaggctattttagtagatgggagacctgtacgtggagctgtcacacgatatcaccttaacaggttgggaatagttgttaaagttgtgaataatttgagtatggggcttcagactttagctggacaaaatggtgtgaaagagtccagggagaaactgtctatgctttttatagagagtgacatctggaggcctgagacagatatcctattattgaatcgtctgcatgagctaaagaataatggtcaggtgcatgagttgccgaagctagttcttttggtaacatcagaagctgacaaggacagatatggatccgcatttgatattgtgatgtataaacctataagggcaagcacaattgcttcttgccttcaacagttgctaaaagtagtgatgcctgaaaggaaagacaatcaaaataggccctcatttctccgcagcttgctgattgggaagaatatattgattgtagatgataataaagtcaatctcagggttgctgcagctgcgctcaagaaatatggtgccaaagttcattgtgttgaaagcggcaaagatgcagtctccttacttcaacaaccacactgctttgatgcatgctttatggatgttcagatgccagagatggatgggtttgaggcaactagacaaataaggcaaatggaggtaaaagcaaacgaggaaaggaaggcgttggatttaatggagggttcaacattcgtcgagtcccatttgcctgttctggcaatgaccgcggatgtcattcaggcgacatatgaagaatgtataaaatcgggaatggatggttatgtgtccaaacctttcgacgaggagcagttataccaagctgtctccagattagtggtgggaacgaaggaatcagcggtatga

SEQ ID NO: 12739 - DNA, 2409 bp, Oryza sativa
  Clone ID: TFbOSC403629j.C1.o1.fg
atgggtagcgcctgcgaagctggtacggacgagccttcccgagacgatgttaaggggacagggaatggcatcctggagaatggtcatagtcacaagccagaggaggaggaatggaggaatggcatgggagaggacttacccaatgggcacagtacaccaccagagccccagcaaacagatgaacagaaggagcaccaagtgcagattgtccggtgggagaggttcctccctgtgaagacactgagggtcttgctggtggagaatgatgactctacccgtcaggtggtcagcgcactgcttcgtaagtgttgttatgaagattcaagagggttctgcgcttccagatttccaagtgcagttatccctgctgaaaatgggctacatgcatggcaatgtcttgaagatctgcaaaaccacattgaccttgtattgaccgaggtcgtaatgccacgtctgtctggcattggtctgcttagtaagatcacaagccacaaaatttgcaaggatattcccgtgattatgatgtcttcgaatgactcaatgggtacagtctttaagtgtttgtcaaaaggagcagttgactttctagtgaagcctatacgtaagaatgaacttaagaacctttggcagcatgtttggagacgatgccacagttccagtggcagtggaagcgaaagtggcatccgaacacaaaagtgtaccaaaccaaaggttgatgatgaatatgagaataacagcggtagcaataatgacaacgaggatgatgatgacaatgatgaagatgatgacgacttaagtgttggacacaacgctagggatggcagtgataatggcagtggcactcaattttctctaaatgtaggacaattgtgccaatgtattctcatgccatcagcctgttttaaaacacagagttcatggacaaagcgtgcagtggagattgacagcccacaacaaatgtctcctgatcaaccatccgatctaccagatagtacttgtgcgcaagtaattcaccccacatcagagatatgcagcaacaggtggttaccgactgcaaataaaaggagcggaaagaaacataaagaaaataacgatgactccatggggaagtacttagaaataggagctcctagaaattctagtatggagtaccaatcttctccaagagagatgtccgttaatccaacagaaaaacagcatgaaactctcatgccccaaagtaaaacaacaagagaaacagatagtaggaacacacagaatgaaccaactactcaaactgttgatttaattagttcaatagccagaagcacagatgacaaacaagtagttagaatcaataatgctcctgattgctcctccaaggttccagatggaaatgataaaaatcgtgattctctcattgatatgacatctgaagagttgggtttgaagagattgaaaacaactggatctgcaactgaaatccatgatgaacgaaatattctgaaaagatcagatctctcagctttcaccaggtaccatacaactgtggcttctaatcaaggtggagctggatttgggggaagctgttcacctcaagataacagttcagaggctctgaaaacagactccaactgcaaggtgaagtcaaattcagatgctgctgaaataaagcaaggctccaatggtagtagcaacaacaatgacatgggctccagtactaagaatgccatcacaaaaccttcttcaaacaggggaaaagtgatatcaccatcagctgtcaaagctacccaacatacatcagcattccatcctgtgcagcgtcaaacgtcacctgctaatgttgtagggaaagacaaagttgatgaaggaattgctaatggagttaatgtgggccaccctgtagatgtacaaaatagctttatgcagcaccatcatcatgttcattactacgtccatgttatgacacagcagcagcagcagccatccattgagcgaggatcatcagatgctcagtgtggttcatccaatgtatttgatcctcccattgaaggtcatgcggcaaactatagtgtgaacgggagcttttcaggtggccataatggaaacaatgggcaaagaggacctagtactgctcccaatgttgggaggccaaacatggagactgttaatggtatcgtggatgaaaatggggctggaggtggcaatggaagtgggagcggtagtggtaatgacttgtatcagaatggggtctgttaccgagaagctgcattgaacaaattcagacagaaacggaaagtgaggaactttggaaaaaaggtgcgctatcagagcagaaagaggttggctgagcagcgccctcggatccgcgggcaattcgtgcgacaatctggacaggaagatcaggcaggccaagacgaagacagataa

SEQ ID NO: 12740 - DNA, 2691 bp, Oryza sativa
  Clone ID: TFbOSC900171j.C1.o16.fg
atgtctcccgacgccgacgcggcggcggcggcggcggccggcggcgagggcgcggcggcggcgggggtggggacggcgggtgaagggcggggggtgatccggtgggaccagatcctgccgcggcggtccctccgcgtgctgctcgtcgagcacgacgactccacccgccaggtcgtcaccgcgctcctccgcaagtgcggctaccgcgtggcggcggtggcggacgggatgaaggcgtggggggtgatgcgggagcgggcgtacgccttcgacctcgtgctcacggaggtcactatgcccacgctctccggcatcgagctgctctccaggatcgtcgcctccgacgagtgcaagaacatccccgtcataatgatgtcgtcccaagattctattggcacagtgctcaggtgcatgcagaagggtgcggtggatttccttgtgaaaccagtgagaaagaatgaattgcgtaacttatggcaacatgtatggaggcgacatgcaatgaatagccaaacaaatgcatcggaaaacaatgcggctagcaatcatttaagtgccaatggtggtaatgggtcaaagacaggagaacacagcgatgaggaaagtgatgctcagagttctggtagcaaaagggaggttgaaattcaaagtgctgaaaagttaccagaggttgttgcagatggtggggcaggctcatccagagaacataaaatacagaatggtttcattgatggaatgaacacaaaatcacatgcattaaagggtaatgatgatgctccaagtggaaacgcgtgtggtgatagtgaactacaagtgctttcaactgagaagaatgtgcgttccaaattccttaatggtattacttctgcgaaggttgctggacagataatggataatgccttgaggtttgctgattcaagttcacttcgttcaagtgatcctggaaaagatcttttggttgttgcccagaccacagctgacagaaaatgcaaatcttcagcactggaaaataatgctgtcatggaaaataaccttagtgaaaattcaaaggggactgcaacaggccatgctgaatcttgtccgtctcactttgtggagataaatttagaaaagcaacatcatctcaatggttatacaaaccacaagttgaatgagaaagatatctttaatcactcaaattcctctgccttttcgaggtatggtaataagaggatagaatcatcagctcaacggccatttcccccttccttccgcgtggttcaccaacaacctgtttacgacaagaatccccaatccagccgggtcttgctttcctgtgaacataatacacgcgagagtacagtgcaagctcaggtccctttggacagaagcacagagggtgctgcaatcctgtgttccagtagtgtaagagaagatgctggtacaagcagttcctctcctagaaaggacagtttaactcatccttcttatgggtttatacctgttccaattcctgttggtgctgctataccctaccactacggtgcaattatgcagccaatgtattatccacagggtgcttttatgcattgtgattcagctgccatcaacaagacagcaattcagcatgtctcttgtcaatctaactaccatgaaaatcttggtaaaccgccacagattgatgagcacaagcagccagaagaaaaccatcagttgcatcattcaagacaaattctccgagaatcaggagaaccagttgacttggcgaaggctcatatggagcgtattaaccagagtgctagctgtagccaggatattcgcaaaggaagtggatgcactgggagcggtgaaactgatgcaaatacaaatacggtaattgcactagaaagtggcaatgagagcggtgtccagaactgcagtaataatgtattggatggtgaccggtctcgccgtgaagctgccttgttgaaattccggatgaaaagaaaagatagatgtttcgagaaaaaggtcaggtatcatagcaggaagaagcttgcagaacaaagacccagggttaagggccagtttctaagcagcatcagcaatggtgggaggaggagcagtggtggggccggccgtgatgctggccgtgtccgtgatcgtcttgctgtcggcggcgtgctccggcgccggcgaggggccggacgcgagcctgctgtgcgtcagcgagtgcgggacgtgcccgacgatatgcacgtcgccgccgccgccgcctccgcccgcgccgccgtcgtcgttgtcgccgtcgacgccgtccgtgctgccgctgtactcggcgcctccgccgccgtacctgacgctgctgctcccgccgccatctccggcggacgagagcgacatgttcccgcctccggaggcgccgacgacgacgaacccgccgccatcaccgccgcctccaccgtcgtcaccaccgccgccgacgacgaagagcagcagcgggtcgacggcgtcgccgccgtcgtcctcgtcccacttctcatcgccgccgtctccgccgtcgtcgtccaacccgtactactacttctacctctccggcagcggcaggcgctgcggcggcggcggcgcggcgagcgtttacacggcgctgatcctagcggcgttgctgcccatcgccacattcctgacgtgacaacgcgcacgaattttagcgcacgatatgatcggaattaa

SEQ ID NO: 12741 - DNA, 2907 bp, Oryza sativa
  Clone ID: TFbOSC415438j.C1.o1.fg
atgggggacgaatacctggctgagcctgaggatgaggtggccatatcaatgtggcctgagaatataggggataaacaccagaagcagttcaaaatggaaaagcttgggaaggaccaagatgcacttgaggatgctaattttcaacagaagccttcttctgtggatttgaaccgccttatggaattggcgaattctgagaaaggcgtttctcaaatgcaatactttgtgaagcactgggaatataagagggcgaatactgctcggcttctaaaggaacaaattggtcttctttgccaacagaggaaagagattgaacaaaggaagcaacaaatactggaggaacaacaattccaggatgaaagttattatgctgttaagtggcaagtaccaatactagatgaagtttacaaagatgaatggaagcgtccgagcaaaaagaatgatgacctttctcataatcaagaacttaaaatagatgcagaatatgacagtatttcgtactggaaagagagagcgatgcaattagaaaagacacttgaggccagtcttcaaagggagcgttcattggaggaaaagttggaggaaaacataaagaatcttcagtcacataccccagttgaggaattctctggaatgttaaaacgggctgattacttcttgcacttggttcttcaaagtgctcctattgttattgctcatcaggatgctgacttgcggtaccggttcatatttaatcacttcccgacattggctgatgaggacgttattggtaagacagattatgagatattgtcaggtgagggtatagaagagatgaataatgtcaagaaggaggtcatggccagtggtaaggctactaagagagagtttgtatttaatacaccgttgtttggagcaaaaacctttgtgacatacattgagccagtattcagcaaatctggggaaacaattggtgtgaattatgttgcgatggacataacagatcaggttacacgaagagagaaaatggcggacataagggtgagagaggctgtccaaaaggccaaagagacagaacttagcaaatctcttcatataacagaggaaacaatgcgagcaaaacaaatgctggccaccatgtcacatgagatcaggtcccctctttcaggggttcttagcatggctgaaattcttgcaactaccaaattggataaagagcaatatcagttgctagaagttatgctgtcatctggagaccttgtattacaattaatcaacgacatccttgatctttccaaagtagagtcaggggctatgaaattagaagctacgacatttagaccaagggaagtagttaaacatgtactccaaactgcggcagcatctctgaagaaggaattgatccttgaagggtgcataggtgataatgttccattggaggtcactggtgatgtgctaaggattcggcaaattctgactaacctaatcagcaatgcagtgaagtttacacatgaagggaaggttgggataaatctacatgttctagacaagcagttaccaggatgtagaatagaaggtgggcaacttcattcaaaagctcattctgcaccagctgccgcagcagaacatttttctgcttctccaagaaaatgcgataatgatactttgggctgctccaatcatgaagatgcttgtcagactggcattccatcaaatgataactttggggagcatcatgagggagatgaagttgtttggcttcgctgtgatgtatatgatactggaataggaataccagagaaatccctgccgttgctattcaagaggtatatgcaagcaagtgatgatcatgcaagaaaatatggcggaacagggcttggccttgcgatatgcaagcagctggtggagttgatgggtggcactctaactgtggtcagcaaagagaatgaaggatcaacattttcatttgttctgccttgcaaaattcctgttaaggaggatcacagtgatgatccagatgatatgcccagttctggtggtgatttcactactagtgatatagaaggttctttcattttcaagccacaagcacggccttatcttttgacatccggagtttcagtaatgaacaacaccaagttgatcggtggcaaccaattctatgatcctccgaacatactagaagaccgtaagccgttctcaaatggtttcgtgttagcagaagatcattctacaaattctgcctctactgctcatcagtcaaatggtcctagtgttagcagaacaaacaaagaacaacatgataatgcaatggtcattgaactgaataggcaagctgaacgggtttccagttcacgaggtgacacgacatcagtttcagggctaattcatgatgaaaggggaccatgcagagttcatgaagaaaagtcacttcacaagaaatccaagtgttctccaagtagcaataaggcaaagatcctcctcgttgaagataacaaagtcaatataatggtggcaaaatcaatgctggagcagctcggccatggaatagatatcgtaaataacggactggaagcaattcgtgcaatacagaagcgccaatacgatattatcctgatggatgttcacatgccagaaatggatggtctacaagccacaaaatttatccgttcttttgagaatactggatgttgggacacttctgtaaagcccgaacacgatcagatcatagctggttcagataatttgtctgattgtgcacacatgaaaaagcaaggaaagcgggttcctataattgcgatgacggcaaattcattttcagagagcgccgaagagtgccttgctgcaggcatggactcctacatatctaaaccagtgaacttccaaaatattaaagaatgcctgcagcagtatttgcctccccagtga

SEQ ID NO: 12742 - DNA, 513 bp, Oryza sativa
  Clone ID: TFbOSC401250j.C1.o22.fg
atggcggcagcggcgcaggctccggcggcggcgaaggtggtggtggcgacgtcgccgagggcaggcggaggcggaggcggcggcggggacaggaaggtggtgccggttgtggtggcggcggcggccggcgacgaggcgcagagcgagatgcacgtgctggcggtggacgacagctccgtggaccgcgccgtcatcgccaagatcctccggagctccaagtacagggtgaccacggtggagtcggcgacgagggcgctcgagctcctctgcctcggcctcgtccccaacgtcaacatgatcatcaccgactactggatgcccggcatgaccggctacgagctcctcaagcgcgtcaaggaatcgtctcagctcaaggagatcccggtggtgatcatgtcgtcggagaacgtgccgaaccggatcagccggtgcctggaggagggcgccgaggacttcctgctcaagcccgtacgcccctccgacgtgtcgcggctctgcagccgtatcagatga

SEQ ID NO: 12743 - DNA, 513 bp, Oryza sativa
  Clone ID: TFbOSC900261j.C1.o15.fg
atggcggcagcggcgcaggctccggcggcggcgaaggtggtggtgtcgacgtcgccgagggcaggcggaggcggaggcggcggcggggacaggaaggtggtgccggttgtggtggcggcggcggccggcgacgaggcgcagagcgagatgcacgtgctggcggtggacgacagctccgtggaccgcgccgtcatcgccaagatcctccggagctccaagtacagggtgaccacggtggagtcggcgacgagggcgctcgagctcctctgcctcggcctcgtccccaacgtcaacatgatcatcaccgactactggatgcccggcatgaccggctacgagctcctcaagcgcgtcaaggaatcgtctcagctcaaggagatcccggtggtgatcatgtcgtcggagaacgtgccgaaccggatcagccggtgcctggaggagggcgccgaggacttcctgctcaagcccgtacgcccctctgacgtgtcgcggctctgcagccgtatcagatga

SEQ ID NO: 12744 - DNA, 1485 bp, Oryza sativa
  Clone ID: TFbOSC415117j.C1.o1.fg
atggtgggcgccggcgagggggatcgcgttggcggcggggcggcggtagggggagggcagcagttcgtggaccggagcaaggtgaggattctgctctgcgacagcgacccaagtagctcacgggaggtgctccgcctcctctgcaactgctcataccaagtgacttgcgccaagtctccgaggcaggtgatcaacgtactcaactgcgaggcgggggagatcgacatcatcttggccgaggtcgatctgcccgtctccaagtgcttcaagatgctcaaatacatcgccaggaacaaggaattgcgccacatccccatcataatgatgtccaacagagacgaggtctctgttgttgtcaagtgcttgcgtctcggggcagccgagtacctggtcaagccactgcgcatgaacgagctgctgaacctctggacccatgtgtggcggcgaaggcggatgcttggtttgtcggagaaaaacttcttcaatgacaatttcgagttggcgttatcggaacctagtgacgccaataccaacagcaccactcttctctcggatgacacagatgataagccaaaagaaaacattaatcaagaaacaagcacctcgaatcaacatgaatatgagtctaatccttctgatgctgagcctaaacaaaaaggcacaccagagggtttactagtctctactgaaggcggcgaccaagcttcttatgttaagtcaagcaccccaactaccagctcatttgacagcgaactacaaaaaggtggaaatcggttagactcttcggatcacaggggtaatttctctagtacaactgacagaagtgacactggcactgatgtaaatattcgggataaagaagcctttgagatgccagtgcaataccctgtggtatgcttttcttcctctaacttgcatctggagcgaagcaatgaaggccaaaatgatgcttcaggaactcctcctgtatatcattttcccttttattacccagggatgatggaccacggtatgacacatcctccggtgcaaaatttccaagggaacataaacaacgctcaagtgcatacaccacaaacgttgctccctcagtataatgtttatccccaatgtcatggtgtatctatgatgccaccatttcagtataatcctgctggtatgagcattcaatcaaatcaactgccaacacaaaatatgtggccacaggcatcaagcacaccaatgcccgaggaaacatgtagtcggtctgaacggagagctgcagcacttgccaaattcaggctgaaaaggaaggaacgttgttttgacaagaaggtgaggtacgtgaataggaagaaacttgctgaaacaaggccgagggtgcgagggcaatttgttagacaggcaaactatacagatataaccagcactggagatgatatctcagaagatgaagatgatgatccatcctccagggaggtagagatggtttcttctccagagtag

SEQ ID NO: 12745 - DNA, 2328 bp, Oryza sativa
  Clone ID: TFbOSC101556j.C1.o19.fg
atggcatcaattggatggcatctttccctggaacccaatatcgatagcttcactgttgcagacaacaaactggttctgctcaactttgagcagcagcagctagtccactggatgatgcctccaagattcagatgccaagattacctcctgccgctgctgctcgccctttcgccggccgccgccgccgcccgcgaggtggagtaccaccattgccactgcgacggcggcggcggcggcggcggcggggggttgtggagcatggacagcatcttcaggtggcagaaggtgagcgacctgctgatcgcggcggcctacttctccatcccgctggagatcctctacttcgtcgccgggctccggcatctcctcccgttccggtgggtgctcgtccagttcggcgccttcatcgtgctgtgcggcctcacccacctcctcaccgccttcacctacgagccgcacccgttcatggtggtgctcctcctcaccacggccaagttcttgacggcgctcgtctccttcctcaccgccatcacgctgctcaccctcatcccgcagctgctccgggtcaaggtgagggagagcttgctgtggctcaaggccagggagctcgaccgcgaggtcgtcctcatgaagcggcaggaggaggcgagctggcatgtccggatgctcacccacgagatccgcaagtcgctcgaccgccacaccgtgctctacaccaccctcatcgagctctccagggtgctcggcctcaccaactgcgccgtctggatgcccgccgccggcgagatgtgcttgacgcacgagctccggcgagacggcggcggcgaggatggcgtcgtcggcgtcgacgacgcggacgtcgtcgaggtgcgggggagcgacggcgtcaagctgctcgggccggactcggtgctcgccgcggcgagcggcggcaaggaggagggcaccggcgcggtggcggcgatccggatgccgatgctgaaggtgtccgacttcaagggcggcacgccggaggtgatccagacgagctacgccgtgctggtgctggtgccccccgccggcaagagctgggggcggcacgagatggagatcgtcgaggtggtcgccggccagaaccgcgagctgctgcaggcgcggcgcgacgcgctcatggcgaacgaggcgaggcaggcgttccagggcgtgatgagccaggggatgcgccgcccgatccactccatcctcggcctcgtgtccatggtgcaggaggaggccctggcgccggagcagaggctcgtcgtcgacaccatggcgcgcaccgccaccgtcgtctccacgctcgtcaacgacgtcatggagatgtcggccgacagccgcgagcgcttcccgctcgagacgcggccgttccacctgcacgccatgatcagggacgccgcctgcgtcgcccggtgcctctgcgacttcagggggttcggcttcgccgtgcacgtcgagaacgcgctgccggacctcgtcgtcggcgacgagcggaggattttccatgtcctgctccacatggtcggcaacctgattggccgcaccgagcccgggcatgtcacgctccgggtgcgcgccgccgacgacgacgtgctggacgacaggctcggccagaggtgggatccatggtggccgtcctactccactggctactcctcggtgaagtttgtcattggtgtcaagcggcagcagaacggcgatgccggctcgccgctgtcgcggaggccgagtgggaagggcattgatctcagacttagcttcagcatgtgcagaaagcttgtgcagatgatgcaagggaacatctgggcgattcttgatccccaagggctaccggagagcatgactctggtgctcaggtttcagctgcaatcgccactgacatcatcaagccttggaggatcattcgagcagaagcactcgtcgccgtcgtgccagattgcaggcctgaaggttctgcttatcgacgacgatgacgacatcaaccttgtggttgctcggaagctattggagaagctcggctgcgtggtctcctcgccgccttcaggatcaggatttctcagctctgttggctcctcagcagcagccttccagcttgtcatggtgaacctcgaaatgaagagagtaaaagcccttgatgtcgcgacgaggatcagccagtacaggagcggccgatggccaatcgtcatggccatggcttccgaccagaaggcctgggagaagtgcgctcaatccgggatcaatggcatcctcaagaagccggtgattctgcaggagttgaaagacgagctggcgcgaattcttcagagcacatga

SEQ ID NO: 12746 - DNA, 2400 bp, Oryza sativa
  Clone ID: TFbOSC101556j.C1.o3.fg
atggcatcaattggatggcatctttccctggaacccaatatcgatagcttcactgttgcagacaacaaactggttctgctcaactttgagcagcagcagctagtccactggatgatgcctccaagattcagatgccaagattacctcctgccgctgctgctcgccctttcgccggccgccgccgccgcccgcgaggtggagtaccaccattgccactgcgacggcggcggcggcggcggcggcggggggttgtggagcatggacagcatcttcaggtggcagaaggtgagcgacctgctgatcgcggcggcctacttctccatcccgctggagatcctctacttcgtcgccgggctccggcatctcctcccgttccggtgggtgctcgtccagttcggcgccttcatcgtgctgtgcggcctcacccacctcctcaccgccttcacctacgagccgcacccgttcatggtggtgctcctcctcaccacggccaagttcttgacggcgctcgtctccttcctcaccgccatcacgctgctcaccctcatcccgcagctgctccgggtcaaggtgagggagagcttgctgtggctcaaggccagggagctcgaccgcgaggtcgtcctcatgaagcggcaggaggaggcgagctggcatgtccggatgctcacccacgagatccgcaagtcgctcgaccgccacaccgtgctctacaccaccctcatcgagctctccagggtgctcggcctcaccaactgcgccgtctggatgcccgccgccggcgagatgtgcttgacgcacgagctccggcgagacggcggcggcgaggatggcgtcgtcggcgtcgacgacgcggacgtcgtcgaggtgcgggggagcgacggcgtcaagctgctcgggccggactcggtgctcgccgcggcgagcggcggcaaggaggagggcaccggcgcggtggcggcgatccggatgccgatgctgaaggtgtccgacttcaagggcggcacgccggaggtgatccagacgagctacgccgtgctggtgctggtgccccccgccggcaagagctgggggcggcacgagatggagatcgtcgaggtggtcgccggccaggtcgccgtcgcgctgtcgcacgcgacgctgctggaggagtcccgggcgatgcgggaccggctggcggagcagaaccgcgagctgctgcaggcgcggcgcgacgcgctcatggcgaacgaggcgaggcaggcgttccagggcgtgatgagccaggggatgcgccgcccgatccactccatcctcggcctcgtgtccatggtgcaggaggaggccctggcgccggagcagaggctcgtcgtcgacaccatggcgcgcaccgccaccgtcgtctccacgctcgtcaacgacgtcatggagatgtcggccgacagccgcgagcgcttcccgctcgagacgcggccgttccacctgcacgccatgatcagggacgccgcctgcgtcgcccggtgcctctgcgacttcagggggttcggcttcgccgtgcacgtcgagaacgcgctgccggacctcgtcgtcggcgacgagcggaggattttccatgtcctgctccacatggtcggcaacctgattggccgcaccgagcccgggcatgtcacgctccgggtgcgcgccgccgacgacgacgtgctggacgacaggctcggccagaggtgggatccatggtggccgtcctactccactggctactcctcggtgaagtttgtcattggtgtcaagcggcagcagaacggcgatgccggctcgccgctgtcgcggaggccgagtgggaagggcattgatctcagacttagcttcagcatgtgcagaaagcttgtgcagatgatgcaagggaacatctgggcgattcttgatccccaagggctaccggagagcatgactctggtgctcaggtttcagctgcaatcgccactgacatcatcaagccttggaggatcattcgagcagaagcactcgtcgccgtcgtgccagattgcaggcctgaaggttctgcttatcgacgacgatgacgacatcaaccttgtggttgctcggaagctattggagaagctcggctgcgtggtctcctcgccgccttcaggatcaggatttctcagctctgttggctcctcagcagcagccttccagcttgtcatggtgaacctcgaaatgaagagagtaaaagcccttgatgtcgcgacgaggatcagccagtacaggagcggccgatggccaatcgtcatggccatggcttccgaccagaaggcctgggagaagtgcgctcaatccgggatcaatggcatcctcaagaagccggtgattctgcaggagttgaaagacgagctggcgcgaattcttcagagcacatga

SEQ ID NO: 12747 - DNA, 699 bp, Oryza sativa
  Clone ID: TFbOSC400376j.C1.o28.fg
atgacggtggttgatgcggagtcgcggttccatgtcctcgcggtggatgatagcctgatcgacaggaagctcatcgagatgctgctcaagaactcgtcctaccaagtgaccactgtggattctgggagcaaggccttggagctgcttggattgagggatgagggtgatgactcctcctcttcaccttcttcctcctcacctgaccatcaggagattgatgtcaacctgataatcactgactactgcatgcctggcatgacagggtatgatctgctcaagagggtgaagggatcatcttcattgaaggacataccagttgtgatcatgtcttctgagaatgtgcctgcaaggatcaacaggtgcttggaagatggtgcagaggagttcttcctgaaacctgtcaagctcgctgacatgaagaagctcaagtctcacctgctcaaaaggaaacagcagctgcccatggctgctgctgcaccagataagccgccacacaaaccagatgaagctgcagcctcagcagctgcaattgctgaagctgcaacagctcaaaccgatggaatcatcagtgattgcagctgcagcggcagcagcaagaggaaggcggctgcaatggagcaggaggtcatctcctcacctgatcagaggacgaagccaagattgtcctccactagcagcggccttgcagtggagacctga

SEQ ID NO: 12748 - DNA, 2292 bp, Oryza sativa
  Clone ID: TFbOSC404904j.C1.o5.fg
atgccaccgatcccatctctgtggatccgcgtcttcttctcctggctgctgctgtcgctgcccgccgcggctgccgccgatttcagccactgcggcggctgcgacgacggcgacggcggcggcggcatatggagcacggacaacatcctgcaatgccagagggtgagcgacttcctcatcgccatggcctacttctccatcccgctcgagctgctctacttcgccacctgctccgacctcttcccgctcaagtggatcgtcctgcagttcggcgccttcatcgtgctctgcggcctcacccacctcatcaccatgttcacctacgagccgcactcgttccacgtcgtgctcgcgctcaccgtcgccaagttcctgaccgccctggtgtcgttcgccaccgcgatcacgctgctcacgctcataccgcagctgctcagggtcaaggtcagggagaacttcctcaggatcaaggcgcgggagctggaccgggaggtggggatgatgaagaggcaagaggaagcgagttggcacgtgcggatgctcacgcacgagatccgcaagtcgctcgatcgccacacgatcctgtacaccaccatggttgagctctccaagacgctcgagctgcagaactgcgccgtctggatgcctagcgagagcgggagcgagatgatcctgacacatcagctgaggcagatggagacggaggactcgaatagcctgtccattgcgatggacaacccggatgtacttgaaataaaggcaacaaaggatgcaaaagttctcgcggcagactcagcgcttgggattgcaagcagaggcaagcttgaagcaggtcctgttgctgcaatacggatgccgatgttgaaggcgtcgaatttcaaaggagggactccagaagtgatggaaacaagctatgctattttggtcttggtactacccgaggatggttcactaggatggggtgaagaggagttggagattgttgaagtggttgctgatcaagtcgcagtcgccctatcacatgctgcagttctggaggaatctcaattgatgcgagagaagctcgccgcgcaacacagggacttgctgagagcaaagcatgaaaccacgatggccactgaagctaggaactcctttcagactgccatgtatgatggaatgcgacggccaatgcactcgatccttggtctagtctcaatgatgcagcaagaaaatatgaaccctgagcaaaggcttgtaatggatgccattgtcaagacaagtagcgttgcgtcaacattgatgaatgatgtcatgcaaacatcaaccgtaaatcgtgagtatttgtctttggtgaggagggcattcaaccttcattcgttggttaaggaggcaatcagtgttgtaagatgcctaactggctgcaaggggattgattttgagtttgaagtggataattctttgcccgaaagggtcgtcggtgatgagaagagggttttccacatcgtcctgcacatggtaggtactctaatacagaggtgtaatgcaggctgtctatccttgtatgtgaatacttacaatgagaaggaagagaggcacaatcaggattggatgctgcgaagagcaaacttctctggcagctatgtgtgtgttaagtttgagattaggattagagagtccagaggtaatcttttgagttcgtcatccagtcggagacttcaagggcccaactctaccagttctgagatggggcttagcttcaacatgtgcaagaaaattgtgcagatgatgaatggtaatatttggtcagtctctgattcaaaaggccttggagaaactatcatgcttgcccttcagttccagctgcagcatgtgactccggtctctggagcatcctcggacttgttccgatcagcgccaattcccaattttaatggactccaagtcattcttgtggacagtgatgacaccaatcgggccgtaactcacaagctcctggagaagcttggttgcctagtcctctcggttacttccggcatccaatgcatcaactcctttgccagtgctgagtcatctttccagctggtggttcttgacctcaccatgcgtacaatggatggatttgatgtagctcttgcaatcaggaagttcagggggaattgttggccaccgttgatagttgctcttgcggcaagcaccgatgacaccgttcgggatcggtgccagcaggcaggaataaacggtctgatccaaaaaccagtcactttagcagcactgggagatgaactgtatagagtccttcaaaacaattga

SEQ ID NO: 12749 - DNA, 558 bp, Oryza sativa
  Clone ID: TFbOSC400678j.C1.o9.fg
atggcggtgaagtattttggtcatagaactccagtaatagttgtcacgaagtcccacatgtacgaaagaggacaaatccatcaatcattatacattgtatggtatatcaaaattatcaaatacacggtcactagtgatactgtccattttcctcaacaacaattcaaagtaactctacaccaaaagtttgcaatgtcgtccccccatgtgcttgttgtggatgatacccatgttgatcgccatgttgtttccatggccttaatgcgccataatgtccgagtgactgcagtagaaagtgtcatgcaagcattgatgtttttggactcggaacatgatgtggacatgattgttagtgactactgtatgccagacatgaccggctataacctactcatggaagtgaagaaatcacctaaactggcacatctcccggttgtaattgcttcctctgataacatcccagaaaggatcagaaagtgcttggatggaggagcaaaggattatattctgaagccagtcaagattgttgatgtgcctcgtattatgaaatacatatga

SEQ ID NO: 12750 - DNA, 708 bp, Oryza sativa
  Clone ID: TFbOSC402928j.C1.o7.gm
atgttcacgacaaaagagcgcggcagttgcaaggaaagcgaaaggcgcaagcgcaagtgggggaggaatcgggagcgtatccgcggcacaggaaaacgccactttcgtgtggctatagaggctccgttccatgtcctggctgtggatgatagccttcctgacaggaagctcatcgagaggctactcaagacctcttctttccaagttaccactgttgattccgggagcaaggctctggagttcttggggctccatgatcatgaggacagcccaatttctactcaatcagatcagcaggaggttgcagtgaacctgatcatcacagactactgcatgcctggcatgacaggatatgatcttctcaagaagatcaaggaatcgtcttatttaagggacatcccagttgtgatcatgtcatcggataacattccttcaaggatcaatagatgcctggaggaaggagctgatgaatttttcctcaaaccagttcggctctccgacatgagcaagctgaagccccacatactgaaaagcagatgcaaggagcactaccagcaggaacaaaacctgcaaagcaacagcgaaagcaacaacagcagtaaccccacaagcgagaacagcagcagcagcactagcagcaacagccacaagagaaaggcagtcgatgaagaaattttgccccacacaataagaccaaggcatagttga

SEQ ID NO: 12751 - DNA, 1323 bp, Oryza sativa
  Clone ID: TFbOSC400888j.C1.o1.fg
atggaagctctggatgacacttctcctgaaaacatagaagttacagcgaattccaaaaatacgatgccatataatactctaagtgggcttgaagtagcaaataatcggaaaaccttggagagtttcaggatgttcaaagattcgtcagatgcaatagattcagtgaacttactagtaactgtcgaagacactggcataggaataactaaggatgctcaaactcgcatttttacacctttcatgcaagcggatggttccacctcaaggacatatggtggaactggaattggtttgagtattacgaaacgcctggttgaattgatgggtggagaaatagggtttgtgagtaaaccaggagttagtagtacattttcttttactgctattttcaaggaaaataggaaagatccaggggatatcaaaaggtattgtcctgaacctactccaccagattttcaaggaatgagagcgcttgttgttgacggaagatgtgctcgtgctgaggttaccatgtaccatctgcggagacttggaatacaatgtgatcttgcagccacatctgaatcagcactttctgctctattggaatcctgcaattcaagtgtaaaaagcagtctaaatatggtgcttgttgacaaagaagcttggggcgaggactcaggcttggcatttttccggtgtcttatagatcttcggctgaagggcacactcaagtcttggcaaaccatgccaaagttctttcttttggcaggttcaataactcctgctgactctgattgtttgaggttggcggggtattctaatagcataagaaaaccccttcgtcttagtactgttgctgcttgtcttagtaaagcactaggggttggacttacaggccgacgaagtagagataattctttggttcttcgaagtgtactaacaggaaaaaacattttagttgtggacgacaatgctgttaatcgcatagttgcagctggtgctttgaagaaatatggagctatagttacctgtgtggacagtggaaaggaggcaatttctaggctccagccacctcataaatttgatgcttgttttatggatgttcagatgcctgagatggatgggtttgaagctactagattagttcgttctgtagaaagtaaaatcaatgatacgatccaggcagcatctgctaaaaacccatttggagataacaatattgcaaagcagaagagctatgcagtaaatcgagaacagaagtttgattggactgctatttatgtttcatttgacaattggatgaaatctatttcaacatcacgccttcagccatgtgcttaa

SEQ ID NO: 12752 - DNA, 3072 bp, Oryza sativa
  Clone ID: TFbOSC401583j.C1.o6.fg
atggatgagatgagctgcggcggcggaggtggtggagcgaggtggaagagggcgcgggtggcggggatgggcgaggggaaggcgggaggaggtggtggcgcggcgttcttggggctggagagggtggggatggtggtgcggatgctgccggtgccggagaaggtgtcggcgagggcgcgggtggtgagggggagcctggtggcgcacttccgggggtggagggtggtgcgggagacgtggtggtgggtgctgctgctgtggatcctcgccggctccctcggctccttctacctcttcctcttcatgaacgcccagtccctcgacaagcgccgcgactccctcgccagcatgtgcgacgagcgcgcccgcatgctccaggaccagttcaacgtcagcatgaaccacctccaggccctcgccatcctcgtctccaccttccaccactccaagaccccctccgccatcgaccagatgacgttcgcgaggtacgcggagaggacggcgttcgagcggccgctgacgagcggggtggcgtacgcggtgcgggtgacgcacggcgagcgggagcagttcgagcggcagcaagggtgggcgatcaagaagatgtactcctcctccaacaagaagcagtcgtcgccggggcccgggcccggcgacgccgccgtcgcggagatccgggagcccgccgaggagtacgccccggtcatcttcgcccaggacgcctacaagcacgtcatctccttcgacatgctctccgggaatgaggatcgggataacatattacgggctaggaaatctggcaagggtgtcctgactgctcctttcaagctactgaataatcgcctcggagtgatcttgacgtacactgtttataagtatgagctccctgcatatgccaggccacatgaacgcatccaagccgcgattggctatttgggcggcatatttgacatacaagcactcgtcgagaagttgctcaaacaactcgcgagccaggaatccatcatggtgaatgtgtatgatacgaccaacgagagcccgatcagtatgtacggtgatgatactgggagtggcatgtgccatgtcagcgtgctcaactttggtgatccgtcgagaaagcatgagatgcattgcaggtttgaaaaaaagccaccatggccatggctggcaataacgtcatcgtttggaactcttgtgattgctttactgactggtcacatatttcaagctactgtccatcggattgctaaagttgaagatgatttccacaagatgagcgaactcaagaagcgtgcagaagatgcagacgtcgcaaagtcacagttcttggctactgtttcacatgagatcagaactccaatgaatggtgttctagggatgctccaaatgctcatggatactgatttggacacgacgcagcaggactatgttagaactgcccaagctagtggaaaagctttggtctctctcatcaatgaggttcttgatcaggcaaagattgagtctggtaaacttgagctcgagacggtgccctttgatcttagaacagtttgtgacgacattttatctctgttttgtgggaaagctcaggagaaaggactggagttagcagtgtatgtctcggatcaagttccacagatacttattggcgatcctggcaggataagacaaatcattacgaatcttgtcgggaactccataaagttcacagagagagggcatatatacctgacagttcatgtagttgaagaggtcatgagttgtttggaggtagagacaggaattcagaacacaaacactttaagtggctatccagtagccaacagaagatgtagctgggagagcattcggcttttcaacagagaattacactcatctgagaagtcttttgcgcccatcgcatctgattcaataagcttggttatatctgttgaagatactggcgtcggcatcccatttgaagcccaatcccgtgtgttcacccctttcatgcaggtaggtccatccattgcccgcatccatgggggcactggcattggattaagcatcagcaagtgcttggttggtctcatgaagggagaaatcggttttgcaagtaagccccatgttggttctactttcaccttcaccgcggtgcttatgagggcacactgcaaaggaaatgacatcaaatcatcagaatttaaagggatcaatgcattggttgttgatcataggccagtccgtgcaaaggttaccaagtatcacttgcaaagacttggagttaagaccgaactgacagctgagctaaatcagttcatttctaaattaaactctggatcactgactgcaaagctagtgctaatagacaaggaaacctggcttaaggaatcccattgcacgcctcttctggttaacaaattgaggaataatgacaagccagactctcctaagttatttcttttggggagctctgcaagttctcccaagggcggttcagatacatccagggaacataacttgaatgtaataatgaagccgcttcgtgcaagcatgcttcaggtctcactacgacgagcactaggtggggtcgataaggtgcactgcaggaatggagtagttggcaattcaacattgggcagccttcttcacaagaagcaaatcattgttgtcgacgacaatatcgttaacctgaaggtggctgctggtgctcttaagaagtatggtgccgaagttacttgtgcagacagcgggaaaaaagcaatcacattgctaaaacccccgcacaattttgatgcttgtttcatggacatacagatgccagaaatggatgggtttgaagccactagaaggattagagtgatggaaagagatctaaatgagcgaatagaacgcggagaggcgccaccagaatgtgctagtattcagaggtggcgaactcctatattggcgatgacggcagatgttatacaggcaacacacgaggagtgcctgaaaagcgaaatggatggctatgtctccaagccatttgaaggggagcagctgtacagcgaagtagcgcggtttttccaaaatcatgaccaagttgaatag

SEQ ID NO: 12753 - DNA, 408 bp, Oryza sativa
  Clone ID: TFbOSC407447j.C1.o3.fg
atgatcgagatcattgatttgagccaatacattggccctgagctagacaagaagaaggccaaacttgagaaggccaagtccaagcttcttgagctggagaagaaggccgacatagaggagaacactagggtgactgcagtagaaagtgtcatgcaagcattagtatttttggactcggaacatgatgtgaacatgattgttagtgactattgtatgccagagatgaccggctatgacttactcatggaagtgaagaaatcacctagactggtacatctcccggtgataattgcttcctctgataacatcccagaaaggatcagaaagtgcttcgatggaggagcaaaggattatattctgaagccagtcaagattgctgatgtgcctcgtattctgaactacatatga

SEQ ID NO: 12754 - DNA, 396 bp, Oryza sativa
  Clone ID: TFbOSC401978j.C1.o21.fg
atgtcgacgaagacagtgccggagccggagccgcacgtcctcgccgtggacgacagcatcgtcgaccgtactgtcatctccagactcctgcgcagctccaaatatcgagttacgacggtggatagtggcaagagagcactggaggttctcagcctggatcggaatgtgcatatgatcatcacggattactgcatgccggagatgacagggttcgatctcctcaagagggtcaaggagtcggcggagctgaaggagattccggtggtgctaatgtcgtcggagaattcgccgacgagaatccggcggtgcctggaggagggggctgaagactttttgatcaaaccggttcgcccgtctgatgtgtcgcgcctttgcaaccgcgtcatcatgaaatga

SEQ ID NO: 12755 - DNA, 2334 bp, Oryza sativa
  Clone ID: TFbOSC401835j.C1.o36.fg
atggcgatggtgacggcgcggcagttcttggcgtcggcggcggagctggggagcgggcggcggcgctgcggcggcggcggcgcgtgcgacatgcgggaggacggcggggtggaggcgctgatgcagtgccagcgcgtgagcgacctgctcatcgcggcgtccttcctctccatcccgctcgagctcttctacttcgccacctgcgccgacctgtccgaggtcaagtgcgccgtgctccacttctgcgccttcatcgtcctctgcggcgccacccacctcctcgccgcgttcacgcacgcccacccgcactccgccccgctgctcagggcgctcaccgccgccaaggtgctcgccgccgtcgcgtcgtcggcggcagcggtctcgctcctcaccttcatccccaagctgctccgcatcaaggtcagggagtcgctgctccgcgacaaggccagccgcctccaccgcgacctcggcctcgtccgccgccgcgaggaggccacctcccgcgccgtgcgggagctcacgggccggatccgcgcctccccgcccgacgcgcacgccatcctccgcaccactgcgctccagctcgccgacgccctcggcctccacgcctgcgccgtctggatgcccgccgccggccggccccacgacctcgtcctggtgcatcacctcacctcccggcccgacgacgcggccgacttgctgctggaggttggtgacgcgtgcaccgtcgccgccgatgaccccgacgtggtcgacgtaatggcgagcaaggtcgccaaggtgctcgggccggactcggcgctcgccatggcgagcagcgtcggcgcggcgccggcgggggcggtggccgccattcggatccccatcctcagggtgtccatctacgacggaggagggacgccggaggtgaccgaggcgagctacgccatcctggtgctgcttcttcccccccacgacgccgccggcgggtggagcagccacgacctggagatcgtccaggtcgtcgccgaccaggccgccgtcgcgctctcccacgccgcggtgctggaggagtcgcggtcgatgcgggacaggttcgccgagcagcacagagcgctgatgcaggccaagcaccgggccgccatggcgaccagggcgttcagctccatccagagcgccatgtgccacgccatgcgaaggcccgtgcactccgtagtcgggctggtctcaatgctgcaacatccggaggcagacacaatgcggccggagcagaggctcgccgtcgacgccattgcccgaacaagcaacctcttgtcggcgctcatggacgaggtgaccgtgaaccggcagcatttgtccgtgcagaggaaacccttcagcctgcacgcgctgatcaaggaggccatcagcgtcgccggctgcctgtctcattgcgggggagctgggttcctgcaccagccggaatgcgcgctgcccgaatgggtcgtcggcgacgagaggagggtcttccacctgctgcttgacatggtgggcaccctgctgaaccgatgcaacaccgggtccggggcgtgccgcctctcgttctcggtcaggatctgcaatgtgggtgaagagaggtatagccttgactggatcccgatgcgaccgaccttctccggttgcaacgtttgcgtcaagttcaaggtcgggatcgggagatctaggagttgtgctattgagaggagtttgccgtgcgaattgcctcgtcgttctgcggccactaccagctctcagatggggcatatcttcagcggctacttcaacaagattgtgcagatgatgaatggtaacatgtggtcggcgtcggactccgagggcgtcggagagagcgtcaccctgatcctgcagttcaagctgcagcagggacatgtcgaagcatccccgccgtacatccctcacttgaacggcctgagggtgctcctcgccgacgacgacgccatgaaccggggggtgaccaagaagatcctggagaggcttgggtgccaggtcatgtcggcgccgtcgggcgcccactgcctgagcctcctggcgagcgccgaggcctccttccagctcgtcgtcctcgacctcgacgatcgcgccgtgccctcggcggccatggaccggtttgaggtggccctcaggatcagggagctcaggaacagctgctggctgctgatcgtcattgccgtcgcggctggcgtcgtcgccaccgatgatggcggcgccgtgcaggagctgtgccagcgtgccgggatcaacgggctggtccagaaaccggtcacgctgccggcactgggagctcagctctgccgagtgctccaggacaactga

SEQ ID NO: 12756 - DNA, 744 bp, Oryza sativa
  Clone ID: TFbOSC900071j.C1.o16.hg
atgtcaaaaccatcgctgccctggaaagcgacgcggcgatcgaacgcgatatcatatcgaatcatctccacttctcgatcttattcagttggccgtgccaggcgtcaccggatccacgccttcagatttgggaaagttgctggctgcatcgccaagatttggctggggaaagttggtagcgaccgagaaatcgtccgatcaggaggatttcttggttggtgtggcaaccccatccgatccgaggatttgaagcctgattatattctaatcttcaacaaatctgatgcagcaaactggcagcctcttccttctgttcttccagagaagagaaacatatctgtgcaagctttgccttcttccatggcagtggctatagaggctccgttccatgtcctggctgtggatgatagccttcctgacaggaagctcatcgagaggctactcaagacctcttctttccaagtaaccactgttgattcggggagcaaggctctggagttcttggggctccatgatcatgaggacagcccaatttctactcaatcagatcagcaggaggttggagtgaacctgatcatcacagactactgcatgcctggcatgacaggatatgatcttctcaagaagatcaaggaatcgtcttatttaagggacatcccagttgtgatcatgtcatcggataacattccttcaaggatcaatagtataattaaggaacaagccccacagctcacgtcgtcttaa

SEQ ID NO: 12757 - DNA, 702 bp, Oryza sativa
  Clone ID: TFbOSC900087j.C1.o6.fg
atggcgtatgagaactatgcaaatacaactgttagtgtgaatttgaatctgcagtacagatttcacaatctggctgagtttgacgatgggaaaaaaagttgccggaaacggctggatggtcataacaggcgtcgaagaaagccacagcatgatgcattgaaccctaggagtttccttccgtatcatcaagcgaatcagttttcagtctacccgcaaacatttccgatagctgatcagaacgccgacgccttaatgcgtccgcttgatcgtcaccctcccttctccatctcattctcagggaccttccgggaaccgaagcagttcccctttatgcaagatggcgggagcggcctcggcgcagcgcgccacgatctcctgcggcccttctcttccccagaagatggagccaacattaccacaacccgcagcgcatgcaacggcgtcccccacgggctggacccggagtgtgctctctctcttctgtcatcgtcgctgcatccctcccccgctgccggcatctccagcgcaacagctccaccgcagttcgccccctcttctttcagcagaatcgccgcctcgtcgcaagccgtaaccaccgcattcgcatcagatggaggatcagttgccggtgaccatgtcttggttcctgctgtcacatatgaagatccttcccaagcaatgccattctcttggcaggtgtag

SEQ ID NO: 12758 - DNA, 112 bp, Oryza sativa
  Clone ID: TFbOSC400461j.C1.o1.gm
ccggtgccgcgactaccaccgccgccacaaggtctgcgaggcccaccccaagacgccggtggtcgtcgtcgccggccaggagcagcgcttctgccagcaatgcagccggtaa

SEQ ID NO: 12759 - DNA, 1203 bp, Oryza sativa
  Clone ID: TFbOSC33170j.C1.o3.fg
atggcgaccggcggcagcggcggcggcggcggaggtggaggtggtggtgacgatgtccacgggctcaagttcggcaagaagatctacttcgagcaggacgcggcggcgtcggcgtcggcggcggcggtggagtcgtcgtcgacgtcgtcgggcggaggcggcaagaaggggaagggcgtggcggcggcggcggctcccccgccgccgctgccgccgaggtgccaggtggagggttgcggcgtggatctgagcggcgtcaagccgtactactgccgccacaaggtgtgctacatgcacgccaaggagcccatcgtcgtcgtcgccggcctcgagcagcgcttctgccaacagtgcagcaggtgctctgtccacatggttaggttccaccaattacctgaatttgatcaagaaaaaaaaagctgccgcagacgccttgcaggtcacaatgaacgccggaggaagccgacacctggacctctttcttctcgctatggccggcttgctgcatcctttcatgaagagccaggcaggtccagaagctttgtggtagatttctcatacccaagggttccaagcagtgtgagggatgcgtggcctgctattcagcccagcgatcgcatgtccggttcaatccagtggcaagggggccatgaactccatcctcaccgcagcgcagttgcgggatacagtgatcaccatgcgttcagcagccatggtggctcagcggctggggcaccaatgctccaccacccagcctttgagctcacctcaggtggatgtctcgcgggagtcgccaccgactccagctgtgctctctctcttctgtcaactcagccatgggatactacccaaagcaccagcagccacaaccggtccccgccaatgtcgtcaacggccagcgccttcggaggcggcaacaacccggtgtcgccctcggtcatggcaagcaactacatggcggcgagccccggctggaacagctccagccggggccatgacggcgccaggaacgtgcacctgccgccaccgcacggggttgtgctgaacgaggtccctccgggctctgtccaccacggccatttctccggcgagctcgagctcgcactgcagggaggtgccccgtccaaccggccggaagccgagcatggctccggcagcggcgccttcagccactccaccaatgccatgaactggtctctgtag

SEQ ID NO: 12760 - DNA, 1419 bp, Oryza sativa
  Clone ID: TFbOSC33084j.C1.o13.fg
atggattgggatctcaagatgcctgtttcttgggacctggccgagctggagcacaacgccgtgccgaacatggcggcggcggcgagcgcggcggagccgggcattgccgcggtggcggcgtcgcgcggggcgccgggccggccggagtgctctgtcgacctcaagctcggcgggctcggcgagttcggcgccgcggacgcgctcaaggagcccgccgccgcggcgaaggcgccggtgtcgagcgccgccgccgccgcctcggtggcgaaggtgccgccgtccacgagcacgctgaagcggccgcgcggcgggggcggcggcggcggcgggcagtgcccgtcgtgcgccgtggacggctgcaaggccgacctgagcaagcaccgcgactaccaccggcggcacaaggtgtgcgagccgcactccaagactcccgtcgtcgtcgtctccggccgcgagatgcgcttctgccagcagtgcagcaggtttcacttgcttggggagtttgatgaggctaagcgtagttgtagaaaacgcttggatgggcacaatcgacgccgcaggaagccacaggcagatagcatgagttctggcagctttatgacaagtcaacaagggacaaggttcgcgtccttcactcctccaagaccagagccaagctggcctgggatcatcaaatccgaggagaccccatattacagccatcatcaccaccctcatccggtgatgaccagccggcagccgcatttcgtcggctcgccgtcgtcggcgacgacggcggcgttctcccccaaggaaggccggcggttcccgttcctccatgagggcgatcagataagcttcggcggcggcggtggcgcggcggcggcggcgacgctggagatctcggtgtgccagaccaccgtcgtcgcgccgccgccaccggagagcagcagcagcaacaagatgttctcctccgacgggctgacgacggcgacgacgacgacgaccaccgcccaccaccaccaccaccaccaccaagtgctcgactccgattgtgctctctctcttctgtcatccccggccaactcctccagcgtcgacgtcagccggatggtccagccgtcaccggcggcggcggcgggagccgagcaccaccaccaccaccaaatccccatggcgcagccgttggtccccaacctgcagcagcagttcggcggcagctcgccgtggttcgccagctcgcccgccgccgcggccgtcgccggcggcgggttcgcctgcccgagcatggacagcgagcagcagcagcagcagcagctgaacgccgtgctggtgccgggctccaacgagaacgagatgaactaccacggcatgtttcacgtcggcggcgagggctcctccgacggcacgtcgccgtcgctcccattctcgtggcagtag

SEQ ID NO: 12761 - DNA, 981 bp, Oryza sativa
  Clone ID: TFbOSC900405j.C1.o10.fg
atggattggatgcctcctccgaagcccacctcgccgcgctcccctcccctcctctgggactgggccgacgccgccgtgccgggctcctcctccggcgaggtatccgccgccgccgccgccgccgcggctcatccgggaaggcggcggaaggagaagcgaggcagggcggaggaaggaggaggtggtggtggggaggtgaggtgccaggtggaagggtgcggggtggagctcgtcggcgtcaaggactaccaccggaagcaccgcgtgtgcgaggcccactccaagttcccccgcgtcgtcgtcgccggccaggagcgccgcttctgccagcagtgcagccggttccatgcgctctcggagtttgatcagaagaagaggagctgcaggagacgcctgtatgaccacaacgctcgtcggcggaagccccagaccgacgtgttctcctatgcatcggcaaggccgccgtcgtcattattatttgatgataaccgacaaataagttttgtctggaacaaagctccactcagccatgtaaggcctttcgcaatttctccatgggaaagctcatctgaagttgggacaactgatggacatatttatttggataaatctcacatatccaaatctctcccagcatttaacaccgacatagatgagctcttaccaatgaaaggtccggacgcatctttaactgcttcaaaatttgatggagcaccggatcttcagcgtgctctctctcttctgtcatctagttcttgtggattacctgatcctgtacagcaagcatctcgcgtcatccaattcacaggcgccagccaaaacaaccgggaacttcctccacttaatggagggaattctgcttcagcatcatgtgccaatgtacaaactatagcacaaccggctcagctggttcgttttaccatgaatgctagcagcaatgcttgtcagtccaatttcttcggtttaaaccagataaactaa

SEQ ID NO: 12762 - DNA, 3354 bp, Oryza sativa
  Clone ID: TFbOSC416193j.C1.o1.fg
atgccacggcggcgaagaagcgcgggaacccgtggccggccgccgcggtggcggcggcggaggctaagggaggagggaactggaaccccaggatgtgggactgggatagccgcgccctcaccgccaagccgtcctccgatgcgctgcgcgtcaacgcgggggctgagccaccaccagcagcagcagcaacagtcgccgccggcggcggctaaggctgctgaggcgctgcggcagggcggcgggggtagcggtgggctgaaccttcagctcggcctgcgggaggacgcggcgacgccgatggatgtgagcccggcggctactaccgtgtcttcttcgccttctccgcctgcgtcgtcggcgccggcgcaggagccagttgttaggccgagcaagagggttcggtctggatcgcctggaagtgccagtggaggaggaggtggaggcggaggcggtggaaactcaggcggtggtggcggaagctacccgatgtgccaggtggatgactgcagggcggatctgaccaacgccaaggattatcaccggagacacaaagtctgcgagatccacggcaagaccacgaaggcgctggttggcaaccagatgcagcgcttctgtcagcagtgcagtagatttcacccgctctctgagtttgatgagggtaagaggagctgcagacgtaggctcgccggtcacaacaggcggcgaagaaaaacccagccaacagatgttgcttcgcagctgctgctacctggaaaccaggaaaatgcagcaaataggacacaggatattgtaaatctgatcacggttattgcacgcttgcaaggcagtaatgttggtaaactgcccagcatccctccgataccagataaagacaatctggtccagattataagtaaaataaactctataaataacgggaactctgcttcaaagtctcctccatcagaagctgttgatttgaatgcgtcacatagccaacaacaagattctgttcaaaggacaactaatggattcgagaagcaaaccaatggattggacaaacaaacgaatggatttgacaagcaagctgacggattcgacaagcaagctgtgccatcaaccatggacttgctagcagttttatcaactgccctcgcgacatcaaaccctgatagcaatacgtctcagtcccaagggagcagtgacagcagtggtaataacaagagcaagagtcagtcaacagagccagctaatgttgtaaattcccacgagaaatctatccgggtattttctgccactcgcaagaatgatgctcttgaacggtcacctgaaatgtacaagcaaccagaccaagaaaccccgccatacttgtcactacggctctttggtagcaccgaggaggatgttccttgtaagatggacactgcaaataagtacttatcttccgagagtagcaatcctctggatgagagatctccatcatcatctccgcctgtaacacataagtttttccccatccgttcggtagacgaagatgctcgtattgcagactacggggaagatattgcgacagttgaggttagcacaagtcgggcttggcgtgcaccaccacttgagctgtttaaggattcagaacggccaattgaaaatggttcaccaccaaatcctgcatatcaatcctgttatacctcaacctcttgttcagatcattcgccatcaacttcaaattcagatggacaggaccgtactggtagaatcatatttaaactatttggcaaggagccaagcacaatccctgggaaccttcgtggagagattgtaaattggctcaaacacagccccaacgaaatggagggatacattcggccaggttgccttgtactatcaatgtatctttcaatgcctgctattgcatgggatgaacttgaagaaaatcttctccagcgagtaaacacattagtccaaggttccgatttggacttctggagaaaaggaaggtttttagttcgaactgatgcccagttggtgtcatacaaagatggagcaacccgcttatcaaaatcatggagaacatggaataccccagagttgacctttgtctcaccaattgctgttgttggtgggagaaagacctccctcattcttaagggccgtaatctgacaattcctggcacccaaatccactgtaccagtacggggaagtacatatcaaaagaagtactgtgctctgcatatccaggaacaatatatgacgattcaggtgttgagacttttgacttacctggagaaccacatcttattcttggacgttacttcattgaggtcgagaataggttcagagggaacagctttcctgttatcattgccaattcaagtgtttgtcaggagttgagaagccttgaagctgagcttgagggttcacagtttgttgacggctcttcagatgatcaggctcatgatgctaggcggctaaagccaaaggatgaagttttgcactttctaaacgaacttggatggctcttccagaaggcagctgccagtacatctgctgaaaaatctgattcttctggtttggatttgatgtacttctcaactgcacgcttcagataccttctgctgttttcaagtgagcgggactggtgctctcttactaaaactcttctggaaatccttgccaagaggagtttggccagtgatgaactatcacaggaaactctggaaatgctctcagagatccatctcctgaacagggcagtgaaaaggaaaagtagccacatggcgcgcttgcttgtacagtttgttgtcgtgtgccctgatgattccaaattgtaccccttccttccaaatgtagctggcccaggtggtttgactccattgcacctggctgcatccattgaggatgcagtggatattgttgatgctttgacagatgatcctcaacagattggtttgagctgttggcactcagcgctagatgatgatggtcagtcccctgaaacttatgccaagttgaggaacaacaatgcgtacaatgagcttgtagcacagaaattggtggacaggaagaacaaccaagttactataatggttggcaaagaggaaattcatatggatcaatcagggaatgttggtgagaaaaataaatctgcaattcaagcattgcaaataagatcttgcaaccagtgcgctattttggatgctggcttgctaagacgtcctatgcattcacggggattgctcgctcgcccctatatccattccatgcttgcgatagcagcagtctgtgtttgtgtttgtgtattcatgcgagctttgctgcggtttaattctggtagatccttcaaatgggagaggctggattttggtacgatataa

SEQ ID NO: 12763 - DNA, 1377 bp, Oryza sativa
  Clone ID: TFbOSC422778j.C1.o2.fg
atggcggtgccagcggcggcggtggcggccgacgtcgtcgacttcgggtacgccgcccccatgccgccgccctacgtcggcttcgacccagccggcatgggcggcgagcgccagctgttccagcacggcggtgcatgccatggcctctacgacggtggcctcgacttctccgccgccgcggcgttccaggaagcggccactcttggagttggcctgccgggcggcaatctgctgcagtccctggcgccgcccgccgccgccgccgccacgccgtcgtcgctgcagatgccgatgatgatgtcgctgccgggcctgcctgcgacggcggccgacgtgtacccgttcggcggcggcgggttcgtgaagcgggaggatggccccgtcctggacgtcgtcggcggcggcggcggcgggaggatcgggttgaacctcggccgccggacctacttctcccccgccgacgtcctcgccgtggaccgcctccttctccggtcgcgcctcggcgggatggggatggagatggggatgggcatgggcgtgctcgggctgggcctcgccgcggcggcgcaccaccaccagccgccgcggtgccaggccgagggctgcaaggccgacctctccgccgccaagcactaccaccgccgccacaaggtctgcgacttccacgccaaggccgccgccgtcctcgccgccggcaagcagcagcgcttctgccagcagtgcagcaggtttcatgtgcttgctgagtttgatgaggcgaagaggagctgccggaagaggctcaccgagcacaaccgccgccgccggaagcccaccgccggcggccaatcgtccaaggactcgccgccgccgccgccgtcgaagaaagggactgacgccagcatcgctagctcctacaccagctgtgaccaccacaaggcagctgcgagcaccacgacggccagcggcgtgagctgcctgcaggagcttgcagaccaccacgacgtcggcggcggccatcaggcagccatggcggcggcgccgccgccgacgctgtccctggccgcgctgccgccgcaggaggaggacgacgaggacgaagacggcggcctcggcaacgtcctgatgatgcagcagcaccatcaacggcggcgactgcaacacgacggcgacggcgacgacgatgtcgccgccgccgccgcccaccaccatctgatgagatctctcgcgcggcagcagcagcagcatcgccatagcagcggctgcagcaacaacaacgacggcgacgacgacgaccacaacaacaacaacaacatactgtcgtgctcgtcggcgtcggaccagcagaacagcagcaacaacaacaacatgcatttcttcgaggtggatttcatctag

SEQ ID NO: 12764 - DNA, 963 bp, Oryza sativa
  Clone ID: TFbOSC900393j.C1.o8.fg
atgccgatgcccggagacgtgtacccggcgctcggcatcgtgaagcgcgagggcgggggcggaggtcaggacgccgccgccgggaggatcgggctcaacctcggccgccggacctacttctcccccggcgacatgctcgccgtcgaccgcctcctcatgcgctcccgcctcggcggcgtgttcggcctcggcttcggcggcgcccaccaccagccacctcgctgccaggccgagggctgcaaggccgacctctccggcgccaagcactaccaccgccgccacaaggtctgcgagtaccacgccaaggcctccgtcgtcgccgcctccggcaagcagcagcgcttctgccagcaatgcagcaggtttcacgtgctcacggagtttgatgaggccaagaggagctgccggaagcggctggcggagcacaaccgtcgccggcggaagccggcggcggcggcgacgaccgccgtggcggcggccaaggacgcggcggcggcgccggtagccgccgggaagaagcctagcggcggcgccgccacgtcttacaccggtgacaacaagaacgtggtgtccatgagcgcggccaagtcgcccatctcgtcgaacaccagcgtgatcagctgcctgcccgagcagggcaagcatgcggcggcggcggcgaggccgacggcgctcacgctcggcggcgcgccgccgcacgagagctccgcgccgcagatcggcgccatgctccatcaccaccaccatcaccagcaagaccacatgcaggtgagctccctggtccacatcaatggcggcggcggcggcggtagcaacaacatcttgtcgtgctcgtcggtgtgctccagcgcgctgccgtcgacggcgaccaacggcgaggtatcagaccagaacaacgacaacagccacaacaatggcggcaacaacaacaacatgcatctgttcgaggtcgacttcatgtag

SEQ ID NO: 12765 - DNA, 1026 bp, Oryza sativa
  Clone ID: TFbOSC404997j.C1.o1.gm
gatcccccgtgcgcggtggacgggtgcaaggaggacctgagcaagtgccgcgactaccatcgccggcacaaggtgtgcgaggcccactccaagacccccctcgtcgtcgtctccggccgcgagatgcgcttctgccagcagtgcagcaggtttcacttgcttcaggagtttgatgaggccaagcgcagctgtagaaagcgactagatgggcacaaccgtcgccgcaggaagccacagccagatcccatgaactctgcaagttatcttgcaagccaacaaggggcaagattctcaccgttcgcgacgccgagaccggaggcaagctggacagggatgatcaaaaccgaggagagcccatactacacgcaccaccaaatccctcttggcatcagcagcaggcagcagcatttcgttggctccacctctgacggcggccgccgcttccctttcctccaggaaggcgagatcagcttcggcaccggcgccggcgccggcggcgtgccaatggatcaggcagcagctgctgctgctgcttcagtgtgccagccacttctgaagacggtagctcctcctcctcctcctcatggcggcggcggcagcggcggcggcaagatgttctccgatggtgggttgacacaagtgctcgactccgattgtgctctctctcttctgtcagctccggcgaactccacggccatcgacgtcggcggtggccgggtggtcgtccagccgaccgagcacatccccatggcgcagcctctcatctctggccttcagttcggcggcggcggcggcagctcagcctggttcgcggcgcggccgcatcatcaggcggccaccggcgccgccgccaccgccgtcgtcgtctcgacggccggtttctcctgcccggtggtggagagcgagcagctgaacacagtcctgagctccaatgacaatgagatgaactacaatgggatgtttcacgtcggcggcgaaggctcatcggatggcacgtcgtcgtctctgccgttctcatggcagtag

SEQ ID NO: 12766 - DNA, 588 bp, Oryza sativa
  Clone ID: TFbOSC422154j.C1.o2.fg
atggccgcgctcgccgccgcggcggccgcgggggacggcggggcggcgctgccgtcccccatggaggaggacaagaagcccaggctggtggcgtcgtcgctggcgcccgtggcaggcggcggcggcggcggttcctcctcgtccgctgctgttgctgctggcgcgtcttctagctcctcctcctcctcggtggccgcggcggcgaggaggggcgcgggccgtgccggcggtggcgccccgtcgggcggcggcggcgggcccaggtgccaggtggagaggtgcggcgtcgacctcagcgaggctgggcggtacaaccggaggcacaaggtgtgccaaacgcactccaaggagcccgtcgtcctcgtcgctggcctccgtcagcgcttctgccagcaatgcagccggttccatgagctgacggagttcgacgacgcgaagaggagctgccggcggcggctggccgggcacaacgagcggcgccggaagagcgcggcggacacggcgcacggcgagaactgccgccacgccgaccaggacgccggccggagccaccagggcaccgggaacccgccgttccagatcagataa

SEQ ID NO: 12767 - DNA, 1014 bp, Oryza sativa
  Clone ID: TFbOSC900087j.C1.o1.fg
atggacgccggtgagccctacacctcggactcgttggtccttgccactgcagctagccaatggtcccctctccatctctcgctgctcctccaccaacagcagccgcgacccgtccgttccttgtcatccccaccgggggacacggcacccttgtggcctcgccaccgtcatcaagggaatcagcagccagggagcttctccgccatcagaatgggtaacgcactggctacggttttgggcacagctacaaagctctttttgagcaaaggctgggatgttatattccattatcttaaaaaaatggacgccggcgagcccaagagggcgacaactgaggggaatcggcaaccggggagccgagggcgaagctcagcgggacgagcggcacgggggaaggagatcggtggcggcggcggcgagggttggggacgacgacgcggtggtgggcagggtggcgatcagcatgggggcggtggccgggacctcgccgggggagcggacgacgacgacacaaggcacagatcagcccgctggctccgagacgaggggatcgacaacgacgatgcaggcgcagcccggcccgacggctctgagacgaggtgtcaacaacgacgacatgcacgtagccggctggcggtcgaaagaggggtcagagatgaacggccgccgccaccgttgaagaggctgtccgtcgccgggccgtcgtcgtcgtcgtcttcccccgacgccgccgcgtcggcggcggcggcggcggcggcggcgctgcacgacttctccgtccgcgccaggccggcggcggcggcgccggcgacgaggagggcgcgcggagggtcgggcggcggcggcggcggcggcggcggcgcggaggcgtgctcggtcgacgggtgccggtcggacctcagccggtgccgcgactaccaccgccgccacaaggtctgcgaggcccacgccaagacgccggtggtcgtcgtcgccggccaggagcagcgcttctgccagcaatgcagccggtaa

SEQ ID NO: 12768 - DNA, 1410 bp, Oryza sativa
  Clone ID: TFbOSC406405j.C1.o2.fg
atgggttcttttgggatggactggaatcagaagagctcggtgttgtgggattgggagaatatgccgccgataggaaatagcgcgaacgagaatcccaagaatgtgatgctggctgaatcaaaacttgcaggtgttggggttgacataggccatgaatcaggccattcttctggtggtactttctcttctagctcagagattgggtatggttcatccaagagttccatatccgcgtcgatcgattctccgtccaaagtggggaacaccatagagctcaattttgcatctgcggaagagcatgataagaacatggacaagggtaagagtaaagttgatgacaccggaacttctcgatcaccggtggtagcagccaatcgtgtagagcccttgattggcctgaagcttggcaagagaacctattttgaagatgtctgtggagggcagaatgtcaagagttctccatctggtgtgagtgtggctaccccatctcctggtctggccaagaaggtgaaggtggctcagcagaacactcagaacccacactgtcaagttgaaggctgcaatgttgatctctcttctgctaaaccttaccatcgaaagcaccgagtctgtgaacctcacagcaagactcttaaagtcatcgttgcgggtcttgagcgacgcttttgccaacagtgtagtcggtttcacggtttagctgagttcgaccagaaaaaacgaagctgtcgcaggcgcctccatgatcacaatgcccgcagacggaagccacaaccagaagcaatttccttaagttcgtcgaggctctctacattactctatggtgatgcaaggcaacaggcaagttttctatttggtcaagctccttatggtcagatgggaagctgtgcaagttcttgggataacccagtaccaggaggcttcaaatttacagcaacaaaagctccttggtcaaggccaacaatagctgccggtgttgatgggacgcatgtatctaatcagcaggcatcgggcaatgtactgccacatggagcacatcatagttttgatggtctcatggcgttcaaagaaaccaacgcgaaggtccttaaccaaggcatggaagcttctgctgtcgcttccggctccgctagaggcccagactttgagcatgctctctctcttctgtcaatcgattcagtgggtgctgcaaaccttcagccaggttctcagattcaccctggtgtcaccgccattgccggcacctccaaccctgtcatgatgccatctccagcaatctggcaaggaggcttgtcccttgatcagcaggcgcagtttcaggctttcgaccgccttggcaacgacgacgacgaagatcatctccagctcccaaagccttcctatgacaactcccactatgatcagatgaactga

SEQ ID NO: 12769 - DNA, 1542 bp, Oryza sativa
  Clone ID: TFbOSC400657j.C1.o2.fg
atggcttcttttgggatgaactggaatcagaagagccctgtgttttgggactgggaaaatccagcgcctttcggtccgaatacaatggaaaatcccaagagcatacctcaccctgaaccaagaggtgtagttgtcgcggccgcaaatcatggatccaccaattcatccggtggcacgttcacttctagctcggagctagccaatggttcatcgaagagctccttgtcagcgtcgttcgattcctcatccaagctggggaacagcttagagttcaggtttgcttctgtcaaagggcatggcaagaacatgtgcaaggatggcgaggccggtagagttgaagactcgggcacttctccagctgtggcagttagccatggtgagccggtaataggactcaagttagggaagagaacttactttgaaaatgtttgtggagggcagaatgtcaagagctcctctgcagcttcaggtgtgacttgtccatctactgtggtcaagaagatgaaggtgtctcagcagagcacacaaagctcatactgccaagttgaaggctgcaaagtcgatctgtcctccgcaagagaataccatcgcaagcacaaagtttgtgaagctcattctaaggcaccaaaggttattgtttctggtctggagcgccgtttttgccaacagtgtagtcggtttcatggtttagctgaatttgaccagaaaaagaaaagttgccgcaggcgtctatctgatcataatgcacgaagaaggaaaccgcaacaagaggcaatttcatttggttcatcaaggctcgccacgatgttttacgatgcaaggcagcagacagatatttactttggccaatctccttttggccaagtgagaagcaatgcaatttcttcatgtgacaacctgggaggcttcaaatttacagaagcaaaactcccctggatgaagccaatgaaaactataggccttgaggatctgaatttctctaccctgcagatgccaggcaatgttgtgtcgcatacggtgcatcatcatgattttgatgggctcataccattcaagggaaacaccccgaaggtcctcaaccaagcttgctttatggacaagctagaaccacaaattgtttctcaaaaaaacaaaaacaaaaacagagaggctagatccaccaattatctgttacaagctttttggacttcctgccttggtgtggatccagcctgtgccgtcgtgtcctccaactcgaatggagccccggatcttcggcgtgctctctctcttctgtcaagcgattcctggggcccggccgacgttcaggccggctcccaggtgcatcccggtggagtgatgccgcccctcgccgttgccgccgccaccgtcaccgccccgacgaaccctgtcagtgtgatgcatgctctgcacccgtccaccggaggaggaggattctggcaagacggcgacgacccgcctccgctcgatcatgcctcgcaggctcaggcgttcatgcatcctggcaatggcagcagctccggctatggccatctgcactga

SEQ ID NO: 12770 - DNA, 1032 bp, Oryza sativa
  Clone ID: TFbOSC401261j.C1.o16.fg
atggagtgcaaccccgtctcctccaccacctcctcctccctgctctgggactgggacgccaccgcctccgccgagccgccgccgccgcccgggaagcgcggcgggagggattcgtcgtcggcgtcggcgtcggcgaagcgtgggaggtcggcggcagcagcgggggatgcggcggcggtggcggcggaggcgccgcggtgccaggtggagggctgcgggctggagctgggaggctacaaggagtactaccgcaagcaccgcgtctgcgagccccacaccaagtgcctccgcgtcgtcgtcgccggccaggaccgccgcttctgccagcagtgcagcaggttccacgcgccttcggagtttgatcaggagaaacggagctgccggagacgactttctgatcataatgcccgtcgacggaaaccacagacagatgtgtttgcttttggctctggaacactaccgcgatcactgtttgatgataggcagcaaataagtttcgcatgggataataacgctccacttaaccatgcaaacaccacttcaagttcctcgtggacatctgacttacagctctcccaagtgatggacataagcaaaaggtcacgaaaagctggggcagacagtgcaaatatccgtttgtcaaatgctttgccaactctttgtcatgacacaaatgagctcttgccaataaaaggtgcagatgcatctgaaactgcttcaaaactagatggagcactagatgttcagcgtgctctctctcttctgtcagctagttcaaggggtttgactgaccccggacaccaaacatcttctatcatccaatttacgaattcgaaccaaaacagcacattgcccagtgtaccaagcgaaggaaactctaatgtacccttttgggttgatggacaacatcaagcagtagagcctcaggtgtttcagttcacaatggacaccggtaacactgtgtttccggatctagagcggatcaaaccttcctacgagtcttcaatgtttggtctgaaccagatacattga

SEQ ID NO: 12771 - DNA, 540 bp, Oryza sativa
  Clone ID: TFbOSC222j.C1.o2.fg
atggaggctgcccgggtcggggcgcagagccgccacctgtacggcggagggctaggcgagcctgacatggacaggcgcgacaagaggctgttcggctgggacctcaacgactggcggtgggacagtgaccgcttcgtcgctacgccggtgcccgccgcggaggcgagcggcttggcgctgaacagctcgccgtcttcctccgaggaagccggggccgcgtcggtgagaaatgttaatgctagaggtgactccgataagaggaagcgggtggtggtcattgatgatgatgatgtggaggatgacgagctggtggagaacggcggcgggtcactgagcttgagaattgggggtgatgctgttgcccatggagcaggggtgggtggtggtgctgatgaggaagacaggaatggcaaaaagatcagggtgcagggaggcagtcctagtggccccgcgtgccaggtggagggctgcactgcggaccttactggtgtgagggattaccatcgacgacacaaggtagaatatgctatgcaagtttga

SEQ ID NO: 12772 - DNA, 1083 bp, Oryza sativa
  Clone ID: TFbOSC400235j.C1.o44.fg
atggaaggaaacggctgcggcggaagcggggcgacaccacgtggtgtcgttgggatgcactgggctcccgtcgtcacctcgccgcctagcccgcagccgccgttcctcccgccggcgccatgcaggcccgacgtccagatgcaacagcaaggcgggctgacctgcctcaagctcgggaagcggccgtgcttctggggtggcgacggcgccggccaggtggcgcaggggagcggcggcggcggaggcggaggcggtggtggttccgcggatcaggggaagaggaaggagaaggcggcgacggcggtgccggtggtgccccgttgccaggtggaggggtgcgacattacgctccagggagtcaaggagtaccaccggcggcacaaggtgtgcgaggtgcacgccaaggccccgagggtcgtcgtgcacggcaccgagcagcgcttctgccagcaatgcagccggttccacgtgctcgcggagtttgacgacgccaagaagagctgccggcggcggctggccgggcacaacgagaggcggcggaggagcaacgccagcgaggccatggccaggggctctgcgcacccacacggtatgccggtgctgggacacggtttcccgccgtacggcctgccgacgtcgtcggctggtgctctctctcttctgtcatcggctagagccaccggcccatggctgatgccgacgcccgacatctccgcccgctcaagcgcggcgctcgacgagctcatcgccgagaaccgcgcggccctcctctcgtggcaattcttctccgaccgacagccgccaccagctggccgtccaacgggccgcagcccgggctccgaaacggccggtggctggcacgcgcacctgcaggcgcggccgccaccgcccggcgccggagggcagcacgagaatcagtcggggcacgtgacgctcgacctcatgcaggccaccaccgcggcaggaggcagcggcgcgccgttccggcccgtgccagcgaggccccccaaggagggcggcgacgccggctgcacctccgacgcgtggacgccgtcgcccatggagggcgcccgcgtggtctga

SEQ ID NO: 12773 - DNA, 156 bp, Oryza sativa
  Clone ID: TFbOSC33170j.C1.o5.gm
atggtacatatcgcgccgcgccacgaggtgttcgacacgggaccgaggcgtgtgtccgtgtcggagaaggattctcaaccagaggaaggagaccaagagtcccaagacaggccccgattacctttctcgctcaacgagaggaaattactggcctaa

SEQ ID NO: 12774 - DNA, 2262 bp, Oryza sativa
  Clone ID: TFbOSC401478j.C1.o49.fg
atgtcgagtgggctcaagaagaagggcctggagtgggatttgaacgattggagatgggattcaaacctgttcttggccacaccatccaacgcttctccatccaagtgcagcaggagggaattgggccgagccgagggggagatcgattttggtgtggttgataagaggagaagagtctcaccagaggacgatgacggcgaggagtgcatcaatgcagcaaccacgaatggggacgatggccagatttctggtcagagaggaaggagcagtgaggacgagatgcctaggcaaggcacctgttctagtagcggtccgtgttgccaagtcgacggctgcacggtcaatctcagcagtgccagggattacaacaagaggcataagttttatggtaattatttgacatgccttgtcaggtttcactttcttcaagaatttgatgaaggaaagaagagctgtcgctcacggctagcacaacataacagaaggaggaggaaagtacaagtgcaggctggtgtagatgtgaattccttgcatgaaaatcattctttgagcaacacattactcctgttgttgaaacaactttctggcctagattctagtggtccatctgagcaaatcaatggtcctaactatttgaccaatcttgtgaagaatcttgctgctcttgctggtacacaaagaaatcaagatatgctaaagaatgcaaattctgctgcaatagcatcacatactggtaattatgttgcaaaaggcaatagtctacatgactcaagaccacatattcctgtaggcactgaatccactgcagaagaacctacagtggaaaggcgtgtgcaaaattttgatttaaatgatgcttatgtggaaggagatgagaatcgaacagataaaattgtgtttaaactcttcgggaaagagccaaatgattttccttctgatttacgtgctcagatcctcagctggttgtcgaattgcccaagtgatatagagagctatatcaggcctggctgtatcatcctaactatttacatgcgcctccctaattggatgtgggataagcttgctgccgacccagctcactggatacagaagctaattagcttgtccactgataccttgtggagaacaggatggatgtatgcaagggtgcaggactacctgacattgagttgcaacggtaatcttatgttagcgtctccctggcagcctgcaataggcaacaagcatcagatattgtttataacccctattgcagttgcttgttcttcaacagcaaacttctcagtgaaaggtctcaacatagctcaaccaaccacaaagttgaagatcttgatcaaagcagcctttcatttccctttgttgttgctgaagaagatgagccacatacgagctacatctgagactccaaaagattgtactgagggctttcctgctgcaagatttagatggttgctgtcctttgcagttgatcgggaattttgtgctgttataaagaagcttctggacaccttgtttcagggtggtgttgatctggatgtccaatcaacagttgaatttgtcctgaaacaagatttagtatttgtggctgtcaacaaacggtcgaagcctttaattgactttctgttgacatacacaacatcttctgctccaatggacggaactgaaagtgctgctccagctcagttcttgtttacacctgacatagctggtccatcagatattacacctcttcatattgcagccacatacagtgatactgctggtgttttagatgctttaactgatgatcctcagcagctgggaatcaaagcatggaagaatgctcgcgatgctactggattgactccggaggattacgctcggaagagaggccacgaatcctacatcgagatggtccagaacaagattgacagcaggttacccaaagctcatgtgtctgtcaccatatccagcaccacatccaccaccgacttcaccgaaaagcacgcgagccaatcgaagactacagatcaaaccgcatttgatgtggagaagggccaacagatcagcacaaagccaccactgagctgcaggcagtgtctcccagaactcgcttaccggcatcatttgaacaggtttctgtcaaccaggccagcagtactctccttggtcgccattgctgctgtctgtgtctgtgtagggttgatcatgcaggggccaccccacattggaggtatgagaggtcctttccgctggaattctttgcgttcaggccccaagtga

SEQ ID NO: 12775 - DNA, 2421 bp, Oryza sativa
  Clone ID: TFbOSC418761j.C1.o28.gm
atggcgctgtcgacggcgcagacaggggagtcgatgcactcctcgacgttcgcgtcgcggtacgtgcgcacggcgctgccgaggttcaggatgccggagaagtcgatccccaaggacgcggcgtaccagatcatcaacgacgagctgatgctcgacggcaacccgcgcctgaacctggcgtccttcgtcaccacgtggatggagcccgagtgcgacaagctcatgatggccgccatcaacaagaactacgtcgacatggatgagtaccccgtcaccaccgagctccagaaccggtgcgtgaacatgatcgcgcatctgttcaacgcgccgatcggggacgacgagacggcggtcggggtgggcacggtggggtcgtcggaggccatcatgctggcggggctggcgttcaagaggaagtggcagaacaggatgaaggccgaggggaagccccacgacaagcccaacatcgtgacgggggccaacgtgcaggtgtgctgggagaagttcgcgcgctacttcgaggtggagctcaaggaggtgaagctgacccaagggtactacgtgatgaacccggagaaggccgtggagatggtcgacgagaacaccatctgcgtcgccgccatcctcggctccaccctcaacggcgagttcgaggacgtcaagatgctcaacgacctcctcaccgccaagaacgccgagacagggtggaacacgccgatccatgtggacgcggcgagcggcgggttcatcgcgccgttcatctacccggagctggagtgggacttccggctgccgctggtgaagagcatcaacgtcagcggccacaagtacgggctcgtctacgccggcgtcgggtgggtcatctggcgcaacaaggaggacctccccgatgagctcatcttccacatcaactacctcggcgccgaccagccaaccttcacgctcaacttctccaaaggatcgaaccagataattgcgcagtattaccagctcattcgtctcggattcgaggggtacaaggacatcatgcagaactgccgggacaacgcgacggtgctccgggaggggatcgagaagacgggccacttcgacgtggtgtccaaggactccggcgtgccgctggtggccttctccctcaaggactcgtcgcggtacacggtgttcgaggtggccgagagcctccgccgcttcggctggatcgtgccggcgtacaccatgcccgccgacgctgagcacgtcgccgtgatgcgcgtcgtcatccgcgaggacttcagccgcggcctcgccgagcgcctcatcaccgacctcaccaagacggtggccgatatggacgcccacgccgtcaagaaggccgccgccgagccggccaagaagaccgtgcgggagatagagaaggaggtgaccacctactggcggagtttcgtcgccaggaagaagagcagcctctgggaggacgagggcaatggtggtagcggcggcccaagatgttgctcgtcgtcctcgccctcgcaattaccggtgcggtcttcgacggctcgcgagtcgctggaccacatctccatcaactgcactggcggggtcggggccacatccggctgccgctccgtccactcgcgccgttcagcaccgacgaggagggcgaggctcctcgtccccgctcagccgcggctttgcttggatagtcccgactggaggcagtcggcggcggggagggagtgggaacaggagcgggacgacggcgacgacagaagaggaagttggctcgcgtcggaatcttggtggttcgtaggcgatgatgccaccgccgccgctgccacccgagttcgacgcgagaaacggcgtgcctgcgccggggcaggcggagcaggaggcgatggagctgcacgggcgccgccatcctcctcctcggcgagcacgagggcggcggcctcaactccgggcggtgggatgcgcggttcgcgcatgcactacctacggtactacgacgcggcattcgacgcggtggacgcggcggggttgctggagactagacccgcgagggccaaggtggaggagatgttcgcgcgggagatccgcaacgcagtggcgttcgagggcgcggagcggtttgagcgccacgagagcttcgccgggcggcggcggcgcatggaggacggtggcggtttgcagtggggttcgaaggcggaggagaaatgtttattgccgtcgtcctccttggctcgtcgtcccagacgccaaccgtcgcccccggtttcgctgcgccccgatgggagcttgccaccagccgtcgccgccgctccactcgtcctcccactgccacgagcctccgcggccgagccgccgcgctgcgccccgatgccgccaaccgccgctcccctcgtcctcccgccaccgctgccaacagagaaagagagaatatag

SEQ ID NO: 12776 - DNA, 651 bp, Oryza sativa
  Clone ID: TFbOSC22910j.C1.o3.gm
atgatcacgtttgggttgaactcccgcccccatccggagttccggaacgacctccgcccatcgtcatcgtcacttgccgccggcgaaagtgagtccccaaaggcggtggagaggctggagagagagggatgtaccagatctggaagctcccgccgtcagccgcgccgaggctccgggatgcggcagccgctccgcccgtcgccggcggccctccacccacgaggtgctgccgtcgcccctacgcgctcgcctggtgccgccgtcgccggcgctgagatgcggcagcaggccaccggcgggtggggaggaggctggcggggagctcctcctgcgcggccgcgagctcctgctgctgcagctgctgctaatttatctcgtacggccatggcgctcacgaaagaagcagagcgcctcgacgtgcccttccagttcaacccggtggtgtcccgcctcgatgccctcgatgtggagtccctccgcgtgaagaccggcgaggccctcgccatctgcttcagcctccagctgcactgcctcctggcgtctgacgacgacgccacggccggcgcgggcggcgacaaggagaggcgaagcccggagtccgggctgtccccgtcgaagtcacgcgcggacgcgttcctgggcgcgctatag

SEQ ID NO: 12777 - DNA, 651 bp, Oryza sativa; identical to SEQ ID NO: 12776
  Clone ID: TFbOSC412551j.C1.o9.gm

SEQ ID NO: 12778 - DNA, 414 bp, Oryza sativa
  Clone ID: TFbOSC407154j.C1.o12.fg
atgggagcgggacggcggcgacgacagaagatgatgccgccgccgctgtccaactttgacgcgaggaacggcgtgcctacgccgggacaggcggagcaggagacgatggagctggtgcgcatgctcaccgcgtgtgccgactcagtctccgccggcaaccatgaggccgccatctactacctggcccggctctgcgagatggcttcgctggcagggcccatgccgatacaccgcgtggctgcctacttcattgaggtgctcacgctgcgcgtcgtgcgcatgtggccacacatgttcaacatcagcccaccgcgggagctcactaacgacgccttcagcggcgacgacgacgccatggcgctgcggatactcaacaccatcacgcccatcctcctcctcggcaagcacagctag

SEQ ID NO: 12779 - DNA, 390 bp, Oryza sativa
  Clone ID: TFbOSC1414j.C1.o5.gm
ggggagatcgccgacatcgtgagccgcgaggggagcagccgggtggagcgccacgagcagatgccgcggtgggtggagaggctgcggcgcggggggatgacgcagctgccgctcggcgccaccggcctctggcaggcggcgatgcagctccgcgagttctccggcgccggcttcggcgtccaggagaacggcggcttcctcacgctcacctggcatagccagaggctgtactcggcgtcggcgtggcgcgcgaccgcggggaagaagatgacgatgatggctagcggcgccgccgacgccatggaggagagtcagaacagcaacaccaacggcggcggcggcggaagcagtggtggtggccatggtgctctcaaccaaatcatgcagtga

SEQ ID NO: 12780 - DNA, 1539 bp, Oryza sativa
  unsure (1)..(1539): unsure at all n locations
  Clone ID: TFbOSC9377j.C1.o2.gm
atggcggtggaagccatggcgtgggcatccaagctgcttgatggtggagggcgacggcacagtgacggttttgtgaagccggtggttggcgtcggtgacaacgccgacggcgactgtgactctgaagacggtggcaacgtcggcggcggggaaggagtcgggtgcaaggtgggaatgatgacgncaaggtggctgggctcaggaggaacaggcggaggggcggcggcggtggcgcggcagcagctggtgctggccggagagggcggagatgaggccggcgtgtcgtgtctcttcgctcccttccagcaccatgagccacttggagaacacgctcgaggcgcgtctcgccggaacggggagccagatgtaccagtcgctcgttgcgaagcgcacatcgacggtggacttcctcaaggcgtacaagctgttcacggcggcctgctgcgtcaagaaggtgagcgtcatcttctgatcttctccaacaagaccatctacaacgccgtcgccgggaagcgcaagctgcacatcgtcgactacggcctcagctacggattccagtggccagctttgttctttttgctgggaaccagggaaggcggaccaccggaggtgaggatgaccggcatcgacgtcccgcagccgggcttccggccagccgaccagatcgaggagacaggccgccggctgagcatctgcgcgcgcgcgccagttcggtgtgccattcaagttccgcgccattgccgcaaagacgagagcgtggtcatggacagggacagcccgagccccagagatgtggtgctcaacaacaaccgcgacatgaggcctcacgtgttcgtccagtgcgtcgttaatggcgcgtacggcgcgcccttcaaggaggcctcacgtatcggcttgggcatcagcgccaggtgctgcctcgctgggaagcagacgagcaggtcggcgccgtcgtcgtcgccaccacgcccttccctccacctccacctccacctccgccgccggccgccgccttcttcctcacgacacgcggccgacgatgcggcgctccaccccctctcccgccggcgcgacgcgtacgtggagaggatgggagagggagaggtggtcgacgggatatggccagatgggggaggggaaaggcggccggcagctgctgtgctcgccctccaccgctctgcccgccaccggtccgcctgccactcgcagaccgctgccgcgctcgctcgctgccagcctcccgcatccgccggagagaagagaagggcgacggagggaggcctacgagcgcgcgtggaggccgacgagcaggacagcacctcggcggcgaggcgtggacgagcgggcgaagcgggctggcggagcagaggaggagcggtggcgggcgagctcctcgcccttgcagggcttcatcgtcgaggagaggtcgcaatccatcgtcttcgcagggcgtcgcgcggcgaggcggccggtcgcagcagcgccgaggagcggccgcacgggaaggggtcgtggcgtggagtagctagaaggagatga

SEQ ID NO: 12781 - DNA, 723 bp, Oryza sativa
  Clone ID: TFbOSC414562j.C1.o7.gm
atgccgtcacctttggtgctgctgcttcagtgcttcggagacgttgcactgacggacctcctcgtcggacttgcgctgctgctcagctgccttcaaagccgccgccgctggttggacgcccgctcgaagcagcagccggcgccgctggagagtgagcgcttcgaagttggaatggatagtgtgctgctgggagcttacgagctagggtttgcagcactttacccacctctcgactctggtctagttgggccgacggccatggcgctcatgaaagaagcagagcgcctcgacgtgcccttccagttcaacccggtggtgtcccgcctggatgccctcgacgtggagtccctccgcgtgaagaccggcgaggagtctgggctgtccccgtcgaagtcacgcgcggacgcatcgccgaaggtgatggtggtgacgaagcaggaggcgagccacaacgcggcgttgctgacggagcggttcgtggaggcgctcaactactacgcggcgctgttcgacggcctggaggagtggcacgagcggctggaacggtgggtggggcggctggagggcgccggcttcggccgcatcccgctcagctactacgcgctgcttcaggcgaggcgggtggcgcagggccttggctgcgatggcttcaaggtccgggaggagaagggaaacttattcctcttctttgtttccacatggcgcggccgccgcttcgactga

SEQ ID NO: 12782 - DNA, 1173 bp, Oryza sativa
  Clone ID: TFbOSC402543j.C1.o5.gp
tcacatcaatgcaaataataattaaaaaaacaatatcacacacatcaatgggcaaaaatgtttgaccctctgttgcaacatggatcatgaatagaccaaataagttggccgaaaagatagttctcaggttgacaacagcacaagactagccaaaacccagttcaacattttgagcatattacaatgttactgtctgccacagtgcagtaagcacctagtaaaaacagagtaactggtgtcaattacaaccggatcaactgactggattgatcgcaagaaccggtgacgctgcagcgaacatcatccggaccaggacctaagtctattttctaagtggtagtgtggcactaagctgcaacatgacaacagaagcaactaattaacatcacataaaaacatggatatctacatgcatgcttggttatcttatggcttcaacaacttgggctaccaattctccctcatagcctgcattgcatgaattggtttgaatcagaagaagaaccaacccattggaatcacaagtgcactccaaattctagataggcatacctcaagtcattgggtccatcaaaccaacaccaacaccatcgatcttcatacatgacatactgccactagccatcttattgaaatacctagatcttatatttgtcgcgatgccaaaaaaaaaaacaactaaaaataagagagagcatcatttggcgtccatgttgagatggcatagagtattcgtcccttccatccttgcaagagccattggtgatctatatctatcacgaagtccttgtggtagcagtccttgaccttgttccgcactacctgaacaatttctggattcaatggcagttgcttgaagccagcccgttgattccgcacctgccattgcttgtatgtctcagggcgctccacccgatctatgccctcacacgcaatgacattcagagcagctcgtccaaagatgttttgctcaatcagcagccgctgttcgctttcccttggggtagttgcatccagaacatcgaacaaggccgagtaaaagaacaaagcctcccggaaccgtgtcacaaagaatggtgcactgaatgagccattcactattgcatggatgaacacatgaggctgcatcttccggatgttgctgagcacaatatcccttgggctgtcgatcac

SEQ ID NO: 12783 - DNA, 769 bp, Oryza sativa
  Clone ID: TFbOSC416737j.C1.o13.gp
taattgtgatataatttactctttttccatatataagcattagctaccaagaattatgagttgctacaactaattaagctttaccagatcaataccaaactcactcaccaaatggaaaatgaaaaaaatggaaaaagagcgcgaattaattaagtgaccgatttggtgacggcaataatgtcgcggcatcccctggtctaacgccaggcggaggcgacggtgaccacgcgccccatccatccgagccggagcacgccgttctccgccttgacggcgaaccctgccgcgacggggccctgccgggccaacacctggtcagcaatgcccggtccgagcgccaccggccggaatcccgccatgccgaaccgggagcgccacttgccgaacacctcgcaccgctccagccggtcggcgccttccctggccaccgcgttcgccgccctcccgcccagcgccgcctcagcacgcgccctctccgcgctctcccgggggatcgtggcgtccagcgactccaggatggccccgtagtgcgcgcacgcgtcggtgaagcgcgtggtcagcggggccgtgttggagttcagctcctgctccacgagggccaccacctgcgggccgagggcgcgcacccgccggaggatctcgtcgcgcgggttcgccggcgagacgctctcgtcggggacgtgggagagcgcgaacgccaggttgacagccagcgcctccccggcctcgcaccccagcttggatgcttctatctcccctgctctgcagc

SEQ ID NO: 12784 - DNA, 738 bp, Oryza sativa
  Clone ID: TFbOSC900243j.C1.o1.fg
atgatccggatcaccgtgccgtccgtgcgccccgccgtcccgccgcttctcgccgtgtcgagctcggagctcggagcccggctcgccatcttcgccaagtccaaaggcgtgcagctggagttcaacgtcgtcgagagcgcgacgacgacgtctccgaagaagacgtcgacgacgctgtgccaagaactcgcgtccgtgctgtccgacccgccgtcgctggggctaagggacggcgaggcggtcgtcgtgaactgccagagctggctccggcacgtcgcgccggacacgagggacctcttcctcgacacggtccgggcgctgaacccctgcctgctcaccgtcaccgacgaggacgccgacctgggctccccgagcctcgcgtcgcgcatggcgggctgcttcgacttccactggatcctgctcgacgcgctcgacatgtcggcgcccaaggacagcccgcggcggctggagcaggaggcggccgtcgggcggaagatcgagagcgtcatcggcgaggaagacggcgccgagcgctcggagcccggcgcgaggctcgccgagaggatgagccggaaagggttcgccggcgtcgtgttcgacgaggaggcggcggcggaggtgcgacgattgctgagcgagcacgccacggggtggggcgtgaagcgggaagacgacatgctggtgctgacgtggaaggggcacgccgccgtgttcaccggcgcttggacgcccaactag

SEQ ID NO: 12785 - DNA, 1482 bp, Oryza sativa
  Clone ID: TFbOSC401329j.C1.o80.fg
atggataccttcccgttccagtggcccatggatccagccgcgtcatccggcctcgacgctgggtttctgccgcctccagcggctgtggcgcccgacgacggcgtggggtactacgacccgcctgcgggggcggatgtggacgccgctgctctgccggagttcgccgcggccttcccgccgtgcgcgcctgatgctgccgctgctgtgttggccatgcggcgggaggaggaggaggtcgcgggcatccgcttggttcatcttctgatgagctgcgcgggcgccatcgaggctggtgaccacgcgctcgcgtccgcgcagctcgccgactcgcacgccgcgcttgcggccgtctcggccgcctccggcatcggccgcgttgccgtccacttcaccaccgcgctctcccggagattgttcccttcgcccgtcgctccgcctaccaccgacgccgagcacgccttcctctaccatcacttctacgaggcgtgtccctacctcaagttcgcgcacttcacggcgaaccaggccatcctcgaggccttccatgggtgcgaccacgtccatgtcatcgacttcagcctcatgcagggcctgcagtggccggccttgatccaagccctcgccctccgaccaggcggcccgccgttcctccggatcaccggcattggcccgccctcacctaccggccgcgacgagctgcgcgatgtcggcctccgactcgccgacctcgcgcgctccgtccgcgtccgcttctccttccgcggggtcgctgcgaacagcctcgacgaggtccgcccgtggatgctccagatcgcgcccggggaggccgtcgcgttcaactccgtgctgcagctccaccgcctcctcggcgacccggccgatcaggcgcccatcgacgccgttctcgactgtgtcgcctccgtccggcccaagatcttcacggtcatcgagcaagaggccgaccacaacaagacgggcttcctcgacaggttcacggaggcgctgttctactactccgcggtgttcgactcgctggacgcggcgagcgccagcggcggcgcgggcaacgcgatggcggaggcgtacctccagagggagatctgcgacatcgtgtgcggggagggcgccgcccggagggaacggcacgagccgctgtctcggtggcgggacaggctcacgcgcgccggcctgagcgccgtgccgctcggttcgaacgcgctgcggcaggcgaggatgctggtcgggctgttctccggcgaggggcacagcgtcgaggaggccgacgggtgcctcaccctcggctggcacgggcggccgctgttctcggcgtccgcctgggaagccgccggggacggcggcggcgacaataacaacaacagtaacagcaacgttagcggtagcagcggcagtgacagtaacaacagcggcagcagcaatggtaaaagcagtggggctcgggatggtagcagcgtgtgtttgtaa

SEQ ID NO: 12786 - DNA, 321 bp, Oryza sativa
  Clone ID: TFbOSC20530j.C1.o4.gp
tggcacccatgcggagtgagcaaagaggactcgccccatccatccctgcagcagccactgcccgtcctctcccagcagaaagtccttatggtggtacttgttcacctcttccctgattgtatcaacgatatctggtctcagtttcagctgctgcatgcctgcacggtggttcctggcctgccactgtctgtacttctcagggcgctccaccaggtctgcaccctcacaggcgatggcgttgagggcataaggccccagaacgttctgctccagcgccagccgcagcccactctcccttggggtggtggcgtccagcatgtc

SEQ ID NO: 12787 - DNA, 1728 bp, Oryza sativa
  Clone ID: TFbOSC100759j.C1.o3.fg
atggaggtgaccatggaggacgtggccggggacttcgagttctccggctgcggctccaccaccaccacctcctccgcgtcctccctcgacgacggcacggggatgtgctacgcgtggggcgagctgtccccggtcgccgactgggccaacttctgctgctccgacgacgacggcggccacgacctgcacggcctcatcgagtccatgctctgcgacgacacgctcgtcggcgtcgacgacgacggccaagctggcctccaccacgcggatatgttccgcgacgacctttactgctacggcaatggctccaacccgagcagcaccaccaccacgaaccctggctcgccggtgttcgacgacccgacgcagggctgccccgagaagggcctccggctgctccacctgctcatggcggccgccgaggcgctctccggcccgcacaagagccgggagctggcccgggtgatattggttcggctcaaggagatggtctcacacaccgccagcgccaacgccgccgcgtccaacatggagcgcctcgccgcgcacttcaccgacgcgctccaggggctcctcgacggctcccaccccgtcggagggtccggccggcaggcggccgccgcggcgtcgcaccaccacgccggcgacgtgctgacggcgttccagatgctgcaggacatgtcgccgtacatgaagttcggccacttcaccgcgaaccaggcgatcctcgaggcggtgtccggcgaccggcgcgtgcacattgtcgactacgacatcgccgaggggatccagtgggcgtcgctgatgcaggccatgacctcccgcgccgacggcgtgccggcgccgcacctgcgcatcaccgccgtctcccgcagcggaggcggcggcgcccgggccgtccaggaggccggccgccgcctgtcagcgttcgcggcgtccatcgggcaacccttctctttcggacagtgccgcctggactccgacgagaggttccggccggcgacggtccggatggtcaagggggaggcgctcgtcgccaactgcgtcctccaccaagccgcggccaccaccaccatcagacgccccaccggctcggtggcgtcattcctgtccggcatggccgcgctcggtgccaagctggtcacggtggtcgaggaggaaggcgaagccgagaaggacgacgacggcgactcggccggcgacgccgcggcgggcggcttcgtgcggcagttcatggaggagctgcaccgctactccgcggtgtgggactctctcgaggccgggttcccgacgcagagccgggtgcgcggcctcgtggagcgcgtcatcctcgcccccaacatcgccggcgccgtgagccgcgcgtaccgcggcgtcgacggcgaggggaggtgcgggtgggggcagtggatgcgcgggagcgggttcaccgccgtgccgctcagctgcttcaaccacagccaggcgaggctgctgctcggcctgttcaacgacgggtacacggtggaggagacgggtcccaacaagatcgtgctcgggtggaaggcccggcggctgatgtcggcgtccgtgtgggcgccgccgccgctgccggtgccgtcgtcgccgccggagggggtgtgccagcccgtcgtcgggatggcgccggtggccaccggtggcttcgcgcggacggagtttgactatattgattcgttccttgtcgagccagcttacgcgctagtttga

SEQ ID NO: 12788 - DNA, 1752 bp, Oryza sativa
  Clone ID: TFbOSC20525j.C1.o3.gm
atggctgccgcgccgaagccggaggaactcgtcgtcgccatcgagcagccattctccccgtcgctcttcctggacctgcccccgacgccgcaccacgatgacgaccccaacaatgtcaatgacgacctcctcctccccttcatctcacgcatcctcatggaggacgacatcgacgacaagttcttctaccagttccccgaccaccccgccctcctccaagcccagcagtcttacgcccaaatcctccatgcccctgccacatcttcttcctccgacgacaccaccatcaacaacaatacgaccaactccacctccgtccccgacacgctcgccatgcccgaccacgacgccgacacccagagcgcgccggacgacatggagatgctctacatggcgttcctcaagggcagggaggaggccaccaagttcctgcccacaaacaacaccctcttctctggcttcaaggcagagccggtgctggatattcaacccaccttcacgttcggaccaagcggcggcggcaggggccggaagaacaggcacgccgaggaggacgacctggagacggagaccagcaggagcagcaagctgatggcgccagaacatgacgacgccgccgccgccgacgagatattcgacgaaataattctcaatgggtaccagatgatcattaaggggatagatgagctgcgcgtcgccatgggcagccagagccaggccgacaagaacggccgaagagcgtcacgcgcgaagacggcggtggtcgacctacacaccctgctcatccactgcgcgcaggctgtggcgacgggagactggcggagcgccaccgagctgctgaagcagatcaagcagaactcgtcggcgagaggggacgcgacgcagaggatggcgtgctgcttcgctgaggggctagaggcgcgtctcgccggaacggggagccagatgtaccagtcgctcgtcgcgaagcgcacgtcgacggtggacttcctcaaggcgtacaagctgttcacggcggcctgctgcatcaagaaagtgagcgtcatcttctcgaacaagaccatctacaacgccgtcgccgggaggcgcaagctgcacatcgtcgactacggcctcagctacggattccagtggccagctttgttctttttgctgggagccagggaaggcggaccgccggaggtgaggatgaccggcatcgacgtcccgcagcctgggttccggccagccgaccagatcgaggagacaggccgccggctgagcatctgcgcgcgccagttcggcgtgccattcaagttccgcgccattgccgcaaagtgggagacggtccgccgcgaggacctccatctcgacccagaagaagaagaagaggaggtgctcgtcgtgaactgcctccatggattgaacaccctgcaagacgagagcgtggtcgtggacagcccgagccccagagacgtggtgctcgacaacatccgcgacatgaggcctcacgtgttcgtccagtgcgtcgtcaacggcgcgtacggtgcgcccttcttcgtgacgcgcttcagggaggctctcttcttctactcggcgcacttcgacatgtggacgccaccatcccgcgcgacaacgacgatcggctgctcatcgagcgggacatgttggggcgatgcgccctcaacgtcatcgcctgcgagggcgcagacagagttgatcggccggagacgtacaagcagtggcaggtgcgcaaccatcgcgccgggctga

SEQ ID NO: 12789 - DNA, 1758 bp, Oryza sativa
  Clone ID: TFbOSC1203j.C1.o6.fg
atggggccagccgcgccgccgtccgaagccgccgcggcggccgacgatgtggtgctcccgtacatctcgcgtattctcatggaggaggacatcgacgacgacatgttcttctgcctgtaccccgaccaccccgctctcctcgaggcgcagcagccgttcgcccagatcctctcctcctcctccggcatcgccggtgaggtgaacagtgcacccatggaggattctgctgccttgatgatgcaggggagcggcaatggtaggggacggaagggtagtaagcatggcggggacgagctggaggccgaggtgggcagggcgagcaaactgatggccacgccggaggaggaggacgacgacgacgatggcgtcggcgagatgttggagaagatgatgctcaacggggacgaggagatgaacgcgccacgcgtccccgcggagaaaaacggcgggaaggcggcgcggcggaagaggaggcagggcaagggggaggtggtggacctgcgcgagctgctcatgtcgtgcgcgcaggcggtggcatcgggcaaccgccggagcgccggcgaactcctggagcagatcaagcggcactcgtcgccgacaggggacgccaccgagcggctggcgcattacttcgccgacggcctggaggcgcggctggccggcgcggcgagcctggagcaccggctgctcgcgtccgcggaggagcgcgcgtcggccatggagttgctggaagcgtaccaggtgttcatggcggcgtgctgcttcaagtgggtggcgttcacgttcgccaacatggccatcctccgcgcggcggaagggaggagcaaggtgcacatcgtggactacggcggtcagtaccacggcctccagtggccatccttgctgcagcggctggcggagagggaaggcgggccaccggaggtgaggatgacgctcgtcggccacccgcagccaggtttccggccagcccgacggctcgagaggacggggcgccggctcagcaactgcgcgcgcgcgttcgggctcccattcaagttccgcgccgtggcggcggcgaggtgggagacggtcaccgccgaggacgtcgtcggcgtcgaccacgacgaggcggcggtcgtcgtgaacgacgtgctcagcctgggcaccctgatggacgagagcggcgtgttcgacgacccgagccctcgggacacggtcctcggcagcatccgcgacatgcgcccggcggtgttcgtccaggccgtggtgaacggcgcccacggcgcgcccttcttcccgacgaggttccgggaggcgctcttcttcttctcggcgctgttcgacatgctggacgcgacgacgccggaggaggggagccacctgcgggcggtgctggagagggacgtgctgaggcgggcggcggtgggggtgatcgccggggaaggggcggagcgggtggagcggccggagacgtacaggcggtggcaggcgaggaatcggcgcgcggggctgagacaggtggcggtggaggccgacgtggtggaggcggtgaggcgcagggtgaggaggcggcatcacgaggaattcgtgatcgaggaggatgcagggtggttgctgcaggggtggaaggggcgcatcctgtatgctcactcggcgtgggtcgtggcagaggatgcaactagcgttggagagctcacagtagtaacaacaagcttagtggcaataatcctttcagctgcttcagcacaagacgagcttccattgtccaccaatgaatga

SEQ ID NO: 12790 - DNA, 1479 bp, Oryza sativa
  Clone ID: TFbOSC400909j.C1.o3.fg
atgccgtacatggtaacagctgatggccattctccatcttctgcagacaattcctgctcagatgtggcaaaagactcaccattggtgtccaatgtatctcagcagaattctcagtctatatcagacaatcagagttctgaacttgaagtagagtttgatgaagatgatatcaggatgaagcttcaggagctggagcatgctttacttgatgatagtgatgacatcttgtatgagatttcccaggcaggtagcattaacgatgaatgggctgatccaatgaagaatgtcatactccctaactcaccaaaagaatcggaatcaagcatcagttgtgctggtagcaacaatggagaaccacggaccccaaagcagttgctctttgactgtgcaatggcattatctgattataatgtagatgaagcacaggcaatcataacggacctccggcagatggtctcaatccaaggggacccttctcagaggattgcagcctatctagtggaaggtcttgcagcaagaatagtagcttcagggaaaggcatatacaaggccttgtcgtgcaaagagcccccgactctttatcagctttcggcaatgcaaatcctctttgaaatctgcccgtgcttccgatttggtttcatggctgctaattatgctatacttgaagcctgcaaaggtgaagatagagtgcacattatagactttgacattaatcagggcagccagtacattacactgatacagtttctgaaaaataatgcaaataagccacgtcatttgagaataactggtgtggatgatcctgaaacggtacagaggaccgttggcggtttgaaggtcattggtcaacgtctagagaaacttgcagaggactgtgggatatcttttgagttcagggcagttggtgctaacattggggatgttacacctgcaatgctagattgttgtcctggggaagcactagttgtcaattttgcattccagctgcaccaccttcctgacgagagcgtttcaattatgaatgaaagggaccaactccttcgaatggtgaagggtctgcaaccaaagctcgtcacactggttgagcaggatgccaataccaatactgctccatttcagacaaggttccgtgaggtttatgattattatgctgcactttttgattcactggacgcgacacttccaagggaaagtccggatagaatgaatgtggagcggcaatgtcttgctcgtgaaattgtcaacatcttggcttgcgaaggtcctgatcgtgtggagagatatgaagttgctggaaaatggagggcaagaatgacaatggctggcttcacaccatgcccatttagtagcaatgtcatcagcgggataagatcgttactgaagtcgtactgtgacagatacaagttcgaggaggaccatgggggacttcacttcggctggggagagaaaactctaatcgtctcctccgcatggcaatag

SEQ ID NO: 12791 - DNA, 2964 bp, Oryza sativa
  unsure (1)..(2964): unsure at all n locations
  Clone ID: TFbOSC900004j.C1.o19.fg
atggcagcgcatacagtgacggacccactggaggagctatggaaccacacgatgtcgatggacaagacgcacctgatgtgcttctacccgagcaagatcaccatgggtggcgtctggacgggcgacaatccgctcgacttctccatacctctcctcctcttccagatcctcctcatcacctccaccacccgcgccgccaccctcctcctytytcctytccgtctccccacctacatctcccagatcctcgccggcttcctccttggcccctccgtccttggccacctccctcacttctccaacctcgtcttccccgtccgtagcctcttcgtccttgagtccatggcccttctcggcctcgtctactacaccttcatcgtcggcgtcgagatcgaggtctccgccatcacccgcgccggcatccgtagcttcggcttcgccattggctgcacgctcccgcccttcctcgtcggcgctctcaccggctacgtcgcgctcagcactgacgacaaacacaagggtgacacgttcctcaacaagctctccttccccatcttcctcggctccaccttctcctccaccgccttcgccgtcctcgcccgcaacatcgccgagctgaagcttgccggcaccgacgtcggccagctcacgctctctgcgtcactcatcaacgacaccttcgcctggaccggcctcaccgtcgccacggtgctcggccactcgcgctgcaccatcacgcagaccacgtggacgctcacgtcgggcgtcgtcatcttcggcgccagctacctcctgctccgccccatgctcctgcggctggcgaggcgcgccgccgagggggaggcggtcggcgaggaccgcgagtgctggattctgatcggcgtcatggtggcggcgctggtggcggacgcggggggcacgcacgccatattcggcgccttcgtgttcgggctcgcggtgcccaacgggccggtcggggtggcgctggtggagaaggtggaggacttcgtgcggcctccgcaccgacaccncaagatcaccaacatgcattctgccgtgttgctcatggtcgctgccatggtcgctgcggtcttgaaggtcgtcgccgcaatcggcgtcgccgaccaccaagaacaacaccacctcgccgcgcccatggtccgcaagcgccccgcctcggacatggacctgccaccgccgcgccgccatgtcaccggcgacctgtccgatgtcacggccgccgcggcgggcgcgccgacgttgtctgccagcgcgcagctccccgcgctgcccacgcagctcccggcgttccaccacacggacatggacctcgccgcgcccgcgccgccggcgccgcagcaggtggcggcgggtgagggtgggccgcccagcacggcttgggtggatggcatcatccgtgacatcatcgccagcagcggcgccgcggtctccgtcgcgcagctcatccacaacgtgcgtgagatcatccggccatgtaaccccgacctcgcgtccatcctcgagctccgcctccgctctctcctcaactccgaccccgcgccgccgccgccgccgccgtcgcatcctgctctcctccctcccgacgccacggcgccaccgccaccacccacgtcggtcgccgcgctccctccccctccgccagcgcagcccgacaagcggcgtcgcgagcctcagtgtcaggagcaggagcccaaccagccgcagtcgccgaagccccccaccgcggaggaaaccgccgccgccgccgcggccgccgcagcggcggctgccgcggccgccaaggagcgtaaggaggagcagcggcggaagcagcgcgacgaggagggcctccacttgctgacgctgctgctccagtgcgcggagtcggtgaacgcggacaacctggacgaggcgcaccgcgcgctgctggagatcgcggagctcgccacgccgttcggcacctcgacgcagcgcgtggcggcctacttcgcggaggccatgtcggcgcggctggtgagctcgtgcctggggctgtacgcgccgctcccgagcccgtccccggcgggcgcgcgggtccacgggcgcgtggcggcggcgttccaggtgttcaacgggatcagcccgttcgtgaagttctcgcacttcacggcgaaccaggcgatccaggaggcgttcgagagggaggagagggtgcacatcatcgacctggacatcatgcaggggctccaatggccggggctgttccacatcctggcgtcgcggccgggggggccgccgagggtgaggctgaccgggctgggggcgtccatggaggcgctggaggcgacggggaagaggctgtcggacttcgcggacacgctgggattgccgttcgagttctgcccggtggctgacaaggccgggaatctggacccggagaagctgggcgtcacgcgccgcgaggccgtcgccgtccactggctgcgccactccctctacgatgtcaccggctccgactccaacacgctctggctcatccagaggttggcgccaaaggttgtaacaatggtggagcaggatctgagccactcaggctccttcctggcacgttttgtggaggccatccactactattcggcactgttcgactcgcttgatgcgagttacagcgaggatagcccggagcggcatgtcgtggagcaacaactcttgtcgcgggagatccgcaatgtgctagccgtgggcggtccagcacgcaccggcgatgttaagtttgggagctggcgcgaaaagcttgcgcagtcgggcttccgtgtgtcgtcgcttgctggaagcgctgctgctcaggctgcactgctgcttgggatgttcccttccgatggatacacgcttattgaggagaatggcgctctgaagctcggatggaaggatctgtgccttctcactgcctctgcttggcgcccaattcaggcttcgggacgttag

SEQ ID NO: 12792 - DNA, 2026 bp, Oryza sativa
  Clone ID: TFbOSC12505j.C1.o1.np
cttactcccccccccccccccccaccgcctcatcctcttcaccacctccacccgcctcctcccgctcccgttccaccactcgctccgcctcgccccgtcgttctgcgcagcccgagccaacgagagcggcgagcaaccgctcgggcaaagcccgctcgaggccgagcagcagccgccgccgcagccgcggggaggggacggagggagcaaggacgccaccgccgtcgcgggggcctggcggggagggaacggggagagcgaggacgccgccgccatcgcgcacgcagctccatcgtttctcgttccccaacctcagctggggcaaccaccgcctcctccgctgctccaagaaccccgcctcatcgcctccacccgcggtgccggacaccccgtcgccggacaaggagaagaccgcccacagctccactgacggcgtcggcgtcggcagtttgcctcagcggggtccgcaacggccaccgatcgatcgctggtatccgagggggaggttttgtccgtcccctcgtcccccgcactgttcgcgctcgctcgcccgctgctctgctcgtctcttccaccatcaaatgatcacatgctgtccatcaactcacccccgtcgtctcgtgtgcgtgcagctttcccccacggcctcctgctgctgccgacccgacccgacctagcgtccctcgccatcgcgcgatcgtgagaaaaatcgggtgttattgtgtagtagaaaaaaaaaccggtcccgtcctttgattccctctgcctgggcgccgcccgctacgggacgcgagagcagctaccagcaacccgacaaaccgcacaggcggcctccccctcccgcgcgcgccagcgtacgggggaggaggaggaggcggcggcggagacgcgtgggctgcggctgcttagtttgttgctgaggtgtgcggaggcggtggcgatggaccagctgccggaggcgcgggacctgctgccggagatcgccgagctggcgtcgccgttcgggtcgtcgcccgagcgcgtcgcggcctacttcggggacgcgctgtgcgcgcgcgtgctgagctcctacctgggggcctactcgccgctggcgctccgcccgctcgccgccgcgcagagccgccgcatctccggcgcgttccaggcgtacaacgcgctgtcgccgctcgtcaagttctcgcacttcacggccaaccaggccatcttccaggcgctcgacggcgaggaccgcgtccacgtgatcgacctcgacatcatgcaggggctgcagtggccgggcctcttccacatcctcgcctcccgccccaccaagccgcgctcgctccggatcaccggcctcggcgcgtcgctcgacgtcctcgaggccaccggccgccgcctcgccgacttcgccgcgtcgctcggcttgcccttcgagttccggcccatcgaggggaagatcgggcacgtcgccgacgccgccgcgctcctcggcccgcgccaccacggggaggccaccgttgtgcactggatgcaccactgcctctacgacgtgacgggctccgacgccggcacggtgcgcctgctcaagagcctccggccgaagctgatcaccatcgtggagcaggacctcggccacagcggcgacttcctgggccgcttcgtggaggcgctgcactactactcggcgctgttcgacgcgctgggcgacggcgcgggggccgccgaggaggaggcggcggagcggcacgcggtggagcgtcagctcctcggcgcggagatacggaacatcgtcgccgtcgggggccccaagcgcaccggcgaggtgcgcgtcgagcggtggggcgacgagctgcggcgagcggggttccggccggtgaccctggccggcagccccgccgcgcaggcgaggctgcttcttggcatgtacccatggaagggctacactctcgtcgaagaggacggctgcctcaagctcgggtggaaggacctgtccctgctcaccgcctcgtcgtgggagccgacagacggcgacgccgacgcc

SEQ ID NO: 12793 - DNA, 326 bp, Oryza sativa
  Clone ID: TFbOSC20530j.C1.o8.gp
gattggcgcacccatgcggagtgagcaaagaggattcgtcccatccatccctgcagcagccactgcccgtcctctcccagcagaaagtccttgtgatggtacttgttcacctcgtccctgattgtatcaacgatatctggtctcagtttcagctgctgcatgcctgcacggtggttcctggcctgccactgtttgtacttctcagggcgctccaccaggtctgcaccctcacaggcgatggcgttgagggcgtaaggccccagaacgttctgctccagcgccagccgcagcccactatcccttggggtggtcgcgtccagcatgtc

SEQ ID NO: 12794 - DNA, 1353 bp, Oryza sativa
  Clone ID: TFbOSC415629j.C1.o8.gm
atggaggacgtcgatgagagggttgacctgcaccaaggggaggctgctcttcaggctgcagagaaacccttctatgatattcttggccagtcctgggaggcgacagagaagcccttctatgatattcttgggaaggcatacccatcttcatctaaggagacagcaattaacggtgacagtcaagcagattaccctgataatggtagcagcagttatcatgaacaggcatgtagtggtagctttgttagtgatctccttgggtcacaggatgcgcattcgataaccaccgactggtcttctgaatttgaccgtttggctttgcaattcaggagaggtgttgaggaagcaaagaggttcattccaaatattgaaaagttggtggatgatccagagaagaatggtctttatgcttgcaaacaaacaacagagacaacagaacagaagggcaagcatgagaacaaaataaggaatcatcctcatgatcctcatgttgagcacatagagttgatggaagcaaggaacagtaagcatatggccatctccactagtgaaacaatacgggatgaaatgtttgatagtattctgctctgcaataggcagctccctggtgaagttgctaaccttagaggaatgatggcaaaagaagcaagcgacaacccaaagaaatttcaaagcaaaggatatggaaaagggcaaaggaagccacacagtagtaagaagaaacagaaagaggcaatagatctcagtgttcttctcatccaatgtgcacaagcgatagcatctaacaaccatccctttgctagtgagctactgaggaaaataaggcatcacgctttgccagatggagatggttctcagaggctagcaaactgctttgcagatggcctcgaggctcgcttggctgggactgggagtcaaatcgacttgcaaatgaagaagggggtccacccaagcttaggatcacagggcattgcttcacggtgggaaaccgtacaaattgaggacctgaacattgacaaggatgaggttttcattcttggtgttgtgaatggattgtacagctccccattctttctgactagattcagagaggttttattccattactcatcactttttgatatgctcgacaacaatgttcctaggaaccatgaagcaaggatattggtagagaaggatctctttgggaatgatgcacttaatgctgtagcatgcgaaggtgcagaaaggattgagaggccagaaagctacaaacagtggcaaatgaggatcctcagggctgggttcaagcaacgtcctggatggaaggggaggataatacaggcactgtcaacatggaaagtggaaacctag

SEQ ID NO: 12795 - DNA, 2196 bp, Oryza sativa
  Clone ID: TFbOSC101577j.C1.o23.fg
atgggtctggacaacaatttcggggagctatctggcatgttctgtggcttgtcctatgatggctacacggatcacggcagccagagcgattacttcaggttcgccgacccgcagccggcgatcgtgccccagatggacgccggacccagctccgccgcttcctccacggcgtcgagggccgccgtcagctcggggaccgacaacccagaggactgggagttcatctcggacgagtcgctcaactatatcagccgcatgctcatggaggaggacattgatgagaaggtcagcatgtaccaggaggagtccgcggcgctccgcgctgctgcgaagccattctatgacattcttgggcacaagttcccgccctcccctgaccgccagctggtagcttggcccctcgacagcccgagtgagagtagcactagcagctatccacactccttggctagttctgttactagcagcaacattagtggtgcggtcgatagcagccaacgccgttatgttggacacagtgagtatcggagcttgtctggtcattcttctcaaccgccggttggcccatcaagtgatgttcgcaacgctatggagacactagaagatcctttgattagtaatggcaggatccctgagtatttgtttgagagctttccaacatgggatttcaggagaggtgttgacgaggcacagaagtttctcccgggtagcgataaggtagtgattgatttagaggctggtggtgttgcaaaacgtcaagaagcagggaaagctatttctctgaatgtcagcaaggcagaggttttgaaggtaaagaaaaacagacagagtgaagaccttgacgtgatggaaggacggaatagtaaacagtctgcattttgttctgatgaacctgattggattgagatgtttgatgttctgcttcgtcaaactgagaagaaggcaactgatcttcgaaaaatgatgcgttttgaggcttccaagaattctcaagttgctcagccaaaaggaccaagtgggacccgatcacggggacggaagccaactaagaaggatgtggtggaccttaggacgctactcatccactgtgctcaggcagtggcagctgatgaccgccggactgctaatgagttgttaaagcaaataaggcagcatgccaagccaaatggagatggctcccagagattggcgtattgctttgcagatggtcttgaggctcgcttggctggaacagggagccaactttaccataaacttgtggcaaaacggacaacagcctctgacatgctcaaggcataccatctttaccttgcagcatgcccattcaagaggctctcacattttctttcaaatcaaacaattttgagtttgacaaaaaatgcatcaaaggtgcatatcattgactttggcatttacttcggcttccaatggccgtgcctgattagacgtctcttcaagagggaaggtgggccaccaaagctgcgtatcacagggattgatgtacctcagccaggtttccgcccaactgagcgcatcgaagagacagggcagaggcttgcagaatatgctgagaagattggtgtcccttttgagtaccaaggcattgcatcaaagtgggaaacaatctgtgttgaggatctcaatattaagaaagatgaagtagtgattgttaattgcttgtatcggttcagaaatcttattgatgaaacagttgccatagacagtcctaggaatagggtgctcaataccataaggcaagtgaacccagcaatttttatccatggcattgtgaatgggtcgtacagcgttcccttcttcatcacacggttccgtgaggcattatttcatttctctgcattatttgacatgctcgagacaactgtgccacgggatgatgcccagcgtgcactaattgagagagatctatttggccgggaagcactcaatgtgattgcatgtgaaggctcagacagggtcgagagaccggagacatacaaacagtggcaagtgaggaatctgagagctggatttgtccagtctccattaaaccaagacattgtgctgaaagccaaggacaaagtgaaagacatctatcacaaagactttgtcattgatgaagacagtgaatggctccttcaagggtggaaaggaaggataatctatgccatatctacatggaagcctaataacaattag

SEQ ID NO: 12796 - DNA, 1488 bp, Oryza sativa
  Clone ID: TFbOSC401401j.C1.o8.gm
atgtcggtttgggagggaggaaccgacattgggcggtcaagccagcaagctggctcttcggctagcggccaaaacgcttcttcttcttcattcaccctgacttcgcccggcctccgcccgcccacccacgcggcctcaacgccgccgccgccgccatggctcgacgacgccgaccaccaccacgacaacgccttcctccactgggtcatcaacgaccaccaccatccactccttgatcttgatgacgtcgacctcgactacgctaagcctgcacctttcttcttcgctgatcgaggcctgcaccaccaccacccagcttcttcgtctttcccaaacccaaagccgacggccgacgacaacactagtactgtggagcagctggtccaggccgccaaactcaccgaggccggcgacgtcttggccgcccgacacatcttggcgcgcccggcgatcaactaccgcctccccgcctccgccgccccgccgctactccgctccgccttgtatttcaaggacgccctgcgccgagccctcatctccgacgacgactcctcctcctcctctacaccgcccccgcccctccacgagccgcacccgcacgacctcctcctcaagctcacctcctacaagtccttctccgacctctccccgctgctccacttcgcccacttcacctgcgtccaggccgtcctcgacgagctcgcaccctccgcctcctgcatccacctcctcgacttcgacatcggtgtcggcgagcagtgggcctccctcatgcatgacctcgcccaccgccaccccggcgtcgccctcaaggtcaccgccctcaacgtcaccgcctcctcctcctcccatcacccgctccagctgcagctcatccacgacaccctctccaccttcgccgccgacctctccgtccccttccgcttcgccgccttcaacctcgacgccaccgacctcaccccccttcttgccgttgccgccgccaccgacgccattgccgtccaccttcccgtcggctcggtccacgccaccgcagtgccgtccgtgcttcacctggtcaggcgccttggcgccaagctggttgtctccgtggaccgcggctgtgaccgcggcgagctgccgttcgcggcgcacctgctgcaggcattgcgctccaccgtgtccctgctggagtcgctggacgccatgggcacggactccgacgtggcggccaagatcgagcggttctgggtccagccaaagatccaagagtgcgtgcgcgccgccgtgggggtggggggcgacaagacggcggcgtcggcgtggcgggcgacgctggcgtcggcggggttcgtgccggtgcaagtgagcagcatggcggaggcgcaggcggagtctctcctgaagaagctgccggtgaggggattccgactggagaggcgcgccggctcgctcttcctccattggcaacgcggggagcttgcctccgtctccgcatggcgctgttaa

SEQ ID NO: 12797 - DNA, 1806 bp, Oryza sativa
  Clone ID: TFbOSC401196j.C1.o71.np
atgcaggacgcgctgctggggcggcgctgccagcggcgggcaggagccgggagccagcggcggtgggacagcgggcgggcgaggatcggatcccctttgcgagctcgcgacttcgagacggcggcgggcagcggagacggcggcgagcggcggagacgagggcgtggcgcggcggccctcgagcggtggagatgttgggagtggcagcagcccgattccctagctgctgccgcttccgccctagatgagctcgacgtgtcgagcaagacgttgttgggcttgacgtcgccgtgcacgaccggcggcttgacgacggagtggaggataggagtactctacatgctgcctatgatcaatattgccctcatgtcctcctcctcttgccatccccacaaccccaccaccctgccgctgccggagccggacagcagcaagtcgccggagcccacctccgtgctctacaaccgcagcagcccgagcacctccctcggctcctgctcctccaaaccaccggaggaccctcctccccccatcgccgccgacgacgactgcgactgggacgccgtcgtcgacatgcacatgcacatgctcgcccccgcccccgcccccgactcctccttcctccgctggatcatggataccggctatgccgacgccgacacctttcccgaccacccctccttcgactccgacctgctccaactccccatgcccatgccctctgaccatcctcctcagccgctcgtcgacgacctcctcgacgccgcacgcctcctcgacgccggggactccacttccgctagggagatattggcgcggctcaatcatcgcctcccctctcttccgtcgcctccgggccatgcccaccctccgctcctccgcgccgccgccctcctccgggacgcgctcctcccgcccaccgccctccccgtctcctctactcccctcgacgtcccgctcaagctcgccgcgcacaaggccctggcggacgcctccccgaccgtgcagttcaccaccttcacatccacgcaggccttcctcgacgcgctcggctccgcgcgccgcctccacctcctcgacttcgacgtcggcttcggtgcccattggccgcctctcatgcaggagctcgcgcaccactggcgccgcgctgctgggccgccgccgaacctcaaggtgaccgcattggtgtcgccggggtccagccacccactcgagctccacctcaccaacgagagcctcacgcgcttcgccgccgagctcggcatcccgttcgagttcaccgccctcgtgttcgaccccctcagcagcgcgtccccgcccttgggactctcggccgcgcccgacgaagcggtggccgtccatctcacggccggctccggggccttctcgccggcgcccgcgcacctccgtgtcgtgaaggagctccgccccgccgttgtggtgtgcgtcgaccacgggtgcgagcgcggcgccctcaacctcctgcagtcttgcgcggcgctgctggagtctctggacgcggcgggcgcgtcgccggacgtggtgtccaaggtggagcagttcgtcctgcggccacgggtggagcgcctcgcggtcggcggcggcgacaagctgcctccgccgttgcagtccatgttggcgtccgcggggtttgcggcgctgcaggtgagcaatgcggcggaggcgcaggcggaatgcctgctgaggcgcacggccagccatgggttccatgtggagaagcggcaggcggcgctggcgctgtggtggcagcggtcggagctcgtctcggtgtcagcgtggcgatgc

SEQ ID NO: 12798 - DNA, 1419 bp, Oryza sativa
  Clone ID: TFbOSC400553j.C1.o7.fg
atgcagttcacgcacaccgcgccacctccaccgcctctgcaccctaatgggcatggactagggttagggttgtaccttgacgtcggcgcgacgaggggaggaggaggagcgcggccgtggtcgtcgtcgtcgtcgacgacgacgttgggtgggagcggctacttcccgtcgtcggcggcggcgtcgaagatctcgttggggaacctcaacagcacgggctgcatggagcagctgctggtgcactgcgccaacgccatcgaggccaacgacgccacgctgacgcagcagatcctgtgggtgctcaacaacatcgcgccggcggacggggactccaaccagcggctcacagcggcgttcctgtgcgcgctcgtgtcgcgggcgtccaggaccggggcgtgcaaggcggtgaccgcggcggtagcggacgccgtcgagtcggcggcgctccacgtgcaccggttcacggccgtcgagctcgccagcttcatcgacctcacgccgtggcaccggttcgggtacacggcggccaacgccgccatcgtcgaggccgtcgaggggttccccgtcgtgcacatcgtcgacctcagcacgacgcactgcatgcagatcccgacgctcatcgacatgctcgccggccgcgccgaggggcccccgatcctccgcctcaccgtcgccgacgtcgcgcccagcgcgccgccgccggcgctcgacatgccctacgaggagctgggcgcgaagctggtcaacttcgcgcggtcccgcaacatgtccatggacttccgggtggtgcccacctcgccggccgacgcgctcacgtccctcgtcgaccagctccgggtgcagcagctcgtctccgacggcggcgaggcgctggtcgtgaactgccacatgctcctccacaccgtcccggacgagacggccggctcggtcagcctgacgacggcgcagccgccggtgtccctccgtaccatgctcctcaaatctctccgggcgctcgacccgacgctggtggtggtggtggacgaggacgccgacttcaccgcgggcgacgtggtggggcggctgcgtgcggcgttcaacttcctgtggatcccgtacgacgccgtggacacgttcctccccaaggggagcgagcagcggcggtggtatgaggcggaggtggggtggaaggtggagaacgtgctggcgcaggaaggggtggagagggtggagcggcaggaggacaggacgaggtggggccagcggatgcgcgccgccgggttccgcgcggcggcgttcggcgaggaggccgccggcgaggtgaaggcgatgctgaacgaccacgcggccgggtgggggatgaagcgggaggacgacgacctcgtgctcacgtggaaggggcacaacgtcgtgttcgcctcggcatgggcgccgtcctga

SEQ ID NO: 12799 - DNA, 2260 bp, Oryza sativa
  Clone ID: TFbOSC402781j.C1.o4.gm
cccggggcgcctctcttcgaggacttgcaaacgcttgctgcaaggattggatcctctggcttctgttgatttggggagcttttcatcgtctcgaccgaacggccagccgccgagatcgaggaaggaggagatcgaagggcagagtgatttggcagcggtggacatggatgtgaggtttgggcccgaggagcagatcgtgtggccggcttctgttcttgctgggatcctcatgtgcgcagcggtatatgatataactcgtgaagttagctcccggtgctacaagggttataatggactgaatgaattgcacaaacttgagtggaacaacaggggattctctaccttccacgcattagttgctgctgtagtctctttttatctgctggtgatatctgacctcttcagtaaggacgtccatggtgccatcataattgatcgaaaatcatggatgtctgatgccatgtttggtgtatccctgggctacttcttgacagatttgttgatgatcctctggcatttcccttctctaggaggaaaggaatatctcttgcatcatggattgtccatgtatgcaatctctcttgctctgttgagtggcaaaggacacgtgtacatcctcatggtcctcatcactgaagcaaccacacccttcgtgaacctcagatggtaccttgatcttgcaggccggaaggactccaagctttacctgtacaacggggtggcactgtttgctggatggctggttgctcgcgtcatactgttcgtatacttcttcgctcatgtgtaccttcacttcgaccaggtgaggacggtgttcccgctagggttctacagtatgatggcggtgccgccggcgatgtcggcgatgaacctcctctggttccggaagatctgcaaggggatggtcaaggccatgtccagcgccaaccgaaccaatgagggttgcgccggcgaggacgactcgccggagttcgtcgagccgccggcggcggcggcggcggccgggacgttcgagcaacggccggagttaggagcgtgcaaggaggtgtactccgaggaaggcggcgcggcggaggagaggacgggcgtggcgatggcgggggccgacgtcgaacaggtggcggtggaggatgaggaggaggctcacggcgtgcggatgatcgcgctgctgatggagtgcgcggcggcgatgtcggtgggcaacctcgcgggcgccaacggggcgctgctcgagctgtcgcagatggcctcgccgtacgcggcgtcgtgcggcgagcggctcgtggcctacttcgccagggccatggcggcgcggctggtggggtcgtgggtcggcgtcgtggcgcccatggcgccgccgccgtcgtgcggggccatcaacgccgcgttccgggcgctgtacaacgtcgcgccgttcgcgcggctcgcctacctggcgtgcaaccaggccatcctcgaggcgttccacggcaagcgcctcgtccacattgtcgacctcgacgtcgtccccggcggcgcgctgcagtggctctcgctcctcccggcactggcggcgcggccgggaggcccgccggtgatccgcgtcaccggcttcggcatgtcggcgtcggtgctgcacgacaccggcaaccagctcgccgggctggcgaggaagctgtgcatgtttttcgagttctacgccgtcgcgaagcgaccgggagacgccgacgcggtcgccgacatgcccggaaggaggccgggggaggcggtggccgtgcactggctgcgccacgccatgtacgacgcggccggcgacgacggcgcctccatgcggctggtgcggtggctggagccggcgcggttcgtctccgcgctgcaccactactcggcggtgttcgacgccatgggcgcgtcgcggccggacggcgaggacgcgagcaggcatctggcggagcacggcgtgctcggcagggagatcgcgaacgtgctcgccgtcggcgggccggcgcggagcagcggccgggaggggcccgggagctggcgggaggtgctcgcccggcacgggttcgcgcacgccggcggcggcggcggcgggcgcgcgcagctggtggccgcggcgtgtccgggcgggctgggctacacggtggcgggagaccacgacggcacggtgcggctggggtggaagggcacgccgctctacgcgccccaagaaatgaagaacggcctgagttggatagttgcatcaaagacttcaggaaataagatgagctatggatcttga

SEQ ID NO: 12800 - DNA, 1782 bp, Oryza sativa
  Clone ID: TFbOSC20530j.C1.o3.fg
atggccaacccagaggatttcttttgggaggccctcctcaaggagaacgaagcaccatccccaccacctgtcttctttgacctccccgcaacacccctctccaacagtgatggcacagatccctcatcattggacaaccaacttctctcctacgtctctcgtatgctcatggaggatgagatgggttcttctgctgctatcaccaacttgcagtgtgtcaacaggggcagcacagaggaggccaacaatatgttgccgggcagtgaagtggttagggtgttctcgaagggcatgggagaggccagcaagttgttgcccagaaacaacagcttcagaacgctggagacggtggatcaagtatcaagtgatggtcattgtaggggacgaaagaagaaaaaccatgacagggacgagcagcagctggaggaggaactggggaggaccagtaaattagctgccttgacgattgcagggacacaggaggctggtgctcgcgagttgctggacgaactgatgctgcacgcacacgagacatgcatcaaagacatggagaagctgcgtatcgacatggacaatgaggcagagaagaagatcaacaagaaggacaagaaaggcagtagtagcaaggtggtggacttacggttgctgctgatccagtgtgcacaggccatggcgacagacaaccagcaatctgcaggcgagctgctgaagaagatcaagcagcacgctttggcaacaggcgacgccatgcagcgagtggctcactacttcgccaaggggcttgaggcacggctagctggcagcgggaagcatctgtatcagaatcatgtgcgcatgtcgttggtggagtacctcaaggtgtacaagctctacatggcagcctgctgcttcaagaaggtggcgctcatgtttgctgccatgacaatcatgcaagctgtgcaagggaagaagaggctgcacatagttgattatggcatacgctgtgggctgcactggccagacctgttccgccggctggggagcagggaagacgggccgccagaggtgaggatcaccatcgttgacatcccccagcctgggtttcgtccatttcagcgtattgaggcggcagggcattgcctgagcagctgtgccaatgagttccgcgtgccattcagattccaagctgttgtagcagcaaagtgggagacggttggtgccgaggacctgcacatcgagcctgatgaggtgcttgtggtgaatgacctctggagtttcagtgctctgatggacgagagtatcttctgcgatgggccaaaccccagggatgttgccctccgtaacatcagcaagatgcagccagacgtgttcatccaaggcatcatcaatggtggctatggtgcctccttcctgtcacgctttcgtggagcgctcttgtattactcggctctgtttgacatgctggacgcgaccaccccaagggatagtgggctgcggctggcgctggagcagaacgttctggggccttacgccctcaacgccatcgcctgtgagggtgcagacctggtggagcgccctgagaagtacaaacagtggcaggccaggaaccaccgtgcaggcatgcagcagctgaaactgagaccagatatcgttgatacaatcagggacgaggtgaacaagtaccatcacaaggactttctgctgggagaggacgggcagtggctgctgcagggatggatgggacgaatcctctttgctcactccgcatgggtgcgccaatcacaagacacttcctccggatga

SEQ ID NO: 12801 - DNA, 650 bp, Oryza sativa
  Clone ID: TFbOSC20530j.C1.o3.gp
agagcactgaaactccagaggtcattcaccacaagcacctcatcaggctcgatgtgcaggtcctcggcaccaaccgtctcccactttgctgctacaacagcttggaatctgaatggcacgcggaactcattggcacagctgctcaggcaatgccctgcctcctcaatacgctgaaatggacgaaacgccggctgggggatgtcaacgatggtgatcctcacctccggcggcccgtcttccctgcttcccagccggcggagcaggtctggccagtgcagcccacagcgcgggccgtaatcaactatgtgcagcctcttcttcccttgcacagcttgcatgattgtcatggcggcaaacatgagtgccaccttcgtgaagcagcaggctgccatgtagagcttgtacaccttgaggtactccaccaacgacatgcgcatctgattctgatacagatgcttccctctgccagctagccgtgcctcaagccccttggcgaagtagtgagccactcgctgcatggcgtcgcctgttgccaaagcgtgctgcttgatcttcttcagcagctcgcctgcagattgctggttgtctgtcgccatggcctgtgcacactggatcagcagcatcccatcagttcgtccagcaactcgcga

SEQ ID NO: 12802 - DNA, 1860 bp, Oryza sativa
  Clone ID: TFbOSC416737j.C1.o10.fg
atggagccaggcgcgccgtggcgcgatccgcgccaggggtacctgtatggcgtcggatcggcggtgcagatgccgatgcagcagcgctccgacgcggccgcggccggcggggtgctcaagaggagcctcggcgacatggagaggtggcagcagcaccagcatcagcagcgacagattgcgatgcagcagcagctgtacctgcgaaccgtgaggcagcgcacggccgcggcgtcggcggccgtctcgccgctcacctcggcggatatcgcggctgttctaggcgggccaccgtcccagcctctggttctatccgggtccagcatgggaggggccttcggatcgccgtcgtcgacgctgtcgtccatcaccaccgcgtccagggcggtggcgatgccgctcatgcagccacagctgcagcggcagcagcaggtgacatacatggcgtcctcgccacaggttcaggcctttggaacggcgagggcgctgcctccagcgccggcgacgagcgacctgtccatcctgcaggagctcgagaagcagcttctcggagacgacgatgaggtggaggccgcgatgagcgggaccggctccgcggtcaccgggtccgagtgggaggagcaactcaactccatcaccgcggcgccgtcgcccccacttactgcggcgacgaccccgaacaacaacaataacgccgtgggtatgacgcggtcgccctcgaactcgtccacctccacggcgtcttcctcggcttcctgttcgccgccgacctcggccaccacgtcgcggcaactactctccgaggcggcggctgccatcgccgacggacacaatgaaacggcggccactcatctgaccgccctcaagcgcgcggcgaactcacgcggcgacgtggagcagcggctggttgctatgatggtggcggcgttgtcctcccgcattggtcagaccgcctcagtcccggacatctgcggcggcgagacgcgcgccgggtcccaactcctccacgacatatccccgtgcttccgcctcgccctccacgctgcaaacgtggccatcgtcgacgccgtcggcgaccaccgcgccatacacctggtggacttcgacgtcagtgccccgcagcacgccgacctcatcaggtgcctcgctgctcgccggttgcccggaacctccctgaaggtcaccgccgtcaccgatcccgcctcaccattcacgcagtctgtaacagcaacactccacctccagaagctcgccgagcgagcgggcatagattaccggttcaaaatggtgagctgcagagcaggggagatagaagcatccaagctggggtgcgaggccggggaggcgctggctgtcaacctggcgttcgcgctctcccacgtccccgacgagagcgtctcgccggcgaacccgcgcgacgagatcctccggcgggtgcgcgccctcggcccgcaggtggtggccctcgtggagcaggagctgaactccaacacggccccgctgaccacgcgcttcaccgacgcgtgcgcgcactacggggccatcctggagtcgctggacgccacgatcccccgggagagcgcggagagggcgcgtgctgaggcggcgctgggcgggagggcggcgaacgcggtggccagggaaggcgccgaccggctggagcggtgcgaggtgttcggcaagtggcgctcccggttcggcatggcgggattccggccggtggcgctcggaccgggcattgctgaccaggtgttggcccggcagggccccgtcgcggcagggttcgccgtcaaggcggagaacggcgtgctccggctcggatggatggggcgcgtggtcaccgtcgcctccgcctggcgttag

SEQ ID NO: 12803 - DNA, 1236 bp, Oryza sativa
  Clone ID: TFbOSC405105j.C1.o1.fg
atgctccggtcactccactcctcgtcgtcttctgacacggataacaacagcggtggctgcaagaacaatggcggcggcggtggcgaggccgccgccgccgttgagggtggcggtgatcagcgtgccgttgcggcggcggcgccgtcgacgcgggacttgctgctggcgtgcgcggacctgctgcagaggggggacctgccggcggcgaggcgagcggcggagatcgtcttggcggcggcggcgtcgccgcggggcgacgcggcggaccgcctggcgtaccacttcgcccgcgcgctggcgctccggatcgcgccgttcctgcgtttcgcgcacctcacggcgaaccaggccatcctcgaggccgtcgacggcgcgcgccgcgtccacatcctcgacctcgacgccgtccacggcgtgcagtggccgccgctgctgcaggccatcgccgagcgcgcggacccggcgctcggcccgcccgaggtccgcgtcaccggcgccggcgccgaccgtgacaccctcctccgcaccggcaaccgcctccgcgccttcgcccgctccatccacctccccttccacttcaccccgctcctcctctcctgcgccaccacggcgccccaccacgtcgccggcacgagcaccggcgccgccgccgccgcctcgaccgccgccgccgccactggcctcgagtttcacccggacgagacgctcgccgtgaactgcgtcatgttcttgcacaacctggccggccacgacgagctcgccgcgttcttgaagtgggtgaaggccatgtcgcccgccgtggtgaccatcgccgagagggaagcaggcggcggcggcggcggcggcgaccacatcgacgacctgccgcggcgggtcggggtggccatggatcactactcggcggtgttcgaggcgctggaggcgacggtgccgccggggagccgggagcgcctcgccgtggagcaggaggtgctgggccgggagatcgaggccgcggtggggccctccggcggccggtggtggcgcggcatcgagcggtggggcggcgccgcccgcgccgcggggttcgcggcgcggccgctcagcgcgttcgccgtgtcgcaggcgcggctgctgctccggctgcactacccgtcggagggctacctcgtgcaggaggcgcgcggcgcctgcttcctcgggtggcagacgcgcccgctgctctccgtctcagcgtggcagccgtcgtcgtcgtag

SEQ ID NO: 12804 - DNA, 1599 bp, Oryza sativa
  Clone ID: TFbOSC400032j.C1.o10.fg
atgggcatgtcccctgagccatgcaactccatctcagactgttcccagcagcagagccatcatctgactctgacacagcaacaagattcaacgattatttgtactaatcaagaacttgattattactaccgattctacgacgtggacgaagcggcgtttgatggcaacgaggtagagctcgtctccaggttctccaaggtcaccaggatggaccacatgatcagctcgccgtatcagccgacgtggtcgccggcacaggccgccgtcgacgtcgtcgggtcgtcggagacgtcgcgcgtcaggaagaagaggttctgggacgttcttgagagttgcaagcagaaggtcgaggccatggaggctatggacacaccggcgacggcgacgttccgggtcggtgccggtgatggcggcggcggcggcgggggtggcgcaggaggaggaggaggaggagctgacgggatgcgtctcgtgcagctgctggtcgcctgcgccgaggcggtggcgtgccgcgaccgcgcgcaggcggcggcgctgctgcgcgagctgcaggccggcgcgcccgtgcacggcacggcgttccagcgcgtcgcgtcgtgcttcgtgcaggggctcgcggaccggctgccgctggcgcacccgccggcgctggggccagcgagcatggcgttctgcatcccgccgtcgtcgtgcgcggggcgcgacggcgcgcgcggcgaggcgctcgcgctggcctacgagctgtgcccgtacctgcggttcgcgcacttcgtggcgaacgcgtgcatgctggaagccttcgagggagagagcaacgtccacgtggtcgatctcggcatgacgctgggcctcgaccgtggccaccagtggcgcggcctcctcgacggcctcgccgcccgcgccagcggcaagccggcgcgcgtgcgggtcaccggcgtcggcgcgcgcatggacaccatgagagcgatcgggcgggagctcgaggcgtacgcggaggggttagggatgtacctcgagttcagaggcatcaaccgtggcctcgagagcctccacatcgacgacctcggcgtcgacgccgacgaggccgtcgccatcaacagtgtcctggagctccactccgtggtgaaggagagccgcggggcgctcaactcggtgctccagaccatccgcaagctgtcgcccagggcgttcgtgctcgtcgagcaggacgccggccacaacgggccattcttcctcggccggttcatggaggcgctgcactactacgccgcgctgttcgacgcgctcgacgcggcgctcccgcgctacgacgcgcggcgggcgcgcgtcgagcagttccacttcggcgcggagatccgcaacgtggtcgggtgcgagggcgcggcgcgcgtggagcggcacgagcgcgccgaccagtggcgccgccgcatgagccgcgcggggttccagtcggtgccgatcaagatggcggccaaggcgcgggagtggctggacgagaacgccggcggcggcgggtacacggtggcggaggagaaaggctgcctcgtgctcggctggaaggggaagccggtcatcgccgcctcgtgctggaaatgctag

SEQ ID NO: 12805 - DNA, 1483 bp, Oryza sativa
  Clone ID: TFbOSC29408j.C1.o10.gm
atatgcgtccgacacacagctgttccgttatgggcctgaaccatacaatcctgagaactccttttacaatcaacaggcctcaccaatgccgtacatggtaacagctgatggccattctccatcttctgcagacaattcctgctcagatgtggcaaaagactcaccattggtgtccaatgtatctcagcagaattctcagtctatatcagacaatcagagttctgaacttgaagtagagtttgatgaagatgatatcaggatgaagcttcaggagctggagcatgctttacttgatgatagtgatgacatcttgtatgagatttcccaggcaggtagcattaacgatgaatgggctgatccaatgaagaatgtcatactccctaactcaccaaaagaatcggaatcaagcatcagttgtgctggtagcaacaatggagaaccacggaccccaaagcagttgctctttgactgtgcaatggcattatctgattataatgtagatgaagcacaggcaatcataacggacctccggcagatggtctcaatccaaggggacccttctcagaggattgcagcctatctagtggaaggtcttgcagcaagaatagtagcttcagggaaaggcatatacaaggccttgtcgtgcaaagagcccccgactctttatcagctttcggcaatgcaaatcctctttgaaatctgcccgtgcttccgatttggtttcatggctgctaattatgctatacttgaagcctgcaaaggtgaagatagagtgcacattatagactttgacattaatcagggcagccagtacattacactgatacagtttctgaaaaataatgcaaataagccacgtcatttgagaataactggtgtggatgatcctgaaacggtacagaggaccgttggcggtttgaaggtcattggtcaacgtctagagaaacttgcagaggactgtgggatatcttttgagttcagggcagttggtgctaacattggggatgttacacctgcaatgctagattgttgtcctggggaagcactagttgtcaattttgcattccagctgcaccaccttcctgacgagagcgtttcaattatgaatgaaagggaccaactccttcgaatggtgaagggtctgcaaccaaagctcgtcacactggttgagcaggatgccaataccaatactgctccatttcagacaaggttccgtgaggtttatgattattatgctgcactttttgattcactggacgcgacacttccaagggaaagtccggatagaatgaatgtggagcggcaatgtcttgctcgtgaaattgtcaacatcttggcttgcgaaggtcctgatcgtgtgaaaagcgggataagatcgttactgaagtcgtactgtgacagatacaagttcgaggaggaccatgggggacttcacttcggctggggagagaaaactctaatcgtctcctccgcatggcaatag

SEQ ID NO: 12806 - DNA, 1419 bp, Oryza sativa
  Clone ID: TFbOSC10722j.C1.o5.fg
atggtgctagattctaatgagttgcatcaacatgatgctcctgatgttgatgtgtctattaattgtgatgatagaatttttggccaagagagtgtcaacttggcagcaatccaagaggagctcttggaggaggacagtttaagcgacctcctccttgctggtgcagaggcggtcgaggcaggagattcaatccttgcatcagtagcattctcgaggcttgatgacttcctgtctgggatacctgaaaatggagcagccagttctttcgatcgattggcataccactttgaccaaggtctgcgttcccggatgtccagtgcatccactgggtgttatcagccagagccacttccatctggtaacatgttggtgcaccagatcatacaagagctatcaccatttgttaagtttgcacacttcactaccaatcaggccatcctagatgccatcattggtgacatggatgtccatgtcgtcgacttgaacatcggcgagggcatccagtggtcatcactcatgtcggaccttgctcgctgtggcggtaagtccttcagactaacagctatcacaacatatgctgactgtcacgctagcactcatgacacagttgtacggctgttatcggagtttgccgactctttggaacttccatttcaatacaattccatctgtgttcacaatgaggatgaactgcatgccttcttcgaggactgtaaaggctcagtgattgtctcatgtgatacaacaagtatgtattacaagtcactaagcacattgcagagtttactgcttgtctgtgtcaagaagctacagcctaagctagtggtcaccatagaagaggacctagttagaattggaagaggggtatctccatctagtgcctcctttgtcgagttcttcttcgaggcattgcatcacttcaccacggtgttcgagtcaatggcgagttgcttcattggtagtagttatgaaccatgcctgagacttgtggagatggagttgctggggccaaggatacaggattttgtggtgaagtatgggtcagtgagagttgaggccaatgcttctgaggttttggaagggtttatggcttgtgagttgagtgcttgcaacatagctcaggccaggatgctagttgggctgttcaacagggtgtttggggttgtgttcaagaagataagtttgttaatggtctactatatctccttagggaaaaatgatttgagagagccaaataaggtcatctggtcaagtttggctgctggatgcgggagtcatggaattgttgtacttgccttctatgctgctgacaagctgcttgagttcaagccaaaagggattgaaacttatatccatcctgctgttgaacgtgcacatttccacaaagaagacagaatgtggcaagagtacgaaaactga

SEQ ID NO: 12807 - DNA, 2433 bp, Oryza sativa
  Clone ID: TFbOSC1192j.C1.o3.fg
atgatgcatgggctatgggtgcaagatcagggtgtggtggatcacttagcgcagctcgtccctctcttgcatgagtgtgcttcccatgtaactgagggatcttttgagaaggctgacttcagctttaagaagatcagaatgctcaccatagctgacgggccattgcagcgcctatccacgatcattgttgacagcctagctcaccgccttctctcctccatccagggccttcctggtgcccttatcgatccatctgattactttgagaagtcaaccctccgggctgcacgccacaacttcttcaagctgaacccctacctaagcaccggttttgtcactattaactgggccattatggaggcaatggaggatgaaaagtcattgctatctaagaaagctgaatctcttggggtgtccttccattttatttctgtgataggcagacttgagaccttggatttcagcaatctccgtagcacctttcagataaaatttggtgtggcagttgcaatcagctgcgctctacaaatgcatcgcctcctcttggttgatgacaatttgagctccaccagcattgctcagctccagaaaatggccaacttcactcagcctaagcaaatggccagctctgtgtgcagcccagcctccacactgaactatctgcagacaccatcccctcgtacaccaaaattgctggcaagattactgtctgccatccgagcgctcaagccaaacatcatgttgattatggagcaagatgcagaccataacaccctgctgttccgtgatcggttcaatgaggtactcaactactatgctgccctctttgactgcttccatgcagtggctgcagctaacccagggaggactgatgaacgcttacgtgtggataggatgatcctgagggaagagattaaaaacatactgttgaggctgtgctgcacggacaggggcatgttccaggacgacatgctgtcgtcggcgacgtcatcgccggcgtcgtcggtgtactcgccgtcgccgtcgccgtcgaacgggtcgtgggtgcaggagctgagccatgaccagcagagcgttcggctgatcggcctgctttaccagtgcgccgccgaggtgtccgccggctccttcgaccgcgccaacctctgcctcgagcacatcacgcagctcgcgtccctggacgcgccgcacgcgctccagcgcctcgccgccgtcttcgccgacgcgctcgcgcgcaagctgctcaacctcatcctgggcctctcgcgcgcgctgctgtcgtcggccaactccgccgacgcccacctcgtccccgtcgcgcgccgccacatgttcgacgtgctcccgttcctgaagctcgcgtacctgaccaccaaccatgccatccttgaggcaatggagggggagaggttcgtccacgtcgtcgacttctccggcccggcggcgaacccggtgcagtggatcgcgctgttccacgcgttccgaggccgccgggaaggcccgccgcacctccgcatcaccgccgtccacgacagcaaggagttcctcgcgaacatggccgcggtgctgtccaaggaggcggaggcgttcgacatcgccttccagttcaacgccgtggaggcgaagctcgacgagatggacttcgacgcgctccgccacgacctcggcgtcaggtccggcgaggcgctcgccgtcagcgtcgtgctgcagcttcaccgcctcctcgccgtcgacgacgggaggaggcacgccgccgccggctgcctcaccccggtccagatcatcgcgcgctccagcccgagaagcttcggcgagctgctggagcgggagctgaacacgcggctgcagctgagccccgacgcgtccgtggtgtcgtcgctgtcaccccactcccccgcagcagcaacggcggcgcacccgacgacgtcgacgccaaagctggggagcttcctgtcggcggtgaggtcgctgtccccgaagatcatggtgatgacggagcaggaggcgaaccacaacggcggcgcgttccaggagcggttcgacgaggcgctcaactactacgcgtcgctgttcgactgcctgcagcggagcgcggcggcggcggcggagcgcgcgcgcgtggagcgggtgctgctcggggaggagatccgcggcgtggtggcgtgcgagggggcggagcgggtggagcggcacgagcgggcgcggcagtgggcggcgcggatggaggcggccggcatggagcgggtggggctgagctacagcggcgccatggaggcgaggaagctgctgcagagctgcgggtgggcggggccgtacgaggtgaggcacgacgccggcggccatggcttcttcttctgctggcacaagaggccgctctacgccgtcacggcgtggcgcccggcggcgtcgcgacgcggccacactcggtcgtag

SEQ ID NO: 12808 - DNA, 1479 bp, Oryza sativa
  Clone ID: TFbOSC403597j.C1.o9.gm
atgttccaggacgacatgctgtcgtcggcgacgtcatcgccggcgtcgtcggtgtactcgccgtcgccgtcgccgtcgaacgggtcgtgggtgcaggagctgagccatgaccagcagagcgttcggctgatcggcctgctttaccagtgcgccgccgaggtgtccgccggctccttcgaccgcgccaacctctgcctcgagcacatcacgcagctcgcgtccctggacgcgccgcacgcgctccagcgcctcgccgccgtcttcgccgacgcgctcgcgcgcaagctgctcaacctcatcctgggcctctcgcgcgcgctgctgtcgtcggccaactccgccgacgcccacctcgtccccgtcgcgcgccgccacatgttcgacgtgctcccgttcctgaagctcgcgtacctgaccaccaaccatgccatccttgaggcaatggagggggagaggttcgtccacgtcgtcgacttctccggcccggcggcgaacccggtgcagtggatcgcgctgttccacgcgttccgaggccgccgggaaggcccgccgcacctccgcatcaccgccgtccacgacagcaaggagttcctcgcgaacatggccgcggtgctgtccaaggaggcggaggcgttcgacatcgcgttccagttcaacgccgtggaggcgaagctcgacgagatggacttcgacgcgctccgccacgacctcggcgtcaggtccggcgaggcgctcgccgtcagcgtcgtgctgcagcttcaccgcctcctcgccgtcgacgacgggaggaggcacgccgccgccggctgcctcaccccggtccagatcatcgcgcgctccagcccgagaagcttcggcgagctgctggagcgggagctgaacacgcggctgcagctgagccccgacgcgtccgtggtgtcgtcgctgtcaccccactcccccgcagcagcaacggcggcgcacccgacgacgtcgacgccaaagctggggagcttcctgtcggcggtgaggtcgctgtccccgaagatcatggtgatgacggagcaggaggcgaaccacaacggcggcgcgttccaggagcggttcgacgaggcgctcaactactacgcgtcgctgttcgactgcctgcagcggagcgcggcggcggcggcggagcgcgcgcgcgtggagcgggtgctgctcggggaggagatccgcggcgtggtggcgtgcgagggggcggagcgggtggagcggcacgagcgggcgcggcagtgggcggcgcggatggaggcggccggcatggagcgggtggggctgagctacagcggcgccatggaggcgaggaagctgctgcagagctgcgggtgggcggggccgtacgaggtgaggcacgacgccggcggccatggcttcttcttctgctggcacaagaggccgctctacgccgtcacggcgtggcgcccggcggcgtcgcgacgcggccacactcggtcgtag

SEQ ID NO: 12809 - DNA, 1010 bp, Oryza sativa
  Clone ID: TFbOSC410945j.C1.o12.gp
ttacagagcaacagcagtataatattaattctgtaccacacaaccatttgataggttaaattaccctctagtctctactcataagcagtgtttccaatgagatgatcatggctaattgagcagagcatggcaacaacctaaagcaacatcattagctatagagactgacaccaatattcctaaatccactaggctagctaataagctgcaacgaaaagcaatatgaagagttcaacagctcaagacaacaatttcatttgcaacatttaattgcaagaataaatggacattactggagtggtcgatgcttgcaaacggtggtggaaccttggtggagtgaagcttatggctgatcagcaccgccaagatgatatggatacaagctccccacgctgccagtagagcgtaagagcagctccgcgtttctccacatggaatcctcggacctgcacccgcttcaggaggcagtctgcctgtgcctcggcgaggttgctgagctgaacgggcttaaacccagttgctgcaaaaacgctcctccatgctatagctttctgcgccttgtgccgcccaatcactgcatcctcaactcttggttgaattaggaacctctcgatcttgcaggcagaatcagcatcaataccagcagcatcaagcgagtcaaggaggaacacacaggactggaaacaattcaggaaatgctgcgagaatggaaggtctgcacgatcacctccatgatcaatagccacgacaaccttaggacaaagctgtttcaccaaccgaagaatcgctggcagcggtggtgcacgagcagagcagccaacagggaggctaacagcaacaacttcatcaccagaggaagaaatgagttccgcaggattgaatgcatcaagactgacggcattgaattcgaaaggaattctgagctctgcggcaaactgagagaggttatcctgggtaaggtgcagctccagtggatggtgagaagcagtcgacatgaaagccgtgagctt

SEQ ID NO: 12810 - DNA, 375 bp, Oryza sativa
  Clone ID: TFbOSC16170j.C1.o1.gm
atggcggcgcacccggcatcgacgtcgacgctcaactactatgcgacgttgttcgacggcctgcagcagagcacgacggcgccggcggagcgcgtgctgctcgggatggagatccgcagcgtggtggcatgcgagggggcggagcgggtggagcggcacgaaggcatgatgagcctccggaggacagccagccgccgtagggtcacggagcccctccggaggccacatggtctccagggccccacggagtctctggaggccatcgatccgctggaggccaacaaggactccgaggatatcaagccattaagggccaatcgactttcggcaaacaacggaactccggaggccatcccggactccggagttggttag

SEQ ID NO: 12811 - DNA, 1656 bp, Oryza sativa
  Clone ID: TFbOSC413654j.C1.o5.fg
atggcggtggagatcccgaggctagccctgggtggaggaggagggggagcgggaggagagcggctaccggcggccggggaggattcggcgccggcggccaccaacgcggggaagcgcccggtggtcgggctcgggttcgggtcctccttggcggccatggcggcggcggcggcggcggggatccagcccgacgcgttcgccctaggtggcccggcggagtaccccgccggcgacggggagcgggacgttctgatggtgagcttcctgcgttccatcgcggcgttcctggccgacgggacgtgccagatgcaggtcaacgacgggctgagctgcgtcgtcgacctcgccggcggggacgccgacggcggcggcgtcggcgaggggaggtcggcgcagcggctggcgtccgcgttcgccgaggcgctcgcgctgcgcttcatcctgccgtgcgacggggtgtgccgctcgctccacctcacgcgggccccgccgccgccggccgtctccgccgcgcgccaggggttccgcgcgatgtgcccgttcgtccgcctcgccgccgccgcggccaacctgtccatcgccgaggtgatggaggccgagcgggcggtcgtccacgtcgtcgacctcggcggcggcgtcgacgccaaccagtgggtggagctcgtccgcctcgtcgccgcgcgccccggcggcccgccgggcctgctccgcctgaccgtcgtcaacgagtcggaggacttcctctccgccgtcgccgcgtacgtcgccgcggaggcccagcgcctcgacctcagcctccagttccatccggtgctatccagcatcgaggagctctccgccaccgccaccggatcaatcggatcccgcctcgtcgtcatccccggccagcccctcgccgtcgtcgccaacctccagatccaccgcctcctcgccttccccgactacgtggacggcgtcgcgagcaggaggccggcggcggagcaatccggatccagccagcatacgatgacgacggcgacgaagacgaaggcggacgcgctcctccgcgccatccgcgacctgaacccgaagctggtggtcctgacggagaacgaggccgaccacaacgtcgcggagctcggggcgcgcgtctggaacgcgctcaactactacgcggcgctgttcgacgccctggaggcgagctccaccccgccggcggccgtgccgccgcacgaacgcgcgtgcgtcgagcggtgggtgctcggcgaggagatcaaggacatcgtcgtccgtgagggcacggggcggcgggagaggcacgagacgctggggcgctgggcggagcggatggtcgccgccggcttctcccccgtgacggcggccagggcgctggcgagcacggagacgctcgcgcagcagatggtggcggcgggcgggggcggtgccggcgccggggtgctcagggcggcgcacggcggcgggtgcttccccgtgatctgctggtgcgacgtgcccgtcttctcggtctcgacgtggaccgcgaggagggtccttgtgccggcgccaccgctgtggccaccggcggcggctggtggtgctggtccatcgggctcaggctacggcggcgacggcccatcgacggcgagctcgtcggcggcaatgtggtgggtcggatga

SEQ ID NO: 12812 - DNA, 750 bp, Oryza sativa
  Clone ID: TFbOSC406886j.C1.o1.fg
atgcaggggctccaatggccggggctgttccacatcctggggtcgcggccgggggggccgccgagggtgaggctgaccgggctgggggcgtccatggaggcgctggaggcgacggggaagaggctgtcggacttcgcggacacgctgggattgccgttcgagttctgcccggtggctgacaaggccgggaatctggacccggagaagctgggcgtcacgcgccgcgaggccgtcgccgtccactggctgcgccactccctctacgatgtcaccggctccgactccaacacgctctggctcatccagaggttggcgccaaaggttgtaacaatggtggagcaggatctgagccactcaggctccttcctggcacgttttgtggaggccatccactactattcggcactgttcgactcgcttgatgcgagttacagcgaggatagcccgaatcggcatgtcgtggagcaacaactcttgtcgcgggagatccgcaatgtgctagccgtgggcggtccagcacgcaccggcgatgttaagtttgggagctggcgcgaaaagcttgcgcagtcgggcttccgtgtgtcgtcgcttgctggaagcgctgctgctcaggctgcactgctgcttgggatgttcccttccgatggatacacgcttattgaggagaatggcgctctgaagctcggatggaaggatctgtgccttctcactgcctctgcttggcgcccaattcaggcttcgggacgttag

SEQ ID NO: 12813 - DNA, 1437 bp, Oryza sativa
  Clone ID: TFbOSC401949j.C1.o29.fg
atggagaccatgtcatacccttgctcccttctcattcccttctccacacaatttgaagagatcagtagcagtagcctcctcctatggtctcctcaagcagaagaaaatcctcatgagaatgccaatatgtatgaatttgatgctgatcactctcatgatcagattcatcaagatcatcagttcttggacatgatggtcatccaagaatctgctaatgaatttgatggtaatcactctcatgatcagattcatcaagatcatgagttcttggaaacgatggtgatccaagaatctgctaatgaatttgatggtgatcactctcacgatcagattcatcaagatcatgagttcttggaaatgatggcaatccaagaatctgctaatgatttgctgcaactgcaagatgatttctctgtccccaatgctgatccattagcagctagctttgaatttgatgagagattagcagtggcagggcacgagaacggcaacgtggtggcaacccaggaggagagcgcaggtgaccttctcctcgccggcgccatggccgtggacgccggagacgctgtccacgcctcggcgatcatgtcgaggcttgacgacctcctcgccgacatcgccggcagaagaagctgtgaagcaacaagcccggttgatcacctggcctactacttcgcccgaggcctcaagctccggatctccggtgcggccacgccggcgtcgtcgccgccgccgccggcggccaactggtcgtcgccggcgtaccggatgctgcaagagctgacgcctttcgtcaagttcgcccacttcaccgccaaccaggccatcctcgaagccacggcggatgacctcgacgtccacgtcgtcgacttcaacgtcggcgagggcgtccagtggtcgtcgctcatgtcagacctcgccgccgccggccgccaccgctgttccacctcacggacgctgaagcttctcctcctcggcacgatcacaatccttcaaccaaagctggtgatcctgatcgaggacgagctatcccgaatcagcaagaacccaccatcaccgtccctcgccgcgccgccgccgttcccggagttcttctccgacgcggtggcccacttcacggcggtgatggagtcaacggcgagctgcctcgtgagctacgacgacgaggcgtggctgagcctgaggcgcgtgggggaggaggtggtggggcccagggtggaggacgctgtggggaggtatgggtcactggcaggtggggcccagatgatggaagggctcagggctcgtgaggtgagcggcttcagcgttgctcaggggaagatgttggctgggctcttcggtggagggtttggggttgtgcatcaggagaaagggaggctcgctctctgctggaagtccaggcctttgatctcagtgtctctttggtgtcccaagtag

SEQ ID NO: 12814 - DNA, 1129 bp, Oryza sativa
  Clone ID: TFbOSC9377j.C1.o3.np
aaatggtggagtccacatgggccccacatgtcatcctcacccctcccctcctctccttcctcctctcttccccatatcccctctcttcatcccactctcctctcctctctctccaggtgacggagaggcagcggcacacacggcggctcccggtcgtcgctggccgacttgcgcagcggcgccggaagcaggaggaggtggcggccgcgacgccaactgcgacacgctcgtgccgtccttcgtgcgcactgacggctgcggccgtggcgaccactccccgccggtccacacgttcggcttcggcaaggaccacgacgcggtggcgatgcacaccatcgccgaggtcaccggcgggacgttctccttcattgagaacgaggcggccatccaggacgggttcgcgcagtgcatcggtggcctcctctccgtcgccgtgcaggagctccacttcgacgccgagacatggagaggaccggacagaccacgagcgtggccggcgacgaggaggcggagtccggcgtcgccgagcgctccgtggaggtggaccgggagctggtccgggtggaagccatcgacgacatcgcgctggaactgaaatcgcgtgtgtttgctgatagctccgtcgtggtctccttcatgcagcggccggtgggaagctaccaccatgtcacctgccacgacggcttcaaggagttcgacgatgatctcgggttcacgctgtgcaatgattactactcgccgccgccgaagttggtggacttcgtcgccgaccatccgcgctgctgcgaccggccgcctcgccgcgcgacgccctgcgaagacgatggattgcgacctctcctcgacgatgaagccctgcaagggcgaggagctcgcccgccaccgctcctcctctgctccgccagcccgcttcgcccgctcgtccacgcctcgccgccgaggtgctgtcctgctcgtcggcctccacgcgcgctcgtaggcctccctccgtcgcctgtagagaaaggagaggagagagtgatgaagagaggggagatggggagagatgaggaagaagaggaggggtgaggataaaatgtggggcccacacgccgacatcgccaacacacacgaccaggagaaggttagc

SEQ ID NO: 12815 - DNA, 1383 bp, Oryza sativa
  Clone ID: TFbOSC1192j.C1.o1.fg
atggagaaggccacgcgttgcctcgcgcgcgccacgggcctcgccgccgccgccgccgccggcgacgggccgcggaagcgcctcgccgtggcaatggtggactgcctcgcgcggcgcctcctccgccccgtccaggccatcaccgacgcgctcatcgacccctccgtctacctcgaccggcgttccgtcagggcggcgcgccgcgggttctttgaactcagtcccttccccaaggtggcgttcgtcgtcggcaaccgcgccatcgtcgaggcggtggagaacgagagcttagtccatgtcgtcggcatgtccggtccatttacccagccatgccagtggatccagctcctgcacgagcttcgccgtcgcccggaaggcccgccacgtgtcgttcggctcaccgtcgtccacgacgacggggagttgcttgccaagatggaagagttggtctccgacgaagccgaagagctcggcatggagttccagttccatggcgtcgtcggccagctcgaggatctggacttcagtaaccttcgcaatgtccttgagataaaatccggcgaggcgctcgtcgtcagctgcactctgcaactgcatcgtcttcttgctgctgatgacgatgcgatgtatagctctcgctctgcccatctcaaccaaatggcgagcatcgcgcagctccagcacatggcggtgaattcgtgcccgtcgagtagcggcggcggaagcgtgcagtacaaagacgatgacccttaccgaagcccggccacaccgctgacgttcgtctcgccaccggtgtcaacccctcacttccagacgccggcggcgctggcgagcttcctgtcggcggtgcgcgcgctgtccccgaagatcctggtggtggcggagcaggacgcggaccacaacggcgtctccttccggaagcgcttctgcgaggcgctccaccactacgccgccgtgttcgacagcctcgacgccgcggccgccaccacctcggcggcgtcgcgcctgtggtctcccgacgaacgcgcgcaggtggagcgcgtcgtggtgggcgaggagatcaagggcgtcctactccgggatggcgcgcaccggcgggaatggcacgaccggctgcggcaatgggcggcgcgcatggagatggccgggttcaccggcgtgccgctcagctacgccgccatcaagaaggggaacgacatggtgaggcgatgcggattgagacgctgcgagaacaaggaatgcggcggctgcctcctgctgtgctggagctcgaggcctctctactcgatctcggcatggcggccggcggcgagcagaggatctgggtcaggttcagagagaagcgagtacgtacatgtcggtgccgagccagatgatcgatga

SEQ ID NO: 12816 - DNA, 2217 bp, Oryza sativa
  Clone ID: TFbOSC402543j.C1.o3.fg
atgggctcgtcggcggccgactcgttccccgcttgtggagatgatgcaatccgagacgtgtacggcatcggtggtggtggggaggaggacgatccgtccctcttcctctacctctccgacctcgcccccgtctccccctccgcctacctcgacctccccccctcgccgccgccgccgacgacgacggcgacgacgatggtgaaggagggggaggaggcgccggaggacctggtgctgccgttcatctcgaggatgctgatggaggaggacatcgacgacaagttcttctacgactaccccgacaacccggcgctgctccaggcgcagcagcccttcctcgagatcctctccgatccctcctccaactcccgctcctccaactccgacgacccccgcctctccccgacctcctcctccgacacctccgccgccatcaactcctacgacgccgccgccaccgccaccgccgttgccgccgccgcggtgcccgtgccgcagtacgagagcatcgagctcgatcccgccgcgttcttcgccgcggccaactccgacctcatgagctccgccttcctcaaggggatggaggaggcgaacaagttcctccccaccgagaacaagctcatcatcgacctcgaggcctcgtcggagaataattacctcaggggtctcgaggaggccaagaggttcctgcccagcgacgacaagcttcaggttggattcgctgcggcggcggcgcctgtggtgagcgtgaagaaggaggcggtggatgtggtggtggcaaccgcctcgggcggcggcggacgagggcggaagaacccgtacgacgacgaggagctggagctggagggagggaggagcagcaagcagaccgcggttcagggggacgatgtcgcggcgcgcgccatgttcgacaaggtgatgatgccctcccatgagaattgcaccgagatgatggagaagctgaggattgccatgaaggaggaggcggccaagaacgaggccagcgccggcgggaagggtgggaacgggaaggtgaagggagggcggcggggcgggagggacgtggtggacctgcgcacgctgctcatccactgcgcgcaggccgtggccaccgacgaccgccggagcgccaccgagctgcttaagcagatcaagcagcacgcgaaaccgaccggcgacgcgacgcagcgccttgctcattgctttgctgagggcttgcaggcgcggatcgctggcacgggcagcctggtgcaccagtcgctcgtggctaagcgcacctcagccgtggacatcctccaagcgtaccagctgtacatggctgccatctgcttcaagaaggtgtccttcattttctccaatcaaaccatctacaatgcttccttgggtaagaagaagatacacatcgttgattacggtatacagtatgggttccagtggccgtgcttcctgcggcggatatcacaaagggagggtgggccaccggaggtaaggatgactggcattgacctcccccagcctggtttccggccaactgagcgtattgaggagacagggcaccggctcagtaaatacgcccaggagtttggggtgccattcaagtacaatgccattgcagcggttaagatggagtcagtccgcaaagaggatctgaacattgatcctgatgaggtgctcattgtgaattgccagtatcaatttaagaacttgatggatgagagtgttgtgatcgacagcccaagggatattgtgctcagcaacatccggaagatgcagcctcatgtgttcatccatgcaatagtgaatggctcattcagtgcaccattctttgtgacacggttccgggaggctttgttcttttactcggccttgttcgatgttctggatgcaactaccccaagggaaagcgaacagcggctgctgattgagcaaaacatctttggacgagctgctctgaatgtcattgcgtgtgagggcatagatcgggtggagcgccctgagacatacaagcaatggcaggtgcggaatcaacgggctggcttcaagcaactgccattgaatccagaaattgttcaggtagtgcggaacaaggtcaaggactgctaccacaaggacttcgtgatagatatagatcaccaatggctcttgcaaggatggaagggacgaatactctatgccatctcaacatggacgccaaatgatgctctctcttatttttag

SEQ ID NO: 12817 - DNA, 2482 bp, Oryza sativa
  unsure (1)..(2482): unsure at all n locations
  Clone ID: TFbOSC900311j.C1.o8.np
cgggacgccggcgtgggcggcgcacggcgggcgcgaccacttcctcgtcggcggccgcatcgcccactaaaccccctcctccgcctcgccgccgccatgggctcgtcggcggccgactcgttccccgcttgtggagatgatgcaatccgagacgtgtacggcatcggtggtggtggggaggaggacgatccgtccctcttcctctacctctccgacctcgcccccgtctccccctccgcctacctcgacctccccccctcgccgccgccgccgacgacgacggcgacgacgatggtgaaggagggggaggaggcgccggaggacctggtgctgccgttcatctcgaggatgctgatggaggaggacatcgacgacaagttcttctacgactaccccgacaacccggcgctgctccaggcgcagcagcccttcctcgagatcctctccgatccctcctccaactcccgctcctccaactccgacgacccccgcctctnnnnnnnnnnnnnnnnnnnnnnnnnnnnnnnnnnnnnnnnnnnnnnnnnnnnnnnnnnnnnnnnnnnnnnnnnnnnnnnnnnnnnnnnnnnnnnnnnnnntcgctacaacttcaaaaggccgccacgtatctccaaaactttggtggtgctaggtgagtagcctacctctagagcccgctgacccctttttcaactccgttccgccaatttctatgaccctggcttttccccgacctcttcctcctacacttccgtcgccatcaactcctacgacgccgccgccaccgccaccgccgttgccgccgccgcggtgcccgtgccgcagtacgagagcatcgagctcgatcccgccgcgttcttcgccgcggccaactccgacctcatgactccgccttcctcaaggggatggaggaggcgaacaagttcctccccaccgagaacaagctcatcatcgacctcgaggcctcgtcggagaataattacctcaggggtctcgaggaggccaagaggttcctgcccagcgacgacaagcttcagtggatgtggtggtggcaaccgcctcgggcggcggcggacgagggcggaagaacccgtacgacgacgaggagctggagctggagggagggaggagcagcaagcagaccgcggttcagggggacgatgtcgcggcgcgcgccatgttcgacaaggtgatgatgccctcccatgagaattgcaccgagatgatggagaagctgaggattgccatgaaggaggaggcggccaagaacgaggccagcgccggcgggaagggtgggaacgggaaggtgaagggagggcggcggggcgggagggacgtggtggacctgcgcacgctgctcatccactgcgcgcaggccgtggccaccgacgaccgccggagcgccaccgagctgcttaagcagatcaagcagcacgcgaaaccgaccggcgacgcgacgcagcgccttgctcattgctttgctgagggcttgcaggcgcggatcgctggcacgggcagcctggtgcaccagtcgctcgtggctaagcgcacctcagccgtggacatcctccaagcgtaccagctgtacatggctgccatctgcttcaagaaggtgtccttcattttctccaatcaaaccatctacaatgcttccttgggtaagaagaagatacacatcgttgattacggtatacagtatgggttccagtggccgtgcttcctgcggcggatatcacaaagggagggtgggccaccggaggtaaggatgactggcattgacctcccccagcctggtttccggccaactgagcgtattgaggagacagggcaccggctcagtaaatacgcccaggagtttggggtgccattcaagtacaatgccattgcagcggttaagatggagtcagtccgcaaagaggatctgaacattgatcctgatgaggtgctcattgtgaattgccagtatcaatttaagaacttgatggatgagagtgttgtgatcgacagcccaagggatattgtgctcagcaacatccggaagatgcagcctcatgtgttcatccatgcaatagtgaatggctcattcagtgcaccattctttgtgacacggttccgggaggctttgttcttttactcggccttgttcgatgttctggatgcaactaccccaagggaaagcgaacagcggctgctgattgagcaaaacatctttggacgagctgctctgaatgtcattgcgtgtgagggcatagatcgggtggagcgccctgagacatacaagcaatggcaggtgcggaatcaacgggctggcttcaagcaactgccattgaatccagaaattgttcaggtagtgcggaacaaggtcaaggactgctaccacaaggacttcgtgatagatatagatcaccaatggctcttgcaaggatggaagggacgaatactctatgccatctcaacatggacgccaaatgatgctctctcttat

SEQ ID NO: 12818 - DNA, 2136 bp, Oryza sativa
  Clone ID: TFbOSC400235j.C1.o17.fg
atgagggcggcacccttcagtgccgacgggaacggggcggcggagctcgcggggagcatagcggcgctgctttggccggaggacaagggcggcggcggcgggggcggcggggggtcgttgctggtggagccgaggtcggtgctggactgcagggggagcccgagcccgcccaactccacatcgacgctgtcttcgtcccatggtagcggcgcggcggattctatatctaccggcgtggcggcggtttcggagagcagcgcagccgccgccgaagccaccagatgggcggcccccggcgaacacggcggcggcggtggcggtgagctgccgcccataccgggggccctggatgtgggcttcgtcgcggaggagagctgggacgccatgctcggcgacgccgcggcggcggcaggccaggagcagacatttttgaactggatcatggctgcccccggcgacatggaaccccaggcgccggggctctcgcagcagcagctcctcgccaatgccgccgggttcgggttcccgctgcagcatcaccccggtggcgtctcctcgccagccgccctcgcctccgacctgtcgtcctccggcgggaggtcgctcacaagcagcagcggcagcaatagcaaggccacctccgctttcggcctcctgtcgcccgaagcggcgctccagccgccgccggcgactactgcgcctttccacaacggcgctgacatgaagccccctctccttggcttgccatcacccacactactcctcaaccagcatcagccgacgccggcctccaccttgttcatgccgttcccctccttctccgaccatcaacaacagccactgctccagccaccgccgaagcgccaccactccgtgcccgacaatctcttcctcctccacaaccagccccagccaccgccgccggcgcccgcgcaatgcctcccgtttccaacgctacatagcgcggtacccttccagctccagccttcgatgcagcatccgcgcaacgcgatgaagtcaaccgcggcggcggcggcggcgcagcagcaacacctcctggacgagcttgcagcggcggcgaaggcaaccgaagtcggcaactccataggcgcgcgagagatattggcgcggctcaatcagcagcttcccccaattgggaagcctttcctccgctccgcctcctacctaaaggacgccctcctcctcgcgctcgccgacggccaccacgccgccacccgtctcacgtctccgctcgacgtcgccctgaagctcaccgcttacaaatccttctccgacctctcccccgtgctccagtttgccaacttcacggtaactcaggcgcttctggatgagatcgccagcacaaccgcgtcttgtatccgcgtcattgatttcgacctcggtgtcggcggccagtgggcttcgttcttgcaggagcttgctcaccgctgtggctctggcggtgtgtccttgccgatgttgaagctcacagccttcgtctcagccgcctcccaccacccgcttgagctgcatcttactcaggataacctctcacagtttgctgctgatcttggtattccatttgagttcaatgctattaatctcgacgcatttgatcctatggaactcattgctcctacagctgatgaggttgttgcagtaagcctcccagttggttgctcagcacgcactccactcccagctatgcttcagttggtgaaacagcttgctcctaagattgtggttgctattgactatggcagtgatcggagcgacctcccattttcccaacacttcttgaattgcttacagtcttgtctatgtcttcttgaatcacttgatgctgctggcactgatgcggatgctgtcagtaagatcgagaggtttctgattcagcccagagtggaggatgcagttcttgggcggcgtagagctgacaaagcgatcgcttggcggacagtgctaacatcagcagggtttgcacctcaaccactcagcaaccttgcggaggcacaggctgactgcctcttgaagcgggtgcaggtccgaggcttccatgtggagaagcgtggagcaggccttgcactctattggcagcgtggcgagcttgtatccgtctcagcatggcgatgctga

SEQ ID NO: 12819 - DNA, 4092 bp, Oryza sativa
  Clone ID: TFbOSC101500j.C1.o28.fg
atggtgattgagcttccctttgacaatcaatacaccaccacagaaacagaacagccacatgatgggtcttcctgttcttcccagcagcaactcagcttgtacaactacagccccagcgatccgcagctgttttcccagccaaccacaggatcaagaacgtatttgtcaggtgcagtcaccatccctgggatttgcaatgacaaaagtaatcttggacaacaacaatttcagattgatgcagcgcttagtctagggtaccagaggatcagatcaagcgatgccctttgctacataagtcgggtgctgatggaggacgtcgatgagagggttgacctgcaccaaggggaggctgctcttcaggctgcagagaaacccttctatgatattcttggccaggtatatccaccatcgctaaaccggctagcactccatagcgcaaatgaaccagatacgcctgatgagagcagtagcagaaacaattatcataataggtaccatagtagccattccagtttcaacatgttacagcccttgccaaccccattgagtccatatagctatggcaggagtctttttcttccaaaccaacacttggtaagcactgcctggacttctacctttggcatccctggcttccaaattagaagaggtgccgaggaggcaaagagatttgttccaattattgataagttggtgatcgatttggacactgaccgggggctctccatttcaaaaatgaccacgaaggcaaaagtaggagacaagaaaagatatgcaatctttgagttgacagatcaaaggcacagcccttacaccacagacttggatatcttggaagggaggaacagcaaacgctatgccatcacttactgtgaaataatccggaatgatatgtttgacagggttctgctctgctatggtgtggagaatttcgccgaagcatcaaatcttcgaaaaataatgacgaagcaagcacgcaagaattcactgaatggacaaaccagaggatctgcacaacggaaattacggggtatgaaacaactcaagaaggatgtagttgatctcaggaatctcctcatccactgtgcacaagcagtagcagctgacgaccgcatttcggccagtgaactagtgaagaagataagacagcattcttcaccagatggagatagtaaccagaggttggcattttacttggtggatggtctggaggcgcgcttggctgggatcgggagccaggtgtatcgcaagctcatggcaagccgaaccagtgctgagagtttgttgaaggcttacagcctctacctttcagcttgccctttcgaaagggcgtcattcgcctatgcaaaccaaactattcttgatgcatcaaaggggcagcaaccaagaaaggtgcacattgttcatttcggcatttgcactggctttcagtggccatcattgattcagcggcttgcaaatgaagaagggggtccacccaagcttaggatcacaggtatagatatgccccagccaggtttccacccctgtgaaataattgaggagacagggaagcggttggctgattatgcaaacttgttcaaggtgccttttcaatatcagggcattgcttcacggtgggaaaccgtacaaattgaggacctgaacattgacaaggatgaagtgctcatagtcaactgtatgttcaggatgaagaatcttggtgatgagatggtatctatgaatagcgcaagggatagggtgctgaaaataatgaggatgatgaacccaagggtttttattctcggtattgtcaatggatcatacagctctcccttcttcatcacacgtttcaaagaggttctgttccattactcttcattgtttgacatgattgatgcaaatgttccacgggataacgaggcgaggaagatgatagaggggggactctttgggcaggaagcacttaacatcatagcatgcgagggtgcagaaaggactgagaggccagaaagttacaagcagtggcaagcacggtgcctcaaggctgggttcaagcagctccctgtcgatccagccaccttgaaagagataataaatatgaagaaagggatttaccatgaggactttgtagctgatgaagatggtgcctggctactacaaggatggaaagggagagtaatttatgccatatccacatggaagccaaatgaatcatatttggatcagtgtcttccagagtttggaggttatccatgtcaaaagtatgatttacatagcagaatattgatggaggaggatattgatgaaaagatcagcataaaaaaaggacaggatgcacttcaggcgacagagaagcccttctatgatattcttgggaaggcatacccatcttcatctaaggagacagcaattaacggtgacagtcaagcagattaccctgataatggtagcagcagttatcatgaacaggcatgtagtggtagctttgttagtgatctccttgggtcacaggatgcgcattcgataaccaccgactggtcttctgaatttgaccgtttggctttgcaattcaggagaggtgttgaggaagcaaagaggttcattccaaatattgaaaagttggtggatgatccagagaagaatggtctttatgcttgcaaacaaacaacagagacaacagaacagaagggcaagcatgagaacaaaataaggaatcatcctcatgatcctcatgttgagcacatagagttgatggaagcaaggaacagtaagcatatggccatctccactagtgaaacaatacgggatgaaatgtttgatagtattctgctctgcaataggcagctccctggtgaagttgctaaccttagaggaatgatggcaaaagaagcaagcgacaacccaaagaaatttcaaagcaaaggatatggaaaagggcaaaggaagccacacagtagtaagaagaaacagaaagaggcaatagatctcagtgttcttctcatccaatgtgcacaagcgatagcatctaacaaccatccctttgctagtgagctactgaggaaaataaggcatcacgctttgccagatggagatggttctcagaggctagcaaactgctttgcagatggcctcgaggctcgcttggctgggactgggagtcaaatgtacgaaaaactgatggcgaaacaaacgagcaccagagacatgctaaaggcctatcatctatattttgtagcatgcccttttgagatggtaacatactacttctccaacaaaaccatcattgatgcattggaggggaaaacaacattgcatatcgttgattttggcatcctcttcggctttcagtggccatgtctaattcagcgacttgcaaagcgagaaggtggcccccctaagcttcgtatcacaggtgtagatgtaccccagcctggttttcgccctcatgaaaggattgaggagactggaaagcggttggcagagtatgcaaatatgttcaacgtacctttccagtatcatggcattgcttcaagatgggaaactatctgcatcgaggatctcagtattgacaaggatgaggtactcataatcaactgcatgtcacgaatgagaaagctaggtgatgagacagaaaacattgatagtgcaagggatagggtactacacatgatgaagaggatgaacccgcaggttttcattcttggtgttgtgaatggattgtacagctccccattctttctgactagattcagagaggttttattccattactcatcactttttgatatgctcgacaacaatgttcctaggaaccatgaagcaaggatattggtagagaaggatctctttgggaatgatgcacttaatgctgtagcatgcgaaggtgcagaaaggattgagaggccagaaagctacaaacagtggcaaatgaggatcctcagggctgggttcaagcaacgtcctgttaatcaagccattctgaatagatcagtacattacaaggaattttatcatgaagactttgtaattgatgaagatagtggctggctgctgcagggatggaaggggaggataatacaggcactgtcaacatggaaagtggaaacctag

SEQ ID NO: 12820 - DNA, 706 bp, Oryza sativa
  Clone ID: TFbOSC416395j.C1.o2.gp
cgtgttggagtcggagccggtgacatcgtagagggagtggcgcagccagtggacggcgacggcctcgcggcgcgtgacgcctagcttctccgggtcaagattcccggccttgtcagccaccgggcagaactcgaatggcaatcccagcgtgtccgcgaagtccgatagcctcttccccgtcgcctccagcgcctccatggacgcccccagcccggtcagcctcaccctcggcggcccccccggcctcgacgccaggatgtggaacagccccggccattggagcccctgcatgatgtccaggtcgatgatgtgcaccctctcctccctctcgaacgcctcctggatcgcctggttcgccgtgaagtgcgagaacttcacgaacgggctgatgccgttgaacacctggaacgccgcggcgacgcgcccgtggagacgcgccgccgccggggacgggttggggagcggcgcgtacagccccaggcacgagctcaccagccgcgccgacatggcctccgcgaagtaggcggcgacgcgctgcgtggatgtgccgaacggcgtggcaagctccgcgatctccagcagcgcgcggtgcgcctcgtcgaggttgtccgcgttcaccgactccgcgcactggagcagcagcgtcagcaggtggaggccctcctcgtcgcgctgcttccgccgctgctcctccttccgctccttg

SEQ ID NO: 12821 - DNA, 1089 bp, Oryza sativa
  Clone ID: TFbOSC272j.C1.o1.gm
ccaccgccgaagcgccaccactccgtgcccgacaatctcttcctcctccacaaccagccccagccaccgccgccggcgcccgcgcaatgcctcccgtttccaacgctacatagcgcggtacccttccagctccagccttcgatgcagcatccgcgcaacgcgatgaagtcaaccgcggcggcggcggcggcgcagcagcaacacctcctggacgagcttgcagcggcggcgaaggcaaccgaagtcggcaactccataggcgcgcgagagatattggcgcggctcaatcagcagcttcccccaattgggaagcctttcctccgctccgcctcctacctaaaggacgccctcctcctcgcgctcgccgacggccaccacgccgccacccgtctcacgtctccgctcgacgtcgccctgaagctcaccgcttacaaatccttctccgacctctcccccgtgctccagtttgccaacttcacggtaactcaggcgcttctggatgagatcgccagcacaaccgcgtcttgtatccgcgtcattgatttcgacctcggtgtcggcggccagtgggcttcgttcttgcaggagcttgctcaccgctgtggctctggcggtgtgtccttgccgatgttgaagctcacagccttcgtctcagccgcctcccaccacccgcttgagctgcatcttactcaggataacctctcacagtttgctgctgatcttggtattccatttgagttcaatgctattaatctcgacgcatttgatcctatggaactcattgctcctacagctgatgaggttgttgcagtaagcctcccagttggttgctcagcacgcactccactcccagctatgcttcagttggtgaaacagcttgctcctaagattgtggttgctattgactatggcagtgatcggagcgacctcccattttcccaacacttcttgaattgcttacagtcttgtctatgtcttcttgaatcacttgatgctgctggcactgatgcggatgctgtcaggtttgcacctcaaccactcagcaaccttgcggaggcacaggctgactgcctcttgaagcgggtgcag

SEQ ID NO: 12822 - DNA, 566 bp, Oryza sativa
  Clone ID: TFbOSC295j.C1.o4.gm
atgcagtttcttgatcatcaccagtatctatacagcagcagtagcagcaacctgccactgcagcagcctttgttgtcccatcaccaccgatttcttgaagccaatgagggttgcgccggcgaggacgactcgccggagttcgtcgagccgccggcggcggcggcggcggccgggacgttcgagcaacggccggagttaggagcgtgcaaggaggtgtactccgaggaaggcggcgcggcggaggagaggacgggcgtggcgatggcgggggccgacgtcgaacaggtggcggtggaggatgaggaggaggctcacggcgtgcggatgatcgcgctgctgatggagtgcgcggcggcgatgtcggtgggcaacctcgcgggcgccaacggggcgctgctcgagctgtcgcagatggcctcgccgtacgcggcgtcgtgcggcgagcggctcgtggcctacttcgccagggccatggcggcgcggctggtggggtcgtgggtcggcgtcgtggcgcccatggcgccgccgccgtcgtgcggggccatcaacgccgcgttccgggcgct

SEQ ID NO: 12823 - DNA, 1079 bp, Oryza sativa
  Clone ID: TFbOSC20531j.C1.o1.gp
cctcgcggcggaccgtctcccactttgcagcaatggcttggaacctgaatggcacgccgaattggcgcgcgcagttgctcagccgccggcctgtctcctcgatctggtcggctggccggaaccccggctgcgggaagtcgatgcccgtaatcctcacctccggcggcccgccttccctctccgacagacacttgaacagacctggccactggaatccgtagctgaggccgtagtccacgatgtgcagcttgcgcttccccgccacggcgtccaggatggtcttgttggagaagatgaagctcaccttcttgatgcagcaggccgccgcgaacagcttgtacgccttgaggaagtccaccgtcgacgtgcacttcgcaacgagcgacttgtacacctggctccccgtgccggcgagccgcgcctccagcccctcggcgaagcagcacgccagcctctgcgtcgcgtcccctctcgccgacgagttctgcttgatctgcttcagcagctcggtggcgctccgccggtcgctcgtcgccaccgcctgcgcgcagtggatgagcagggtgtgtaggtcgaccaccgccgcctttgcgcgcgccgccctccggccggccccgccgccgttccgggccttcttctcggcctcgctgtccatggcgacgcgcagctcctccatccctttcatgatcacctcgtaccagttgaacattatttcgtcgaacatctcgctggcggccgcggtggcctcttgcggtggcaccatcagcttgctgctcctgccggtctccgcctccaggtcgtcctcctcgccgtgcctgttcttccggcccctgccgctgccgccgcttcgtccgaacattaacgtgggctcatccaccgccggctccgtcttgagcagcgaggcgccgtcgaagccggcgaagagggtgttgttggtgggcaccaacttgttggcctcctccctgcccttgaggaacgccatgttgagcatctccatgttgtcggcggcggagaacagaagtttcaggtctttgtcgtcttccggcgcgctcctggtgtcgccgacgtcggcgtcgtgg

SEQ ID NO: 12824 - DNA, 492 bp, Oryza sativa
  Clone ID: TFbOSC406886j.C1.o3.gp
cgtgttggagtcggagccggtgacatcgtagagggagtggcgcagccagtggacggcgacggcctcgcggcgcgtgacgcccagcttctccgggtccagattcccggccttgtcagccaccgggcagaactcgaacggcaatcccagcgtgtccgcgaagtccgacagcctcttccccgtcgcctccagcgcctccatggacgcccccagcccggtcagcctcaccctcggcggcccccccggccgcgaccccaggatgtggaacagccccggccattggagcccctgcatgatgtccaggtcgatgatgtgcaccctctcctccctctcgaacgcctcctggatcgcctggttcgccgtgaagtgcgagaacttcacgaacgggctgatcccgttgaacacctggaacgccgccgccacgcgcccgtggacccgcgcgcccgccggggacgggctcgggagcggcgcgtacagccccaggcacgagctcac

SEQ ID NO: 12825 - DNA, 631 bp, Oryza sativa
  Clone ID: TFbOSC1273j.C1.o1.gm
aaccaacaggctttgcagttccgccgcgggtttcaagaggcaagcaagtttcttcctgatgagagcaagcttgtgattgatgtggataagctctacagtggagatgaggggagtaggttccttggtgaggttagacaagagaagaagcttgtgaaggtgaagacagaaacctctgatgttgaatcagcaggtcaccgaggaaagaagcatttctatggtgatgacctggatgcggaggaagggaggtgcagcaagcattccgcgcaagggattgacactgaccaccttgtgagggatttgatggacaaggtcttgctatgcaatggtgagacatgctcaaaaggtgttaaggagttgcgtgaggctctgcagcatgatgtggcgaaacattcaggcggaggccatggcaaagggtccagccatggcaagggtcgtggaaagaaacaacccaagaaggaggtggttgacctggagacccttctcatccattgtgctcagtctgtggccactgatgacaggcgcagtgcaactgagctcctgaagcagatcaggcagcatgctcatgccaatggtgatggtgatcagcgtttggcacactgcttcgccaacggcctcgaggcgaggctggcag

SEQ ID NO: 12826 - DNA, 519 bp, Oryza sativa
  Clone ID: TFbOSC400419j.C1.o1.fg
atgtcgcccgccgtggtgaccatcgccgagagggaagcaggcggcggcggcggcggcggcgaccacatcgacgacctgccgcggcgggtcggggtggccatggatcactactcggcggtgttcgaggcgctggaggcgacggtgccgccggggagccgggagcgcctcgccgtggagcaggaggtgctgggccgggagatcgaggccgcggtgggggccctccggcggccggtggtggcgcggcatcgagcggtggggcggcgccgcccgcgccgcggggttcgcggcgcggccgctcagcgcgttcgccgtgtcgcaggcgcggctgctgctccggctgcactacccgtcggagggctacctcgtgcaggaggcgcgcggcgcctgcttcctcgggtggcagacgcgcccgctgctctccgtctcagcgtggcagccgtcgtcgtcgtagccggcgacgaagacgacgatggcgacggcggcggcgaccacgggctagggtttgccaagctcgattga

SEQ ID NO: 12827 - DNA, 1143 bp, Oryza sativa
  Clone ID: TFbOSC400011j.C1.o18.fg
atggcgggcgactacgcggcggcggccgggagcctgtccgacgcgcgcgagatcttcgccaagatgcccaccacccgcaccgggatcggccgcgtcctcacccacttcgccgacgcgctcgccgagcgcctgttcccggcgttcccgcagtccgcgccgccgccgcccccgccacgcggggagcagcgcgagctcttccgcgggttctacgaggcggggccgtacctcaagttcgcccacctcgcggcgaaccaggccatcctcgaggcgttcgaggggtgcaacagcgtgcacgtgatcgacttcgccctcaccgatggcatccagtggccgtcgctcatacaggccttggccgtccgccccgggggcccgccgttcctccgcatcaccgggatcggcccccacgccgccggcaaccgcgacgagctccgcgacgtgggcctccgcctcgccgagttcgcgagatcttgcagcgtccccttcgccttccgcgggatcgccgcggaccagctcgacgggctccgcccgtggatgttccaggtcgcgcccggtgaggcagtcgccatcaactccgtgctccagctccaccgcctcctggtcgaccaggacgccgccgccgcggcgtcgttcccggcgcccatcgacggcgtgctagactgggtcgcgtccatgaaccccagggtcttcacggctatcagccgccatggcggcggcgacggggcgggcaacccgctcgccgaggcgtacctgcagggggagatcgccgacatcgtgagccgcgaggggagcagccgggtggagcgccacgagcagatgccgcggtgggtggagaggctgcggcgcggggggatgacgcagctgccgctcggcgccaccggcctctggcaggcggcgatgcagctccgcgagttctccggcgccggcttcggcgtccaggagaacggcggcttcctcacgctcacctggcatagccagaggctgtactcggcgtcggcgtggcgcgcgaccgcggggaagaagatgacgatgatggctagcggcgccgccgacgccatggaggagagtcagaacagcaacaccaacggcggcggcggcggaagcagtggtggtggccatggtgctctcaaccaaatcatgcagtga

SEQ ID NO: 12828 - DNA, 1575 bp, Oryza sativa
  Clone ID: TFbOSC401739j.C1.o20.fg
atgccgtactataataactcagtgccttcagggggaaatggtaggttctatataacacaaaatcatcaggatgctcactacgcttcttctgatgatgggtcacagaagattggttcgagccctcaagcatttgaagcgccgtactgcactctagaatcatcctcagcaaatggtgctcatcctgcccatagctctgcatcttctcacagcatctctcctattagcgggagccccctgtctcatcatgatagccactcagaccacacgtacaattcccctccaagtgcatcctgtgtcacagagattacagatctccagattaaactgagggagctggagaatgcaattcttgggcctgagctagacatagcttatgacagccctgagagcgccttgcaaccaaacataatggcaacaccagaaaattggagacagcttctgggaattaatacaggagatttgaagcaagtaatcatagcatgtggcaaggctgttgccgagaatgatgttcggctgacagaactactgatatctgagttaggtcagatggtgtctgtctctggtgatccattgcaacgattgggggcttatatgttggaaggccttgttgccagactttcttcctctggcagtaagatatataaatccttgaagtgtaaggagcctacaagctctgagctcatgtcatacatgcatcttctttacgagatatgcccattcttcaaatttggttatatgtcagctaatggcgccatcgctgaagctattaagggagagaactttgttcacataattgacttccaaattgcacaagggagtcaatggatgacattaatacaggcccttgcagcgaggcctggaggaccaccatttctacgaatcactggtatagatgactcgaattctgcttacgccagaggtggtggactggatatagttggtatgagattgtataaagttgctcagtcttttggtctgccctttgagttcaatgctgttccagctgctagccatgaggtttatcttgagcatcttgatataagagttggtgaagttattgttgtgaattttgcctatcagctgcatcacactccagatgaaagtgtaagcacagaaaaccatcgggataggattttaagaatggtcaagagcctctcccctaggttggtgactcttgttgagcaggagtcaaatacaaacacacggccattcttcccaagatacttggagactcttgactactacacagccatgtttgagtcgatagatgtcgctctcccaagggatgataagagacggatgagcgcagagcaacactgtgtggcgcgggacattgtcaatttaatcgcatgtgagggtgctgagagggtagagaggcatgaggtctttggaaaatggaaggcaagattaacgatggcagggtttcggccatacccgctgagttcagtggtgaacagtaccatcaaaacgctgttgcatacttacaatagcttctacaggcttgaggagcgagatggtgttctttaccttggatggaagaacagagtattggttgtatcttctgcatggtgttga

SEQ ID NO: 12829 - DNA, 1449 bp, Oryza sativa
  Clone ID: TFbOSC401887j.C1.o6.fg
atgccgctccacccggccgcggcggcgtcgcccacgccgccatggatggtgcgggagctgcgttccgacgagcgcgggctgtgcctcatccatctcctgctcaactgcgccgcggcggcggcggccgggcggcttgatgctgcgaacgccgcgctcgagcacatcgcgtcgctggcggcgcccgacggggacgccatgcagcgcgtggcggccgccttcgcggaggcgctggcgcggcgcgcgctgagggcgtggcctgggctgtgccgcgcgctgctcctgccccgcgcgtcgcccacgccggccgaggtcgctgccgcgcgccgccacttcctcgacctctgcccgttcctccgcctcgccggcgccgccgccaaccagtcgatactggaggccatggagtccgagaagatcgtgcacgtcatcgacctcggcggcgccgacgccacgcaatggctggagctcctccacctcctcgccgcgcgccccgagggcccgccgcacctgcgcctcacgtcggtgcacgagcacaaggaactcctcacccagacagccatggcgctcacgaaagaagcagagcgcctcgacgtgccgttccagttcaacccggtggtgtcccgcctcgacgccctcgacgtggagtccctccgcgtgaagaccggcgaggccctcgccatctgctccagcctccagctgcactgcctcctggcgtccgacgacgacgccgccgccgtggcgggcggcgacaaggagaggcggagcccggagtccgggctgtcgccgtcgacgtcgcgcgcggacgcgttcctgggcgcgctgtgggggctgtcgccgaaggtgatggtggtggcggagcaggaggcgagccacaacgcggcggggctgacggagaggttcgtggaggcgctcaactactacgcggcgctgttcgactgcctggaggtgggggcggcgcgcgggtcggtggagcgcgcgcgcgtggaacggtggctgctcggggaggagatcaagaacatcgtggcgtgcgacggcggcgagcggcgggagcggcacgagcggctggaaccggtgggcgcggcggctggagggcgccggcttcggccgcgtcccgctcagctactacgcgctgctccaggcgcggcgggtggcgcagggcctcggctgcgacggcttcaagaattcaactttgggcgtagcaatttcaacgtgtcggaagaagcggccaagatcgagctcaccttgtcggaaattccacggaatcggcagccggtggcgtggcgtttccaaattccaccaaacttctgccaaagttgggagctccaacctcaaaagcgtccctgctttgctttccacggtaaccgcatagctgcagcctgcagccactgtggattctacttattcttcatgttcttcatactagtactccagatatcatatttggatatctga

SEQ ID NO: 12830 - DNA, 1863 bp, Oryza sativa
  Clone ID: TFbOSC410211j.C1.o1.fg
atggcctgccgaatcgaggtctggccaccctccgccaccgccggccggagctgccttttcatcagccgaagcggcggcggcggcggtgagcagccggggagattatacaatttgttgccagaagaaatactattgactgagatttggaacagtgataacaacggcaagatcaactccctattaattgttcggaagtgcatcattcctcagcgactccagcatataaataaaatccagaaggttgcaccagagaatatgtcaatgcaggcctctaaccgaccatacagatatccagacaattctcaaataccatactacagccggagttcaatgcatgtggggcaaaatggtacttaccatgtgcaacaaaatcatgaggatctttacgcgtcatctgatgatggttcacagaacggcaattctaaggctcaggggttgcaagcacagtactgcactctagattcatcctcaggcaattttgtgtatccagcacatagctctacatcctcccacataagtgggagccccatttctcagcaagatagccactcagagcacacatctggttcccctgcaagtgcttcatgtgttactgaagttccaggcttgaggtttacaacaattgaggagatagagaatgcaatgtttggacctgaacctgacacagttagctcggactgctccttacttactgattctgctttttaccaagataactggagggagcatctgggaatcaatacaggggacttgaagcaggtaattgcagcatgcggtaaggctgttgatgagaatagttggtatagggacttgctgatatctgagttaaggaacatggtttccatttctggagagccgatgcaacgccttggagcctatatgttggaaggccttgttgccaggctttcttcgactgggcatgccttatataaatccctgaagtgtaaagaacctactagcttcgagctcatgtcttatatgcatctcctctatgagatatgcccgtttttcaagtttggttacatgtctgccaatggagcaattgcagaggctgttaagggcgagaactttgttcacatcatcgacttccaaattgctcaaggtagccagtgggcaactatgatacaggcccttgctgcaaggcctgggggaccaccatacctgaggattactggtatagatgactcgaattctgcccatgcccgaggtggtggactggatatagtcggacggcggttattcaatattgcccagtcatgtggtctgccctttgagttcaatgctgtcccagcagctagtcatgaggttatgcttgaacatcttgatataagatctggggaggttattgttgttaattttgcctaccagctgcatcacactcctgatgagagtgtgggcatagaaaatcaccgggacaggatattgagaatggtcaaggggctctctccaagggtggtaactcttgtagaacaggaagcaaacacaaacactgcacctttcttcaatagatacttggaaactcttgattattacacagctatgtttgaagctatagatgttgcttgcccaagggatgacaagaagcggattagcactgagcaacactgtgttgcaagagatattgttaatttgattgcatgtgaaggtgcagaaagggtggagaggcacgagccttttggaaaatggagggcaaggctttcaatggctggctttaggccgtacccactaagtgcactggtgaacaacactatcaaaaagttgctggatagttaccacagttactacaagctagaggagagagatggtgccctttatcttggatggaagaacagaaagctggttgtatcttctgcatggcggtga

SEQ ID NO: 12831 - DNA, 1464 bp, Oryza sativa
  Clone ID: TFbOSC422725j.C1.o1.fg
atggtccgcaagcgccccgcctccgacatggacctgccaccgccgcgccgccatgtcaccggcgacctgtccgatgtcacggccgccgcggcgggcgcgccgacgttgtctgccagcgcgcagctccccgcgctgcccacgcagctcccggcgttccaccacacggacatggacctcgccgcgcccgcgccgccggcgccgcaacaggtggcggcgggtgagggtgggccgcccagcacggcttgggtggatggcatcatccgtgacatcatcgccagcagcggcgccgcggtctccgtcgcgcagctcatccacaacgtgcgtgagatcatccggccatgtaaccccgacctcgcgtccatcctcgagctccgcctccgctctctcctcaactccgaccccgcgccgccgccgccgccgccgtcgcatcctgctctcctccctcccgacgccacggcgccaccgccaccacccacgtcggtcgccgcgctccctccccctccgccagcgcagcccgacaagcggcgtcgcgagcctcagtgtcaggagcaggagcccaaccagccgcagtcgccgaagccccccaccgcggaggaaaccgccgccgccgccgcggccgccgcagcggcggctgccgcggccgccaaggagcgtaaggaggagcagcggcggaagcagcgcgacgaggagggcctccacttgctgacgctgctgctccagtgcgcggagtcggtgaacgcggacaacctggacgaggcgcaccgcgcgctgctggagatcgcggagctcgccacgccgttcggcacctcgacgcagcgcgtggcggcctacttcgcggaggccatgtcggcgcggctggtgagctcgtgcctggggctgtacgcgccgctcccgagcccgtccccggcgggcgcgcgggtccacgggcgcgtggcggcggcgttccaggtgttcaacgggatcagcccgttcgtgaagttctcgcacttcacggcgaaccaggcgatccaggaggcgttcgagagggaggagagggtgcacatcatcgacctggacatcatgcaggggctccaatggccggggctgttccacatcctggcgtcgcggccgggggggccgccgagggtgaggctgaccgggctgggggcgtccatggaggcgctggaggcgacggggaagaggctgtcggacttcgcggacacgctgggattgccgttcgagttctgcccggtggctgacaaggccgggaatctggacccggagaagctgggcgtcacgcgccgcgaggccgtcgccgtccactggctgcgccactccctctacgatgtcaccggctccgactccaacacgctctggctcatccagaggtactacacttttcttctctcttcccttgtcaactcgggaccccccggaatcatggctactttacaccctatacttctcattgacattgtgacctag

SEQ ID NO: 12832 - DNA, 1263 bp, Oryza sativa
  Clone ID: TFbOSC401762j.C1.o34.fg
atgaacttgaagttgagtcttgccatcgatggtggtggtggtggtgatgcggcggcggcggtggccaagaagagtaaggtggtggggggcggcgccgtcgtcgtcgatggcgtcggcagcagcgccatttgtggcggcgatcggggtagcagggtgagagatcggatggtcaagaaggcggaggagtttgaccatgaaaatggaatggcggcgacgtcgtcggatggtggcggtcgcggcggcgctggcatggatctggcgtcgccgttctaccagttcgcgcacttcacggcgaaccagacgatcgtcgaggccttcgagtccggcggccggcgccgcctccacgtcgtcgacttcgacgtctcgtacgggttccagtggccttcgctgatccagtccctgtcggacgccgccgccgccgccaccagcagttcatcccacgacgacgacgacaacggaggcggctgcggcgacggtccggtgtccctgcggatcaccggcttcggcgcgagcgccgacgagctacgggaaaccgaggcgcggctccggcggttcgccgccggctgccccaacctacggttcgagttcgagggcatcctgaacaacggatcgaacacccgccatgattgcaccaggatcgacgacgacgcgacggtggtcgtcaacctggtgttcccggcgagctcaagagaagcgtgcgccgccacaagaatggcttacatcaactccctgaacccgtccatggtgttcttgatcgagaaacacgacggcggcggcgggctcaccggcggcgacaacaccactacaggaagaagcgcgagcttgctcccgcggttcgccgccaacctccgatacttcgccgccgtgttcgactcgctccacgagtgcctcccggcggacagcgccgagaggctcgccatcgagagggaccacctcgggagggagatcgccgacgccgtggcctcgctagaccaccaacaccgccgccgccatggcggcggcggcggcggcggcgatcacgcagcagctagctggaactggaaggcggccatggagggcgccgggctcgacggcgtgaagctgagctcgaggacggtgagccaggcgaagctgctgctcaagatgaagagcggctgcggcggcggcgggttccgcgtcgtggagggcgacggcggcatggccatgtcgctggcgtggcgtgacatggctctggctacggcgaccttgtggcggcggcgacggcggcggcggcgatgtcggtga

SEQ ID NO: 12833 - DNA, 1520 bp, Oryza sativa
  Clone ID: TFbOSC20523j.C1.o1.fg
atggctgccgcgccgaagccggaggaactcgtcgtcgccatcgagcagccattctccccgtcgctcttcctggacctgcccccgacgccgcaccacgatgacgaccccaacaatgtcaatgacgacctcctcctccccttcatctcacgcatcctcatggaggacgacatcgacgacaagttcttctaccagttccccgaccaccccgccctcctccaagcccagcagtcttacgcccaaatcctccatgcccctgccacatcttcttcctccgacgacaccaccatcaacaacaatacgaccaactccacctccgtccccgacacgctcgccatgcccgaccacgacgccgacacccagagcgcgccggacgacatggagatgctctacatggcgttcctcaagggcagggaggaggccaccaagttcctgcccacaaacaacaccctcttctctggcttcaaggcagagccggtgctggatattcaacccaccttcacgttcggaccaagcggcggcggcaggggccggaagaacaggcacgccgaggaggacgacctggagacggagaccagcaggagcagcaagctgatggcgccagaacatgacgacgccgccgccgccgacgagatattcgacgaaataattctcaatgggtaccagatgatcattaaggggatagatgagctgcgcgtcgccatgggcagccagagccaggccgacaagaacggccgaagagcgtcacgcgcgaagacggcggtggtcgacctacacaccctgctcatccactgcgcgcaggctgtggcgacgggagactggcggagcgccaccgagctgctgaagcagatcaagcagaactcgtcggcgagaggggacgcgacgcagaggatggcgtgctgcttcgctgaggggctagaggcgcgtctcgccggaacggggagccagatgtaccagtcgctcgtcgcgaagcgcacgtcgacggtggacttcctcaaggcgtacaagctgttcacggcggcctgctgcatcaagaaagtgagcgtcatcttctcgaacaagaccatctacaacgccgtcgccgggaggcgcaagctgcacatcgtcgactacggcctcagctacggattccagtggccagctttgttctttttgctgggagccagggaaggcggaccgccggaggtgaggatgaccggcatcgacgtcccgcagcctgggttccggccagccgaccagatcgaggagacaggccgccggctgagcatctgcgcgcgccagttcggcgtgccattcaagttccgcgccattgccgcaaagtgggagacggtccgccgcgaggacctccatctcgacccagaagaagaagaagaggaggtgctcgtcgtgaactgcctccatggattgaacaccctgcaagacgagagcgtggtcgtggacagcccgagccccagagacgtggtgctcgacaacatccgcgacatgaggcctcacgtgttcgtccagtgcgtcgtcaacggcgc

SEQ ID NO: 12834 - DNA, 645 bp, Oryza sativa
  Clone ID: TFbOSC20530j.C1.o7.gp
agagcactgaaactccagaggtcattcaccacaagcacctcatcaggctcgatgtgcaggtcctcggcaccaaccgtctcccactttgctgctacaacagcttggaatctgaatggcacgcggaactcattggcacagctgctcaggcaatgccctgccgcctcaatacgctgaaatggacgaaacccaggctgggggatgtcaacgatggtgatcctcacctctggcggcccgtcttccctgctccccagccggcggaacaggtctggccagtgcagcccacagcgtatgccataatcaactatgtgcagcctcttcttcccttgcacagcttgcatgattgtcatggcagcaaacatgagcgccaccttcttgaagcagcaggctgccatgtagagcttgtacaccttgaggtactccaccaacgacatgcgcacatgattctgatacagatgcttcccgctgccagctagccgtgcctcaagccccttggcgaagtagtgagccactcgctgcatggcgtcgcctgttgccaaagcgtgctgcttgatcttcttcagcagctcgcctgcagattgctggttgtctgtcgccatggcctgtgcacactggatcagcagcaaccgtaagtccaccaccttgcta

SEQ ID NO: 12835 - DNA, 1245 bp, Oryza sativa
  Clone ID: TFbOSC416456j.C1.o5.fg
atggacatggagcatgagctcaggggcggcggcgtcggggcggcggcgcatgggcatggctccatctgcttctccggcgggccggtgctcgtcgacgggcgacgcatccagcagctgctcctccactgcgccgccgcgctcgagtccaacgacgtgacgctggcgcagcaggccatgtgggtgctcaacaacatcgcctcctcgcagggggaccccagccagcggctcacgtcgtggctgctccgcgcgctcgtcgcccgcgcgtgccgtctctgcgcggcggcgccggcgggcgccgccgtggagtttctggagagaggccgggcaccgccgtgggggagggccatgtcggtgacggagctcgccgactacgtcgacctcaccccgtggcaccggttcggcttcacggcgtccaacgccgccatcctccgcgccgtggccggcgcatccgccgtgcactggccgacgctcatcgacgtgctgtccaagcggcccggtggcgcgccggcgatccggatcaccgtgccgtccgtgcgccccgccgtcccgccgcttctcgccgtgtcgagctcggagctcggagcccggctcgccatcttcgccaagtccaaaggcgtgcagctggagttcaacgtcgtcgagagcgcgacgacgacgtctccgaagaagacgtcgacgacgctgtgccaagaactcgcgtccgtgctgtccgacccgccgtcgctggggctaagggacggcgaggcggtcgtcgtgaactgccagagctggctccggcacgtcgcgccggacacgagggacctcttcctcgacacggtccgggcgctgaacccctgcctgctcaccgtcaccgacgaggacgccgacctgggctccccgagcctcgcgtcgcgcatggcgggctgcttcgacttccactggatcctgctcgacgcgctcgacatgtcggcgcccaaggacagcccgcggcggctggagcaggaggcggccgtcgggcggaagatcgagagcgtcatcggcgaggaagacggcgccgagcgctcggagcccggcgcgaggctcgccgagaggatgagccggaaagggttcgccggcgtcgtgttcgacgaggaggcggcggcggaggtgcgacgattgctgagcgagcacgccacggggtggggcgtgaagcgggaagacgacatgctggtgctgacgtggaaggggcacgccgccgtgttcaccggcgcttggacgcccaactag

SEQ ID NO: 12836 - DNA, 611 bp, Oryza sativa
  Clone ID: TFbOSC422742j.C1.o1.fg
acacgctgggattgccgttcgagttctgcccggtggctgacaaggccgggaatctggacccggagaagctgggcgtcacgcgccgcgaggccgtcgccgtccactggctgcgccactccctctacgatgtcaccggctccgactccaacacgctctggctcatccagaggttggcgccaaaggttgtaacaatggtggagcaggatctgagccactcaggctccttcctggcacgttttgtggaggccatccactactattcggcactgttcgactcgcttgatgcgagttacagcgaggatagcccggagcggcatgtcgtggagcaacaactcttgtcgcgggagatccgcaatgtgctagccgtgggcggtccagcacgcaccggcgatgttaagtttgggagctggcgcgaaaagcttgcgcagtcgggcttccgtgtgtcgtcgcttgctggaagcgctgctgctcaggctgcactgctgcttgggatgttcccttccgatggatacacgcttattgaggagaatggcgctctgaagctcggatggaaggatctgtgccttctcactgcctctgcttggcgcccaattcaggcttcgggacgttag

SEQ ID NO: 12837 - DNA, 377 bp, Oryza sativa
  Clone ID: TFbOSC401329j.C1.o97.gp
cggccgcccgtgccagccgagggtgaggcacccgtcggcctcctcgacgctgtgcccctcgccggagaacagcccgaccagcatcctcgcctgccgcagcgcgttcgaaccgagcggcacggcgctcaggccggcgcgcgtgagcctgtcccgccaccgagacagcggctcgtgccgttccctccgggcggcgccctccccgcacacgatgtcgcagatctccctctggaggtacgcctccgccatcgcgttgcccgcgccgccgctggcgctcgccgcgtccagcgagtcgaacaccgcggagtagtagaacagcgcctccgtgaacctgtcgaggaagcccgtcttgttgtggtcggcctcttgctcgatgaccg

SEQ ID NO: 12838 - DNA, 2130 bp, Oryza sativa
  Clone ID: TFbOSC410945j.C1.o6.fg
atgagggcggcgctgttcggtgccgagaggagcggggtagtggaccacggcggcggcgataaggaggagctgttttggccggcggggaagggggggctggtggtggtggagccgaggtcggtgctggactgcacgcgcagcccgagcccgccgtattccacgtcgacgctgtcgtcgtccctgggcggcggctcggcggactcgaccggtgtggcggcggtttcggagagcagcaccgccgccgccggagccaccaaatggggagccccaggcgagcatggtggcggcgggaaggaggagtggggcggcgggtgcgagttgcccccgatacctggagcactggatgtggggctcgtcgggggcgagggctgggacgccacggccacgctcggcaacgcagccgggccggaccagtcgttcttgaactggatcattggggccgccggcgacctggagcagcctggtccgccgcttccagtgctccagcagccgcttattgacaatgcggggttcgggatcccggccgtggacaccatgggcttctctctggatcaccccctcagcggcgtcgcctccgacctctcgtcctccggtgcgcacactgccaccggcggtggcggcaaggcctcattagggttcggtctcttctcgccggaggccacctccctcgagcagccgccgccttcgatgctgtttcacgaaggtatcgacacgaagccccctcttctgggtgcgcagccgcaatttctcctgaaccactaccaaccccagccacccaaccccgccgcagccttgttcatgcctctcccgcccttccccgagcacaatcaccagtcgccgcatctccagccaccgctcaaacgccaccacgccattccagatgacctctacctcgcccgtaaccagcagcagtcatccgcggtggcgccaggtctcgcctattcaccaccgctacatggcccggctccgttccagctccatccttcgccgccaccgattcgcggggcaatgaagtcgacggcggcggaggcggcgcagcagcagctgctggacgagttggcagcggcggcaaaggcaaccgaggctggcaattccgttggcgcgcgagagatattggcgcggctcaatcaacagcttccccaacttgggaagcccttcctccgctccgcctcctacctcaaggaggccctcctcctcgcactcgccgacagccaccatggctcctccggcgtcacctcgccgctcgacgttgccctcaagcttgcagcatacaagtctttctctgacctgtcacctgtgctccagttcactaactttaccgcaacacaggcgcttcttgatgagattggtggcatggcaacttcctgcatccatgtcattgactttgatctcggtgttggtggtcagtgggcttccttcttgcaggagcttgcccaccgccggggagctggaggtatggccttgccgttgttgaagctcacggctttcatgtcgactgcttctcaccatccactggagctgcaccttacccaggataacctctctcagtttgccgcagagctcagaattcctttcgaattcaatgccgtcagtcttgatgcattcaatcctgcggaactcatttcttcctctggtgatgaagttgttgctgttagcctccctgttggctgctctgctcgtgcaccaccgctgccagcgattcttcggttggtgaaacagctttgtcctaaggttgtcgtggctattgatcatggaggtgatcgtgcagaccttccattctcgcagcatttcctgaattgtttccagtcctgtgtgttcctccttgactcgcttgatgctgctggtattgatgctgattctgcctgcaagatcgagaggttcctaattcaaccaagagttgaggatgcagtgattgggcggcacaaggcgcagaaagctatagcatggaggagcgtttttgcagcaactgggtttaagcccgttcagctcagcaacctcgccgaggcacaggcagactgcctcctgaagcgggtgcaggtccgaggattccatgtggagaaacgcggagctgctcttacgctctactggcagcgtggggagcttgtatccatatcatcttggcggtgctga

SEQ ID NO: 12839 - DNA, 535 bp, Oryza sativa
  Clone ID: TFbOSC16404j.C1.o6.gp
tagcccagtcaaaatccaatatcttctattgcccagaaataggtcaaaattcattgaaataggaatcagacataactaatggagtggtacctccacagaagaaatcagctgagttagtcatatttacagtttgctagtttggttcccatgctgaaagagcaaagatgatacgccccttccaaccttgcagcatccatttgttatcttcgtcaactaggaaatccctgtggtaggatttcttcaccttgtatcttgccttcttcaccgtctcttggttcagtggtagctgcttgaagcctgccctgatgttcctcacctgccattgcttgtacgtctctggtctttctactctctcagtgccctcacaagcaaccacattaagagcttcccggccgaagagatctctttctatcagcagcctgttttcgtcgacccgtgaagcagttgtttcaagcatatcaaaaagtgaagagtagtagaacaaagcctccttgaatcgtgtcacgaagaagggcgcattgtaggtgccattgac

SEQ ID NO: 12840 - DNA, 1782 bp, Oryza sativa
  Clone ID: TFbOSC416395j.C1.o2.fg
atggtccgcaagcgccccgcctccgacatggacctgccaccgccgcgccgccatgtcaccggcgacctgtccgatgtcacggccgccgcggcgccgtcgtctgccagcgcgcagctccccgcgctgcccacgcagctcccggcgttccaccacacggacatggacctcgccgcgcccgcgccgccgccgccgcagcagcaggtggcggcgggtgagggtgggccgcctagtacggcttgggtggatggtatcatccgtgacatcatcgccagcagcggcgccgcggtctccgtcgcgcagctcatccacaacgtgcgtgagatcatccgaccttgtaaccccgacctcgcgtccatcctcgagctccgcctccgctctctcctcacctccgaccctgcgccgccgccgccgccgccgccgtcgcatcctgctctcctccctcccgacgccacggcgccaccgccaccccccacgtcggtcgccgcgcttcctccccctccgccgccgcagcccgacaagcggcgccgcgagcctcagtgtcaggagcaggagcccaaccagccgcagtcgccgaagccccccaccgcggaggaaaccgccgccgctgccgcggccgccaaggagcggaaggaggagcagcggcggaagcagcgcgacgaggagggcctccacctgctgacgctgctgctccagtgcgcggagtcggtgaacgcggacaacctcgacgaggcgcaccgcgcgctgctggagatcgcggagcttgccacgccgttcggcacatccacgcagcgcgtcgccgcctacttcgcggaggccatgtcggcgcggctggtgagctcgtgcctggggctgtacgcgccgctccccaacccgtccccggcggcggcgcgtctccacgggcgcgtcgccgcggcgttccaggtgttcaacggcatcagcccgttcgtgaagttctcgcacttcacggcgaaccaggcgatccaggaggcgttcgagagggaggagagggtgcacatcatcgacctggacatcatgcaggggctccaatggccggggctgttccacatcctggcgtcgaggccgggggggccgccgagggtgaggctgaccgggctgggggcgtccatggaggcgctggaggcgacggggaagaggctatcggacttcgcggacacgctgggattgccattcgagttctgcccggtggctgacaaggccgggaatcttgacccggagaagctaggcgtcacgcgccgcgaggccgtcgccgtccactggctgcgccactccctctacgatgtcaccggctccgactccaacacgctctggctcatccagaggttggcgccaaaggttgtaacaatggtggagcaggatctgagccactcaggctccttcctggcacgttttgtggaggccatccactactattcggcactgttcgactcgcttgatgcgagttacagcgaggatagcccggagcggcatgtcgtggagcaacaactcttgtcacgggagatccgcaatgtgctagccgtgggcggtccagcacgcaccggcgatgttaagtttgggagctggcgcgagaagcttgcgcagtcgggcttccgtgtgtcgtcgcttgctggaagtgccgctgctcaggccgtgctgctgcttgggatgttcccttccgatgggtacacgctcattgaggagaatggcgccctgaagcttggatggaaggatctgtgccttctcactgcctctgcttggcgcccaattcaggcttcgggacgttag

SEQ ID NO: 12841 - DNA, 1650 bp, Oryza sativa
  Clone ID: TFbOSC403595j.C1.o11.fg
atggccggtatcgcggctctagccaactgccaaagtgatgagaggagttcgtcttgcggcgctgcgttgctggagttcatggggccagccgcgccgccgtccgaagccgccgcggcggccgacgatgtggtgctcccgtacatctcgcgtattctcatggaggaggacatcgacgacgacatgttcttctgcctgtaccccgaccaccccgctctcctcgaggcgcagcagccgttcgcccagatcctctcctcctcctccagcatcgccggtgaggtgaacagtgcacccatggaggattctgctgccttgatgatgcaggggagcggcaatggtaggggacggaagggtagtaagcatggcggggacgagctggaggccgaggtgggcagggcgagcaaactgatggccacgccggaggaggaggaggacgacgacgatggcgtcggcgagatgttggagaagatgatgctcaacggggacgaggacgaggcattccacggggagacgaacgcgccgcgcgtccccgcggagaagaagtgcgggaaggcggcgcggcggaggaggaggcaggccaaaggggaggtggtggacctgcgcgagctgctcatgtcgtgcgcgcaggcggtggcatcgggcaaccgccggagcgccggcgaactcctggagcagatcaagcggcactcgtcgccgacaggggacgccaccgagcggctggcgcattacttcgccgatggcctggaggcgcgtctggccggcgcggcgagcctggagcgccggctggtcgcgtccgcggaggagcgcgcgtcggccatggagttgctggaggcgtaccaggtgttcatggcggcgtgctgcttcaagtgggtggcgttcacgttcgccaacatggccatcctccgcgcggcggaagggaggaacaggctgcacatcgtggactacggtggtcagtaccacggcctccagtggccatccttgctgcagcggctggcggagagggaaggcgggccgccggagttccgcgccgtggcggcggcgaggtgggagacggtcaccgccgaggacgtcgtcggcgtcgaccccgacgacgaggcggcggtcgtcgtgaacgacgtgctcagcctgggcaccctgatggacgagagcggcgtgttcgacgacccgagcccgcgggacacggtcctgggcagcatccgcgacatgcgcccggcggtgttcgtccaggccgtggtgaacggcgcccacggcgcgcccttcttcccgacgaggttccgggaggcgctcttcttcttctcggcgctgttcgacatgctgggcgcgacgacgccggaggaggggagccacctgcgggtggtgctggagagggacgtgctgaggcgggcggcggtgggggtgatcgcgggggaaggggcggagcgggtggagcggccggagacgtacaggcggtggcaggcgaggaatcggcgggcggggctgaggcaggcggcggtggagggcgacgtggtggaggcggtgaggagaagggtgaggaggaggcatcacgaggagttcgtgatcgaggaggatgcagggtggttgctgcaggggtggaaggggcgcatcctgtacgctcactcggcgtgggtcgtggcagaggatggtgcgcactag

SEQ ID NO: 12842 - DNA, 784 bp, Oryza sativa
  Clone ID: TFbOSC422742j.C1.o1.gp
acaatctaattgaactcactaaccaccagatatgatcattttgtgatcatatgaatttcatgtcagtaaggatccttttgcgtgttcccccaaaacaatgtcagcaaggattaagcactacaaaattgcaaaataaactaaattggacagaatggttaactggagcatgaacagaataaaagctaaagctaagttgcacattagtaactaccactgtgtggagatctgaaaattagtgatcagaatttttttttatttttcttttctcagaattgaccaaattgagcagctaaaagaagcaaaaggactaggtaattgcacctaagtaagatcaagtgatacttcagctctataaattccccctcaatactaacgtcccgaagcctgaattgggcgccaagcagaggcagtgagaaggcacagatccttccatccgagcttcagagcgccattctcctcaataagcgtgtatccatcggaagggaacatcccaagcagcagtgcagcctgagcagcagcgcttccagcaagcgacgacacacggaagcccgactgcgcaagcttttcgcgccagctcccaaacttaacatcgccggtgcgtgctggaccgcccacggctagcacattgcggatctcccgcgacaagagttgttgctccacgacatgccgctccgggctatcctcgctgtaactcgcatcaagcgagtcgaacagtgccgaatagtagtggatggcctccacaaaacgtgccaggaaggagcctgagtggctcagatcctgctcc

SEQ ID NO: 12843 - DNA, 3157 bp, Oryza sativa
  Clone ID: TFbOSC20530j.C1.o1.np
cacgagatttgcatgaagggggtgaagcagctgagcctcaagtccaagagcagcagcagcaagaaggcgcgggggagacgcactgtgatccacaccgagccggtggacctgcacaacctgctgctccactgcgcgcaggcggtggccacggacgaccgccggagcgcgcacgagctgctgaggcagatcaagcagcactcgtcggcgtggggagacgccggacagaggctggcgcactgcttcgcgcaagggctggaggcccggctcgccggcacggggagccaggtgtaccagtcgctcatgtcgcagcgcacctccgtggtcgacttcctcaaggcgtaccggctgtacatggaagcctgctgctgcaagaaggtggccttcgtcttctccaacaagaccatctacgacgccgtcgccgggaggcgcaagctgcatatcgtcgactacggcctcagctacgggttccagtggcctgggttgctgcgcgagctcgcggcacggagaggcggcccaccggaggtgaggatcaccggcattgacctacctcagccgggattccgccctgaccaacacatcgaggagaccgggcggcggctgagcaggtacgccgacgagctcggcgtgccgttcaagttccacggcatcgcggcgacgaagaaggagagcgtgaggcgggaggagctgggcgaggcggaggaagacgaggtggtggtggtgatcagcctgtgccatttcaggaacgtgatggacgagagcctgcaggaggacagcagcaggagccccagggacgaggtgctggggaacatccgcaggatgcgccccgacgtgttcatccatggcatcatgaacggagcctacggcgcgacctacttcctgacacgcttccgggaggctctctactactacgcggcgcagttcgacctgctggacgcgacggtggggcgggagagccacgagcggatgctggtggagcgggacatcttcgggcgggcggctctgaacgtgatcgcctgcgagggcgcggagcgggtggagcggccggagatgtacaagcagtggcaggcgaggaaccagcgcgcggggctgaggcagctgccgctgaatccgcaggttgtgaggctggtgctggacaaggtgagggacaagtaccacaaggacttcgtggtggacgaggatcaacgctggttgctgcacaggtggaagggccgcgtgctctacgccttgtccacttgggttgcccaacactagctcttaggcgaattaattttgaaaaatatattgtctattcttttttctcagaaatactcaggatacaatttttttggcacaaatataaactcatgatatgacgagcaagagcaaaggctaccaccattgaatgattatcagcatggccaacccagaggatttcttttgggaggccctcctcaaggagaacgaagcaccatccccatcacctgtcttctttgaactccccccaacacccctcgccaacagtgatggcagtacagatccctcgtcattgttggacaaccaacttctctcctacgtcactagtatgctcatggaggatgagatgggttcttctgctgctgtcaccaacttgcagtgtgtcaacaggggcagcacagaggaggccaacaatatgttgccgggcagtgaagtggttagggcgttcttgaagggcatggaagaggccagcaagttgctgcctagaaacaacagcttcagaatgctggagacggtggatcaagtatcaagtcatggtcattgtaggggaggaaagaagaaaaaccatgacagggatgagcagcagctggaggaggaactggggaggagcagtaaattagctgccatgacgaatgcagggacggaggaggctggtgctcgcgagttgctggacgaactgatgctgcactcgcacgagacatgcatcaaagacatggagaagctgcgcatcgacatggacaatgaggcagataagaccatcaaaaagaagggcaagaaaggcagtagtagcaaggtggtggacttacggatgctgctgatccagtgtgcacaggccatggcgacagacaaccagcaatctgcaggcgagctgctgaagaagatcaagcagcacgctttggcaacaggcgacgccatgcagcgagtggctcactacttcgccaaggggcttgaggcacggctagctggcagagggaagcatctgtatcagaatcagatgcgcatgtcgttggtggagtacctcaaggtgtacaagctctacatggcagcctgctgcttcacgaaggtggcactcatgtttgccgccatgacaatcatgcaagctgtgcaagggaagaagaggctgcacatagttgattacggcccgcgctgtgggctgcactggccagacctgctccgccggctgggaagcagggaagacgggccgccggaggtgaggatcaccatcgttgacatcccccagccggcgtttcgtccatttcagcgtattgaggaggcagggcattgcctgagcagctgtgccaatgagttccgcgtgccattcagattccaagctgttgtagcagcaaagtgggagacggttggtgccgaggacctgcacatcgagcctgatgaggtgcttgtggtgaatgacctctggagtttcagtgctctgatggacgagagtatcttctgcgatgggccaaaccccagggatgttgccctccgtaacatcagcaagatgcagccagacgtgttcatccaaggcatcatcaatggtggctatggtgcctccttcctgtcacgctttcgtggagcgctcttgtattactcggctctgtttgacatgctggacgccaccaccccaagggagagtgggctgcggctggcgctggagcagaacgttctggggccttatgccctcaacgccatcgcctgtgagggtgcagacctggtggagcgccctgagaagtacagacagtggcaggccaggaaccaccgtgcaggcatgcagcagctgaaactgagaccagatatcgttgatacaatcagggaagaggtgaacaagtaccaccataaggactttctgctgggagaggacgggcagtggctgctgcagggatggatggggcgagtcctctttgctcactccgcatgggtgccacaa

SEQ ID NO: 12844 - DNA, 2835 bp, Oryza sativa
  Clone ID: TFbOSC400622j.C1.o58.fg
atgccctttggtgggagcgcgcgagaggggcacgcggggacactgctgcaacaccacctcatacacggcgttggcctcgccgcggccggcaagctcgtctcctcctcctccgccgccgccgccgccgccggagcaggtgggttctgggagccaaggtcggtgctcgaccaccgccacagcccgagccccagcccgcctacctcggcttccacgctgtcgtcgcctctcgccgacgtggcggccctcgccggcgccaacgccaagaacgtctccgtctccccgccgccgccgggatggggaacgggaggaggaggtggtgggggggaggaggtggtggcggcgaaggaggagtgggtgcaccagctcacgccgcttgatatggggctcggcgccggcgaagggtgggatgccgccgggaacgtgctgtccgacgcggcggcggcggcgacgtcggggatggcgccggacaacacgttcctccgctggatcattggcggcggcgaggacgcgtccgccgcgatggcaggggtcatggacccgccggtgctcgagctcgaccatggcggcggcggcggcggcgccgcgcccgccgcgttcgggccgttcgcgccgccgccggccatggaggacacgaagcccgtggtgccgttcgcggcggggcaccccccgccgaacttcctcctccaacaccaccaccaccacccgcagccgcacgcggcgttcttcggcgcccaccacccgtcgttcgacgcggcgccgccgccttccaagcggcaccacccgatggccgccgcgcctgcgccgaagctgcctccgttcccggcgggcgggttcgtccccgccctgaagccgaaggcggaggcggcgaacgacgaggccgccgctgcggtcgaacagctagccgaggcggcgaagctggccgaggccggcgacgccttcggcgcccgcgagatattggcgcggctcaattaccggctccccgccgcccccacggccgggacgccactgctccgctcagccttctacttcaaggaggctctgcgcctaacgctctcccccaccggcgacgccccagcgccatcggcgtcgacgccgtacgacgtggtcgtcaagctcggcgcctacaaggccttctcggaggtgtccccggtgctccagttcgcgcacctcacctgcgtccaggcggtgctcgacgagctcggcggcgccggatgcatccacgtgctggacttcgacatcggcatgggcgagcagtgggcgtcgctgatgcaggagctcgcgcagctccgcccggccgccgcgctcaaggtgaccgcattggtgtccccggcgtcgcaccacccgctcgagctgcagctcatccacgagaacctctccggcttcgccgccgagctcggcgtcttcttccacttcaccgtcttcaacatcgacaccctggaccccgccgagctcctcgccaacgccaccgcgggcgacgccgtggccgtgcacctccccgtcggccccgcccacgccgccgcgacgccggccgtgctccgcctcgtgaagcgcctcggcgccaaggtggtggtctccgtcgaccgcggctgcgaccgctccgacctccccttcgcggcgcacctcttccactccttccactccgccgtctacctcctcgagtccatcgacgccgtgggcacggacccggacaccgcgtccaagatcgagcggtacctcatccaccccgccatcgagcagtgcgtcgtggccagccaccgcgccgcctccgccatggacaaggcgccgccgccgccgtggcgcgcggcgttcgcggcggcggggttcgcgccggtgcaggcgacgacgttcgcggagtcgcaggcggagtcgctgctgagcaagcttggctctgcttctgcttctgcttgtgcagatgcagagtgccatgtcgcaatggtgttgtactgccctcttatcaaagaaagagagagaaaacgatggaatgtacacctggttattgtattagttgaactaaacacaccccaagctgaaaagaaccaaagggaagtaggaggatatgggggagagaaaaataaaatcctgtcagaatataatctgctgcctctgcctgtgctggagatgcaaaggaaggggggcaatcatggtgtaaagcgtccatgctttactgaaatggcggcaaagcatcttagggtaaggacaggcacatcaagaacagcagcagcaacattggatgggtacaccactttaacctgggactcagctccagaatggccatggcaccgcatgcacaaaccggataggttgagatgggctcactggagagtcactggagagccacagtgtgcagcaggagcagtagcaataggtcaggcaagtggccacactggagtacgggacactgcaggagcaaactggcaagagacctgcatagtagttacagagatggatgttaagcttgctgataaattcagaaaaaagtggtaccacagttcaaaacttcaaaaaagaaggtgcactgttggtttaattaagcaggacttgaaagttcaaaaccagggaggggaatcagaagccagtagacacaaaggcctccagatctcattcagacaggttcagatttcattgcggaagccaaataggaaatgcaagcatagtggccagactgtaaagttgatcaatgagaattgctattacctctccactaaaagaaacaacttaaagataaaagaggtcaactacatatgctatatttatgctgaagaattgcatccactcaaagtcatgttcagaaatacacaagcaaagatatgccaaatagatgtccaaaaatcctag

SEQ ID NO: 12845 - DNA, 1635 bp, Oryza sativa
  Clone ID: TFbOSC400135j.C1.o1.fg
atggctgatactccaacttcccgaatgattcatcccttcagcaatataccgagccaaaacctgaagcagttccagtattctgataatccacagcacccttgccacccttatagggcaccttcagacacccacgttgtgccacatcattatggcctaaagtcacattcaccggatgctggttatgaaagccaggctactcctaacaagtacacattggactcctctgaaggtgctggttgtatgagacatgattctccttccagtcaaagtttcacaaccagaagtggtagccctctatctcaggaagacagccactctgactcgactgatggatctcctgtaggcgcctcctgtgtcactgaggatcctaatgatctgaagcaaaaactgaaggatctcgaggccgttatgcttgggccagactcggaaatagtcaacagccttgagaattcggtggcaaaccaactttccttggagccggagaagtgggtgcgcatgatgggcattcctagaggcaacttgaaagagctactgattgcctgtgctagagctgtggaagagaagaatagctttgctattgatatgatgattccagagctgagaaaaatagtttcggtatctggtgagccacttgagaggttgggagcctacatggtagaagggcttgttgccaggcttgcctcctctggcatttcaatctacaaagctttgaaatgcaaggaaccaaagagctctgaccttctgtcttacatgcacttcctgtatgaggcctgtccctacttcaagtttgggtatatgtcggcaaatggtgctattgcagaggctgtcaagggagaagacaggattcatatcatcgacttccatatctctcaaggggctcagtggatctctctccttcaggcccttgcagccaggcctggtggaccaccaactgtaaggatcactggtattgatgactcagtgtcagcttacgcacgaggcggcgggctagagctggtcggaaggaggctgtcgcacatcgccagcctgtgcaaggtgccctttgaattccacccacttgctatctccggcagcaaggtggaggcagcacatctcggagtcatccccggggaagccctcgccgtgaacttcaccctggagctgcaccacattccagacgagtcggtgagcacggcgaaccaccgtgaccgcctcctaaggatggtgaagagcctgtcgccgaaggtactcaccctggtggagatggagtccaacacgaacacggcgccattcccgcagaggttcgcggagacgctggactactacaccgccatcttcgagtccatcgacctgacgctgccgagggacgacagggagaggatcaacatggagcagcactgcctcgcgagggagatcgtcaacctcatcgcgtgcgagggggaggagagggcggagcggtacgagcccttcggcaagtggaaggcgcgcctcaccatggccgggttcaggccgtcgccgctcagctcgctggtgaacgccaccatcaggacgctgctgcagagctactcggacaactacaagctcgccgagagggatggggcgctctacctcgggtggaagagcaggcccctggtggtctcgtcggcgtggcactag

SEQ ID NO: 12846 - DNA, 2253 bp, Oryza sativa
  Clone ID: TFbOSC401488j.C1.o12.fg
atgtccgcctcgcagaatttgcatcgtctccctgagttctgtgtgatccctgcaacagcatgctcgagggagccaggacttcctaggatcgtcataagatcaaatatgggctccgatgacaataaaagatttgatgattttcatgtcatcacaaacggaccaggaagtgatgcctattctaatgaggaatccatcaatctagattcctatattgcaccaagcacatccttctgtagcaaaatctacaacccccaattatacgtggagaaaggaaatgggacaacagattggtgccaaactagtggaggagactatcctgagaaaagcagcataaattcagatataactctcagctacatagataagatactgatgcaggaggacattgatgacagaggcaatgaagatactgctcttcaagctatggaggagcccttctatgaacttcttggagaaaagtatccggcattccctcagcaacaaccactttgtgtatgtgatcacctgcagaacctcagtgccaacactgacaagtctaatggtcacgcatgcaatacctggtctgtcactagaatgacaaacattagctcaagtatgaattccaatggcaactttcaagggtttcagtttccatggagtttgtcttccattactagagagacagaacagttcactcatcactcaaatagaatggttgttggtctaaaagtggatggcctttccatttccgaaaagcctagccaggacaattgttcacttcaaattgatgcgcattacatgaggaagcatccattgtttgaggttcatgatagaaaaagttatccgtgtattgaagatcttgatttgttagaaggaaggagcaacaagcagtatgctatttactatgatgaaccgattcgggatgagatgtttgacaacgttctactatgttctgatcataagcctctagatgaaggtgttagtttgagcagagccatgacaaacaattcaagcaagtcttcacaaattggacaaggaaaaacatcagctcggcgaaagacaacaggcaaaaggatacaaaagagagatgttgtggatctaagaaccctccttatcaattgtgcacaagcagtatctgtgagcaaccatagcctagctagtgacatactgaagataataagacaccatgcttcacctaccggggatgattcccaaaggctagcactttgcctagcgtattgccttgatgtacgattaacgggaactggaagtcagatataccacaagttcatcaccaaaaggaggaatgtaaaggatattctaaaggtccacattatagattttggcatttgctttggtttccaatggccatcactatttgaagaacttgcaaaaatagaagatggaccacctaagcttcggattactggtatagaattacctgagtcaggcttccgaccatatgctagaagtaataatattgggctgcgattagctgattatgctaaaacatttaacataccctttgaatatcagcatatatcatcaaataaatgggaagccctctctcctgaagattttaatattgagaaagatgaagttctcatagtcaattgcatttacagaataaaggatcttggtgatgagacaatatcaattaacagtgcaaggagtagggtgctcaatacaattagaatgatgaagcccaaagtttttgtccaaggagtgttgaatggatcttatggtgtccccttctttttaacacgtttcaaagaggtcatgtaccactacaattcattatttgatatgcttgataaaaatattccacgagataatgagacaagaatgataatagagagagatatctatcaatatattatgctaaatgtcattgcatgtgaaggaccagagaggattgagaggccagagagttacaagaagtggaaggtaagaaaccttaaggcaggactggtgcagcttccattgaatccagccatcgtcagagaaacacaagatatgagttcagacaaggctagtataagattatgtttagtatgttacggcaacatatacgattcctaccacgtatcaggtgatactcgtgaggtatcatgtgatacctatcaggtatcagatgacttctaccacgtatcaggtgatactcgtgagatatcatgtgatacctatcaggtattagacgatttctaccacgtatcgggtgatacttacgagatatcagatgatacctaccggatatcaggtgattcctactag

SEQ ID NO: 12847 - DNA, 1482 bp, Oryza sativa
  Clone ID: TFbOSC410358j.C1.o2.fg
atgcaagattctctaggcttgatgcagtttcttgatcatcaccagtatctatacagcagcagtagcagcaacctgccactgcagcagcctttgttgtcccatcaccaccgatttcttgaagccaatgagggttgcgccggcgaggacgactcgccggagttcgtcgagccgccggcggcggcggcggcggccgggacgttcgagcaacggccggagttaggagcgtgcaaggaggtgtactccgaggaaggcggcgcggcggaggagaggacgggcgtggcgatggcgggggccgacgtcgaacaggtggcggtggaggatgaggaggaggctcacggcgtgcggatgatcgcgctgctgatggagtgcgcggcggcgatgtcggtgggcaacctcgcgggcgccaacggggcgctgctcgagctgtcgcagatggcctcgccgtacgcggcgtcgtgcggcgagcggctcgtggcctacttcgccagggccatggcggcgcggctggtggggtcgtgggtcggcgtcgtggcgcccatggcgccgccgccgtcgtgcggggccatcaacgccgcgttccgggcgctgtacaacgtcgcgccgttcgcgcggctcgcctacctggcgtgcaaccaggccatcctcgaggcgttccacggcaagcgcctcgtccacattgtcgacctcgacgtcgtccccggcggcgcgctgcagtggctctcgctcctcccggcactggcggcgcggccgggaggcccgccggtgatccgcgtcaccggcttcggcatgtcggcgtcggtgctgcacgacaccggcaaccagctcgccgggctggcgaggaagctgtgcatgtttttcgagttctacgccgtcgcgaagcgaccgggagacgccgacgcggtcgccgacatgcccggaaggaggccgggggaggcggtggccgtgcactggctgcgccacgccatgtacgacgcggccggcgacgacggcgcctccatgcggctggtgcggtggctggagccggcggcggtgacgctcgtggagcaggagagagcacacggcggcggcggcggccacgggcgcttcctggacaggttcgtctccgcgctgcaccactactcggcggtgttcgacgccatgggcgcgtcgcggccggacggcgaggacgcgagcaggcatctggcggagcacggcgtgctcggcagggagatcgcgaacgtgctcgccgtcggcgggccggcgcggagcagcggccgggaggggcccgggagctggcgggaggtgctcgcccggcacgggttcgcgcacgccggcggcggcggcggcgggcgcgcgcagctggtggccgcggcgtgtccgggcgggctgggctacacggtggcgggagaccacgacggcacggtgcggctggggtggaagggcacgccgctctacgcggtgtccgcgtggacgtggtgctccccgcctcacgcgcgtgcttaa

SEQ ID NO: 12848 - DNA, 706 bp, Oryza sativa
  Clone ID: TFbOSC422725j.C1.o1.gp
cgtgttggagtcggagccggtgacatcgtagagggagtggcgcagccagtggacggcgacggcctcgcggcgcgtgacgcccagcttctccgggtccagattcccggccttgtcagccaccgggcagaactcgaacggcaatcccagcgtgtccgcgaagtccgacagcctcttccccgtcgcctccagcgcctccatggacgcccccagcccggtcagcctcaccctcggcggcccccccggccgcgacgccaggatgtggaacagccccggccattggagcccctgcatgatgtccaggtcgatgatgtgcaccctctcctccctctcgaacgcctcctggatcgcctggttcgccgtgaagtgcgagaacttcacgaacgggctgatcccgttgaacacctggaacgccgccgccacgcgcccgtggacccgcgcgcccgccggggacgggctcgggagcggcgcgtacagccccaggcacgagctcaccagccgcgccgacatggcctccgcgaagtaggccgccacgcgctgcgtcgaggtgccgaacggcgtggcgagctccgcgatctccagcagcgcgcggtgcgcctcgtccaggttgtccgcgttcaccgactccgcgcactggagcagcagcgtcagcaagtggaggccctcctcgtcgcgctgcttccgccgctgctcctccttacgctccttg

SEQ ID NO: 12849 - DNA, 2961 bp, Oryza sativa
  Clone ID: TFbOSC16404j.C1.o7.gm
atggagagcgagctaggagcgctgtcgcacgtgcggcaggcagcgggcgcgcccgccgaggcggccgcatccgaggcgactacgtcctcgcccaccatcgggatcatccaccagatcttgaacctgaacagggacaaccacttccaccccctgcgcacccaacaagagaacgaacccatcacaaaatcagcaccaccggcggcggcgcacatcgcagtctctcctatgggattgcctgttatggagcatcttggaagctcaagcattgtgcgtgggagaggcaagaacaagaggatttggacgtactttgaggatgaggagctgatcaaggcattgttcgagattgctttggatccaagctggaaatcagaagggggtttcaaaaatggatactgccaagttctagagaacgtgcttgctaagaagttgccaagttctggccttactgctgttccgcacatagagtcgagagtaagacactttaggaccaagtttggcgcaattgaagtgatgctaaccaaaagtggcttttcttgggatgacaatagaaagatgatacaatgtgagaaacaacaatacgatgatcattgcaggaaaaacaatgaggcaaagggtctatatggtgtagcattccctcactatgatacactagctgcaatttatggtaaagacattgctactggagaaggtgcagagggtcttggtgaggctgttgctaatatggagaaagaaattgttcaagatattcaagatgaagaagatgaggaggatgaagagagagtgtctagagaaacgcctcggcggagcatcgattcagctgcagctcgacggagcatcgattcagctgcagctcgacggagcatcgattcagccacacctcgacggagcattgattcaactgcttcaagctctaagaagaggaagaaagacagcaacaaactgaaaaataccttgtcaagtgacccttttatggatgtctttgccaatgttcaaggtgatctgagggatgttacaaagcatgtgggagcaatggtggcatctatgcaacgtgaagctgagatccaagagaaggcaatggctgaggaggacccactacaaaaaattcagaacgaagctattcttgagtgtcaaaagattggattgactggtactgaagttgtcaatgctgcagctgcttttgtaaaagtgccggctcaaatgagtatgcttctcgctcttccagagtctctcaggagggagtacgtactgaaaatacttgctgaggatctgtctgaatccgccgacgatgcggtcctagcatacatcaatcagtttcttcttgaagatgaggaagatgaatcttgtcctggcaccatcacatcggtggaggactctgccctcctcgccgtcgagaagccattcgttgacatcctcactgctagccaagaggcctgtcaagagaattcttggatagattcttgttgtgatttcacggggaatggaggattgcttgatacgttcacaaccacacatgccgcttgccagccagcgccttgtgaatttgagaaggagaagggggagtgtgctgttcataaaggccggaagaacccgcatgatgattgcctattgttcgaggaagagagcaggaggagcaagcagttggcagtgtctgaggaggagactgtcagagagatgtttgacaaggtgcttctgtgtaatggcgaatgcgagctccgggcaccactgccagctgaagcacggaactgcggggtgtacgtgaaaggatctggaaataagagaggccgaaagaaaggaaaatctggagcatctgcagaggatgatgcggttgatctcactaccctactcattcattgtgcccaggccgctgcaatcgatgatcaccggaactccaatgagttgctgaaacaaattaggcagcgttcttctgcatatggagatgccggtcagaggttagcacattgttttgctaatgcgttggaggctcggctagctggcactggcagcaacatttaccgttcacttgctgccaagcgaacttctgtttatgacatattgaatgcattcaagctgtatgttacagcatgcccgttcaagaaaatatcgaacttcttctcgatcgaagccatcttgaacgcatccaagggtatgacaaggttgcacattgttgactatggtatacagtatggattccagtggccaatcttcttccagcggatctcgaagagacctggtggccctccaagtgttcgaatcaccggtgttgacttaccacagccgggattccgccctgcacaactcattgaggcgacgggccgtcggttgcatgactatgcccgtatgttcaatgttccatttgaataccatgctattgctgccaagtgggacactatccgtgtcgaagatcttaagatagacaaagacaaggatgaacttcttgttgttaactgccttttccggatgagaaacatgatggacgaaatggtgacagatgacagcccaagaatgcaggttctgaagacaataagaaagatgaatccaaatttgttcatccatggcgttgtcaatggcacctacaatgcgcccttcttcgtgacacgattcaaggaggctttgttctactactcttcactttttgatatgcttgaaacaactgcttcacgggtcgacgaaaacaggctgctgatagaaagagatctcttcggccgggaagctcttaatgtggttgcttgtgagggcactgagagagtagaaagaccagagacgtacaagcaatggcaggtgaggaacatcagggcaggcttcaagcagctaccactgaaccaagagacggtgaagaaggcaagatacaaggtgaagaaatcctaccacagggatttcctagttgacgaagataacaaatggatgctgcaaggttggaaggggcgtatcatctttgctctttcagcatgggaaccaaactag

SEQ ID NO: 12850 - DNA, 3432 bp, Oryza sativa
  Clone ID: TFbOSC400939j.C1.o12.gm
atggagagcgagctaggagcgctgtcgcacgtgcggcaggcagcgggcgcgcccgccgaggcggccgcatccgaggcgactacgtcctcgcccaccatcgggatcatccaccagatcttgaacctgaacagggacaaccacttccaccccctgcgcacccaacaagagaacgaacccatcacaaaatcagcaccaccggcggcggcgcacatcgcagtctctcctatgggattgcctgatcgagcgccgccgcagcttctcctccacatcgcgcgcgtcgccatcgccgccccctctccctgtgcgcgtcgccggcgcctcctcctcaccctgtgcgcatcgccggcgcagccccctcgccccgcgcgtgtccccgcgcctccccatcgtcccgcgtgtcgccggcgccgtcccctcaccccccgcgcatcgccgacgccgccgtcttgcgctcctccaccaccgccgtcttccgatgtggatcttgaccggaagaactccgggaacaagggcgaggctgtgaagcagggggctggtgccatcaaccacatcggacttccgtcgttgctgtcatctatcaatcacctcgccgttatggagcatcttggaagctcaagcattgtgcgtgggagaggcaagaacaagaggatttggacgtactttgaggatgaggagctgatcaaggcattgttcgagattgctttggatccaagctggaaatcagaagggggtttcaaaaatggatactgccaagttctagagaacgtgcttgctaagaagttgccaagttctggccttactgctgttccgcacatagagtcgagaaaaaacaatgaggcaaagggtctatatggtgtagcattccctcactatgatacactagctgcaatttatggtaaagacattgctactggagaaggtgcagagggtcttggtgaggctgttgctaatatggagaaagaaattgttcaagatattcaagatgaagaagatgaggaggatgaagagagagtgtctagagaaacgcctcggcggagcatcgattcagctgcagctcgacggagcatcgattcagctgcagctcgacggagcatcgattcagccacacctcgacggagcattgattcaactgcttcaagctctaagaagaggaagaaagacagcaacaaactgaaaaataccttgtcaagtgacccttttatggatgtctttgccaatgttcaaggtgatctgagggatgttacaaagcatgtgggagcaatggtggcatctatgcaacgtgaagctgagatccaagagaaggcaatggctgaggaggacccactacaaaaaattcagaacgaagctattcttgagtgtcaaaagattggattgactggtactgaagttgtcaatgctgcagctgcttttgtaaaagtgccggctcaaatgagtatgcttctcgctcttccagagtctctcaggagggagtacgtactgaaaatacttgctgggtggatcttgttcgaagattcaagagtcatgttggattctggttcttatgatgatgttgactatggggatttgttctccatccccaatccacctgcgcctcacttgctcaatttccccctccagttcttcccttccaacggattcatcagttctgctgatgattcccatagatcaccagctggtatgtttggctcgaccccaagccccacatcaaccacaaccgagttggaaaattcagaggatctgtctgaatccgccgacgatgcggtcctagcatacatcaatcagtttcttcttgaagatgaggaagatgaatcttgtcctggcaccatcacatcggtggaggactctgccctcctcgccgtcgagaagccattcgttgacatcctcactgctagccaagaggcctgtcaagagaattcttggatagattcttgttgtgatttcacggggaatggaggattgcttgatacgttcacaaccacacatgccgcttgccagccagcgccttgtgaatttgagaaggagaagggggagtgtgctgttcataaaggccggaagaacccgcatgatgattgcctattgttcgaggaagagagcaggaggagcaagcagttggcagtgtctgaggaggagactgtcagagagatgtttgacaaggtgcttctgtgtaatggcgaatgcgagctccgggcaccactgccagctgaagcacggaactgcggggtgtacgtgaaaggatctggaaataagagaggccgaaagaaaggaaaatctggagcatctgcagaggatgatgcggttgatctcactaccctactcattcattgtgcccaggccgctgcaatcgatgatcaccggaactccaatgagttgctgaaacaaattaggcagcgttcttctgcatatggagatgccggtcagaggttagcacattgttttgctaatgcgttggaggctcggctagctggcactggcagcaacatttaccgttcacttgctgccaagcgaacttctgtttatgacatattgaatgcattcaagctgtatgttacagcatgcccgttcaagaaaatatcgaacttcttctcgatcgaagccatcttgaacgcatccaagggtatgacaaggttgcacattgttgactatggtatacagtatggattccagtggccaatcttcttccagcggatctcgaagagacctggtggccctccaagtgttcgaatcaccggtgttgacttaccacagccgggattccgccctgcacaactcattgaggcgacgggccgtcggttgcatgactatgcccgtatgttcaatgttccatttgaataccatgctattgctgccaagtgggacactatccgtgtcgaagatcttaagatagacaaagacaaggatgaacttcttgttgttaactgccttttccggatgagaaacatgatggacgaaatggtgacagatgacagcccaagaatgcaggttctgaagacaataagaaagatgaatccaaatttgttcatccatggcgttgtcaatggcacctacaatgcgcccttcttcgtgacacgattcaaggaggctttgttctactactcttcactttttgatatgcttgaaacaactgcttcacgggtcgacgaaaacaggctgctgatagaaagagatctcttcggccgggaagctcttaatgtggttgcttgtgagggcactgagagagtagaaagaccagagacgtacaagcaatggcaggtgaggaacatcagggcaggcttcaagcagctaccactgaaccaagagacggtgaagaaggcaagatacaaggtgaagaaatcctaccacagggatttcctagttgacgaagataacaaatggatgctgcaaggttggaaggggcgtatcatctttgctctttcagcatgggaaccaaactag

SEQ ID NO: 12851 - DNA, 1144 bp, Oryza sativa
  Clone ID: TFbOSC101577j.C1.o27.gp
gcctaaaattctttttttttwaagaaaaaaaagtacacatccacatatatccccaacaaaacagatcgaaatgttgtaaacctataaatgaaataaaaagttactaaaacagagactactgaaactaaaaaggcactactgattttatctttaaaagctgatagtgctggaggaatcattgaaagagatcatcacggtccttcactaggtcaggccgcgatttccataaccctggtgggttatactccgtatagaacgaattttacacaatcgagaaggtttggcatctgcaaaatttaataccatctgtttgtcgcagaaatttactaacactagatgtttcgacatgtatttgtaacaaacctatggtacattttttatcatggcatcaaactgcttagaaaccacataattgagcattgcctgatcaatcagttggtcctaaacagcattttatgcacaaatctaggcgattgagatgctattcatttaagcaaaaaaaaaaaaagtaaccactgtgtgtgaataattcagaagataccgctagtcatgctgtctcttatagcataaagtatgcacagaaaatctatatttatgaatataccattatcgagatactattatttggaaaaggtaaagcagtcaaaattttacctggttttgcatgagaacaaaatgagaaagcaacaatcggcttctgttcaatctttcactgtagtatttccatagaaatccatcttgaaatgaagtggaaggcccaagctttcactgtgagcaaaacagaaatttaccacttcttcgaattttcagcaatcagaaagtgagcaggcaaccaggcacagctcacagaccataccctaattgttattaggcttccatgtagatatggcatagattatccttcctttccacccttgaaggagccattcactgtcttcatcaatgacaaagtctttgtgatagatgtctttcactttgtccttggctttcagcacaatgtcttggtttaatggagactggacaaatccagctctcagattcctcacttgccactgtttgtatgtctccggtctctcgaccctgtctgagccttcacatgcaatcacattgagtgcttcccggccaaatagatctctctcaatta

SEQ ID NO: 12852 - DNA, 2148 bp, Oryza sativa
  Clone ID: TFbOSC410945j.C1.o7.fg
atgagggcggcgctgttcggtgccgagaggagcggggtagtggacctcggcggcatcggcggcggtaacagggggctgttttggccggcggggaaggggggcctggtggtggtggagccgaggtcggtgctggactgcacgcgcagcccgagcccgcgcaattccacctcgacgctgtcgtcgtcccagggcggcggcggggcggactcgaccggtgtggcggcggtttcggagagcagcgccgccgccgccgaagccaccaaatggggagcccccggggaacacgggggcggcggtggcggcggtggcggcggtgggaaggaggactggagcagcggctgtgagttgcccccgataccggggaccctggatgtggggctcgtcggaggagagggctgggacaccatgctcggcaacgccgccgccgccgcagccgggcaggatcagtcgttcttgaactggatcattggggccgccggcgacctggagcagcccgggccgccgcttcttgacaatgcgggattcgggatcccggccgtcgacccgctgggcttctctctggaccactccctcagcggcgtcgcctccgacctgtcgtcctccggtgcgcacaccgcaaccggcggcgcgggtggcggcaaggcttccctaggattcggtctcttctcgccggaagccacctctctcgagcagccgccgccgccgatgctgttccacgaaggtatcgacacgaagccccctcttctgggcgcgcagccgccgggcctcctcaaccactatcaccaccagccgccgaatcccgccgcaaccttgttcatgcctcacccatccttccccgaacacaatcaccagtcgccactcctccagccaccgcccaaacgccaccactccatgcctgatgacatctacctcgcccgtaaccagctaccgcctgcggcggcggcggcgcagggtctcccgttttcaccactacatgcctcggttccgttccagctccagccttcgccgccaccgattcgcggggcgatgaagacgacggctgcggaggccgcgcagcagcagttgctggacgaactggcagcggcggcaaaggcaaccgaggctggcaattccgtcggcgcgcgcgagatattggcgcggctcaatcaacagctcccccctcttgggaagcccttcctccgctccgcctcctacctcagggaggccctcctcctcgcactcgctgacagccaccatggcgtctccagcgtcaccacgccgctcgacgttgccctcaagctcgcggcctacaagtcgttctccgacctgtcgcccgtgctgcagtttgcaaacttcacggcaactcaggcacttcttgatgaaattggtggcaccgcaacttcctgcatacatgtcattgacttcgatctcggtgttggcggtcagtgggcttccttcttgcaggagcttgcgcaccgccgtgctgctggaggtgtgaccttgccattgttgaagctaacagctttcgtgtcgactgcttcccaccatccattggagctgcaccttacccaggataacctttctcagtttgccgcagaccttggaattccttttgagttcaatgccgtcagtcttgatgcattcaatcctggggagcttatttcttcaactggtgatgaagttgtggctgttagcctccctgttggttgctccgctcgtgcaccaccgctgccagcaatccttcgtttggtgaagcagcttagtccgaagattgtggtggctattgaccatggagctgatcgtgcagacctttcattctcgcagcacttcctgaattgtttccagtcttgcgtgttcctccttgactcacttgatgctgctggtattgatgctgattctgcctgcaagattgagaggtttctgattcagcctagagttcatgatatggtgcttggacggcacaaggtacacaaagcaatagcatggaggagtgtttttgcagcagctgggtttaagcctgttccacccagcaaccttgccgaggcacaggcagactgcctcctgaagcgagtgcaggtccgaggattccatgtggagaagtgcggagctgctctcacgctctactggcagcgtggtgagcttgtctccatatcatcatggcggtgctga

SEQ ID NO: 12853 - DNA, 1683 bp, Oryza sativa
  Clone ID: TFbOSC17536j.C1.o2.fg
atggtagcgcaagccgccaccgccgccgccaccaccaccgccgctgccaccaccgccgccgtgccgatgacgaatttccagctcttcgggtccatggtgccggttccggtggcgtccatggcgacggctactgctccggcagctgtggcagcagccgataatggtggccatggatcgtcgtcggcgtcacagaacgcctctggctcaggcgaaggacaaggcggcagcatgtccttgtccttgcaactgaggccgctcggctcaacgccgacggcggctgtggctgtctcggtgccacccatggctgcggcgccgatgatggctggtccagcagcagcagcgccagcgccggcgccgccgttggcgacgatggccgttgcccagaacgcctcgctcgcggcggtggcgagcgcgctggcggcgcacaggaggaaccaggccacgcaccgctccgccgcgctgcacggccacctccggcgctgcgccgaggcgctggccgcgtcgcggccggcggacgcggacgccgagctcgccagcatcgctcgcatggcgtcctcggacggcgacgccgtgcagcgcgtggccgcggcgttcgccgaggcgatggcccgggtggtgatccggccctggaggggcgtgtccgccgcgctcttcccctccgacgccggcgccgccggcgacgccctcaccgcgtgggaggccgagttcgcgcggcagagcttcctcaacctgtgcccgctgctccacctcgccgccgtcgccgtgaacgagatcatcctcgagacgacgaggaacgacaagttcatccacatcgtcgacctcggcggcatccaccacgcccactgggtggagctcctccagggcctcgccacgcgccgcgccgcggtccgcccatgcctccgcctcaccatcgtccacgagcacaagcacttcctcggccaggcggcgcaggtcctcgccgccgagtccgaccgccacggcgtgccgctcgacctccacatcgtcgagtccagcgtcgaggcgctcaagctggacgccctcggggtgaggagcgaccacgccgtggtcatcgtctccacgctccagctccaccgcctcgtcggcgccggcatcctcagcaccacggcgccgccgtcgccggcggcggcggcggcggccagcatgatcacctccccgctgccgccggcgaacatgtcgtcgaaggtggacaggctcctccgcggcttccacctgctgtcgccgagggccatcatcctgaccgagaacgaggccaaccacttcgtgccgtcgttcacggaccgcttcgcctcggcgctgccctactacgagcagctcttcgccgccatggaggaggcgggcgccgccacggtggagcggaaggcggcggagaggtacctcctcagggaggagatcaaggacgttattgcatgtgatcacgacgggccgcgctgggcgcggcacgagacgctggggaggtgggtcgtccggatgggcgccgccgggttcgcgctcgcgccggcgatcaccgtggtgacggcggcggggcgggtgagggcggtggcggcgcggcttcccggaggaggggatgagaggaggtatggggtgacggagggcggcgggtggctcatcctcaacagggaggagaagccaatgttctgcgtctctgcgtggaggaggcagtga

SEQ ID NO: 12854 - DNA, 352 bp, Oryza sativa
  Clone ID: TFbOSC34032j.C1.o48.np
atgcctctatactttatttacatgcaagattcaacacacacaagtacacaactactcaaggtagtagccagaaggccaacacatcttacacgtgtaagaatagaacaaaacggggtgcagagcggtgtgcacgtagcaggacgccctgcatacgtgtgcgtgattgggtggcgcaaccgaaaacgacctgatccaatgcaaacgcaacgtagcaatcacgattgcccccacggaatcgcacatcatcactagccggataattactttcgtttacggcagtatcaacactcgcacccacttatgtgccgctgaattatacatgggacccactgctcgtggggcctacacagtg

SEQ ID NO: 12855 - DNA, 828 bp, Oryza sativa
  Clone ID: TFbOSC400032j.C1.o8.fg
atggagatggacaaattcagctcgtcgtatcagccgtcgtggccaccagcgcaggccaccgtcgacgtcgtcgggtcggtggagacgccggcgcgccgggcgttccagcgcgtcgcgtcgttcttcgtgcaggagctcctggaccggcgagcatccgccggcgctgggccctgcgagcacggcgttctgcatcccgcagtcgtcgtgcgcgaggcgtacgcggaggggttagggatgtacctcgagttcagaggaatcaaccgtggcctcgagagcctccacatcgacgacctcggcgtcgacgccgacgaggccgtcgccatcaacagtgtcctggagctccactccgtggtgaaggagagccgcggggcgctcaactcggtgctccagaccatccgcaagctgtcgcccagggcgttcgtgctcgtcgagcaggacgccggccacaacgcgccattcttcctcggccggttcatggaggcgctgcactactacgccgcgctgttcgacgcgctcgacgcggcgctcccgcgctacgacgcgcggcgggcgcgcgtcgagcagttccacttcggcgcggagatccgcaacgtggtcgggtgcgagggcgcggcgcgcgtggagcggcacgagcgcgcggaccagtggcgccgccgcatgagccgcgcggggttccagtcggtgccgatcaagatggcggccaaggcgcgggagtggctggacgagaacgccggtggcgacgggtacacggtggcggacgagaaggtctgcctggttcttggctggaaggggaagccggtcatcgccgcctcgtgctggaaatgctag

SEQ ID NO: 12856 - DNA, 1023 bp, Oryza sativa
  Clone ID: TFbOSC272j.C1.o1.gp
tcatgatggtcgaggcaggtgtgatcagcatcgccatgctgagacggatacaagctcgccacgctgccaatagagtgcaaggcctgctccacgcttctccacatggaagcctcggacctgcacccgcttcaagaggcagtcagcctgtgcctccgcaaggttgctgagtggttgaggtgcaaaccctgctgatgttagcactgtccgccaagcgatcgctttgtcagctctacgccgcccaagaactgcatcctccactctgggctgaatcagaaacctctcgatcttactgacagcatccgcatcagtgccagcagcatcaagtgattcaagaagacatagacaagactgtaagcaattcaagaagtgttgggaaaatgggaggtcgctccgatcactgccatagtcaatagcaaccacaatcttaggagcaagctgtttcaccaactgaagcatagctgggagtggagtgcgtgctgagcaaccaactgggaggcttactgcaacaacctcatcagctgtaggagcaatgagttccataggatcaaatgcgtcgagattaatagcattgaactcaaatggaataccaagatcagcagcaaactgtgagaggttatcctgagtaagatgcagctcaagcgggtggtgggaggcggctgagacgaaggctgtgagcttcaacatcggcaaggacacaccgccagagccacagcggtgagcaagctcctgcaagaacgaagcccactggccgccgacaccgaggtcgaaatcaatgacgcggatacaagacgcggttgtgctggcgatctcatccagaagcgcctgagttaccgtgaagttggcaaactggagcacgggggagaggtcggagaaggatttgtaagcggtgagcttcagggcgacgtcgagcggagacgtgagacgggtggcggcgtggtggccgtcggcgagcgcgaggaggagggcgtcctttaggtaggaggcggagcggaggaaaggcttcccaattgggggaagctgctg

SEQ ID NO: 12857 - DNA, 488 bp, Oryza sativa
  Clone ID: TFbOSC401887j.C1.o14.gp
gccatgcggagacggagaagagggcgcgatcttgccagcagaggaagaagttgcccttctcctcccggaccttgaagccgtcgcagccgaggccctgcgccacccgccgcgcctggagcagcgcgtagtagctgagcgggacgcggccgaagccggcgccctccagccgccgcgcccaccggttccagccgctcgtgccgctcccgccgctcgccgccgtcgcacgccacgatgttcttgatctcctccccgagcagccaccgttccacgcgcgcgcgctccaccgacccgcgcgccgcccccacctccaggcagtcgaacagcgccgcgtagtagttgagcgcctccacgaacctctccgtcagccccgccgcgttgtggctcgcctcctgctccgccaccaccatcaccttcggcgacagcccccacagcgcgcccaggaacgcgtccgcgcgcgacgtcgacggcgacagcccggactccgggct

SEQ ID NO: 12858 - DNA, 1272 bp, Oryza sativa
  Clone ID: TFbOSC400659j.C1.o9.fg
atgctcggctcatcaccagctcgcgatcgaggcggcggcgacgacgccgaggcctccgagcagccgcagccgcagccgcagccgccattgtcgccgcgcgcggggggcggcgaggcgagggggctcgtgctcgcgtgcgccgacctcgtccaccggggggacctcgacggggcgcgccgcgtcgccgaagccgtgctcgccgccgccgacccacgcggcgaggctggcgaccgcctcgcccaccacttcgcccgcgcgctcctcgctctccgcggaggaggcaagggtggtcatggcggcggcggcggtggcgtggtgccgtcgtcggcggcgtacctggcgtacatcaagatcgcgccgttcctgcggttcgcgcacctgacggcgaaccaggcgatcctggaggcggcggcggcggacgccggcggcgcgcaccggcgcgtgctgcacatcgtcgacctcgacgcggcgcacggcgtgcagtggccgccgctcctgcaggccatcgccgaccgcgccgaccccgccgtcggcccgccgcccgaggtgaggctcaccggcgccggcaccgaccgcgacgtgctcctccgcaccggcgaccgcctccgcgccttctcgagctccctcaacctccccttccgcttccaccccctcatactcccctgcaccgccgagctcgccgccgacccgaccgccgccctggagttgcacccggacgagacgctggccgtcaactgcgtgctgttccttcacaagctcggcggcgacggtgagctcgccgccttcctcaggtgggtcaagtccatgaaccccgccgtggtgaccatcgccgagagagaaggagtcctcggaggtgacgtcgacgacgacaacgtcccggacgagctgccgcggcgggtggcggcggcgatggactactactcgtcggtgttcgacgcgctggaggccacggtgccgccggcgagcgcggaccggctggcggtggagcaggagatcctcagccgggagatcgacgcggcggtggcggcgcccggcgccggcggcggcgggcgcgctcgcgacttcgacgcgtgggcgtccgccgcgcgcgccgcgggcctcgcgccgcgaccgctgagcgcgttcgctgcgtcgcaggcgcggctgctgctgcggctgcactacccgtcggaggggtacaaggccgacgacgacggcggccgcggcgcctgcttcctccggtggcagcagcggccgctcatgtcggtgtcgtcgtggcagccgcagccatag

SEQ ID NO: 12859 - DNA, 1812 bp, Oryza sativa
  Clone ID: TFbOSC900388j.C1.o10.fg
atggataccctcttcaggttggttagcctccaccaccatcaccaccaccagcacgcggcctcaccgtcgccgccggaccagccgcacaagtcgtacccctcctcgcgagggagcaccagctccccctcctcccaccacacccacaaccacacctactaccaccactcccactcccactacaacaataatagcaacaccaactactattaccagggtggtggaggcggcggcggagggtactactacgcggaggagcagcagccggcggcgtacctagaagaatgcggcaacggccaccagttttacatggatgaagacttctcctcctcgtcttcctcccgccagttccactcgggaacgggcgcgccgtcgtcggcgccggtgcctcctcctccgtcggcgacgacgtcgtccgcgggcgggcacgggctgtttgaggcggcggacttctcgttcccgcaggttgatatcagcctcgacttcggcggctctccggccgttccgtcgtcgtccggtgctggcgccggcgccggggcagcgccgtcgtcgtcggggaggtgggcggcgcagctgctgatggagtgcgcgcgcgcggtggcggggcgcgacagccagcgcgtgcagcagctcatgtggatgctcaacgagctggcctcgccgtacggcgacgtcgaccagaagctggcctcctacttcctgcagggcctcttcgcgcggctcaccacctccggcccgcgcacgctgcggacgctcgccaccgcgtcggaccggaacgcgtcgttcgactccacgcgccgcacggcgctcaagttccaggagctcagcccgtggacgccgttcgggcacgtcgccgccaacggcgccatactcgagtcgttcctggaggccgcggcggcgggcgccgccgcctcctcctcctcgtcgtcttcatcgtcgacgccgccgacgcggctgcacatcctcgacctgagcaacacgttctgcacgcagtggccgaccctcctggaggcgctggccacccggtcctcggacgacacgccgcacctgtccatcaccaccgtcgtgcccacggcggcgccgtcggcggccgcgcagcgcgtgatgcgggagatcgggcagcgcctcgagaagttcgcgcggctgatgggcgtcccgttcagcttccgcgccgtgcaccactcgggggacctggccgacctcgacctcgccgcgctggacctccgcgagggcggcgccaccgccgcgctcgccgtcaactgcgtaaacgcgctgcgcggggtcgcgcgggggcgcgacgcgttcgtggcgtcgctccggcgcctggagccgcgcgtggtcaccgtcgtggaggaggaggccgacctggcggcgccggaggcggacgcgtcgtcggaggccgacaccgacgccgcgttcgtcaaggtgttcggcgagggcctccgcttcttctcggcgtacatggactcgctggaggagagcttccccaagacaagcaacgagaggctgtcactggagagggcggtcggccgtgccatcgtcgacctcgtgtcatgcccggcctcccagtccgccgagcgccgggagaccgccgcgtcgtgggcgcggcgcatgcggtcggcggggttctcgccggcggcattcagcgaggacgtcgccgacgacgtgcggtcgcttctccggcggtacaaggagggctggtcgatgcgggacgccggcggtgccacggacgacgccgccggcgccgctgctgccggagcgttccttgcgtggaaggagcagcctgtcgtgtgggcgagcgcgtggaagccatga

SEQ ID NO: 12860 - DNA, 342 bp, Oryza sativa
  Clone ID: TFbOSC401583j.C1.o68.gp
gaaataagctgacctgaagaggaagtatagtgtcagcagcaaagagcgtcacctttgccagcttaacatcattatgggagctcaagacacactggacaaaaaggttaggctcgcagctgtggtttataaaccttgcaaagttgccaatagagccagcatcaatgcaatactctggtgcaggtggatctgaatcattctccgcatgaagagacggcagatgcatgtcagagccagcccttttctgcagaaataaaggtagctggtagtcaggaaattgtgcaaagcagcatttattgatatctcaacatgaatgaaaacataagtatttacagtacttcactt

SEQ ID NO: 12861 - DNA, 1201 bp, Oryza sativa
  Clone ID: TFbOSC21512j.C1.o1.fg
atgacctttgaagcacttaggcgtagacatctgcaactggatgaaatacaagagactagcaaacgggctgacctgaaggctggcgccatcatgatggcaagcaatatcagggctaatgtgggaaaaagggtaggacttgttcctggagttgaaataggggatattttctatttccggatggagctatgtatcatcgggttgcatgctcctagtatgggtggcattgattatatgagtgctaaatttggaagcgatgaggattctgtggcaatatgtattgttgcagcaggtggctatgagaatgtggatgatgacacagatacactggtgtacagtggttcaggtggcaatagtaggaacagtgaggagaggcatgatcaaaagcttgagagaggtaaccttgctctggagaggagcctgcataggaagaacgagatcagggttgtgcggggcttcagggatccattttgcctgactggaaaaatctacatatatgatggcctctataagattcaggagtcctggaaggagagaacaaagtctggtatcaattgcttcaagtacaaactgctgcgtgagcctggacagcctgatggagctgcattgtggaagatgactcaaggatggatagacaatccagcaagcagaggcagggttatattacctgatctatcatctgcggctgaagctctcccagtttgccttgtcaatgaggtagaccatgagaaaggacctgggcatttcacctatgccagtcaagtcaaatacttgaggcccctcagttctatgaaacccttacagggttgcggatgccagagtgtttgcctgcctggtgatcccaactgtgcttgtggacaacataacggaggtgacttaccttacagctcatcaggacttttggcgtgccgcaagccaataatttatgaatgcggtgatgcttgccattgtactacgaattgccggaacagagtgacccaaaaaggggtcagatttcactttgaggtcttccggactgcaaatcgaggctggggtcttcgctgctgggatcccattcgtgctggtgcatttatctgtgagtatactggtgaggtcattgatgagctcaaagttaatctggatgacagtgaagatgattacatttttcagactgtatgtcctggtgagaagacattaaaattcaactttggtcctgaattgattg

SEQ ID NO: 12862 - DNA, 1146 bp, Oryza sativa
  Clone ID: TFbOSC401607j.C1.o14.fg
atggaaagtaaccaacacaaagcatcagatccacaggattctatggttcatttagatctggatgaagataagataatggtgacatcagcattaccatgtccttcaatgtccgtgggaaaatcggttatgaggaagaggggaagaccaagcaggcatgcacgaggaacttcgttgtcttctgttaccccagaagataatcctagggaagctgttgatgatatactcatgacatttggtggactacatcggaggatcatgcagttgatagatgtgaaaatggcttcaaaacagcttgtcttccaagcattgaacctcatgagaaaagttggatatcatgttaacaaggacaagagggttggagaggtcccaggagttaaaattggtgacatattctactctagaattgagatgctcttggtagggctacatagtaacatcaatagaggaattgaattcatgtctggtgcttttattaataaggaagataagatagctacatgcattgtgtcatctggaatgtatgagaatggtgatgatgacccatatactttggtatataatggccaaggcaaagtccaccataagcttgagagagaaatagctcgtgtttgtgttgtaaacaacattgatagtgaggatgctcctaacaactttacctattcaactaaacttgataatgggaatcatatggtttcagcaaacaagatgtgtgtctgcaaatgcacaagctcatgccttggtgaagacaattgctcttgtttgaaaacaaatggcagctatttaccttacaactcttcaggaatacttgtttgtcgaaagactatgatatatgagtgcaatgattcatgtgcttgcacaattaattgctcgaaccgagtggtacagaggggttcctatctacactttgaagtgttcaagacgatggatcgaggttggggccttcgcagttgggatcccattccggcgggtgcatttgtatgtgaatatgttggtgtagttattgacaaagatagcttagttgaagaagatgaatacatatttgaggttactagaccagagcataatttaaaatggaactatttaccagaattgataggtgaaccttctttctatgacatgaatgatacattcaagaagttgtgttaa

SEQ ID NO: 12863 - DNA, 1611 bp, Oryza sativa
  Clone ID: TFbOSC401896j.C1.o25.fg
atggcgacgcccggcctcgacgacgactcgctgcagcagctgcgcagccgcgcgacgcagctgctgctcaaggagaactggacggagtacatcgccgtgtgctccctcatcatcgaggcgttcgacgccgccgccgcctgcaaagaccgccgcgtcctctgctccaccctcgcccaccgcgccgacgcccgcgcccgcctcggcgacgcccccggcgcgctcgccgactgcgacgccgcgctggcggccgacccggcgcaccccggggcgttgctgtccaagggcgccgtcctgcgcggcctcggccggtactcgcgcgccgccgagtgcttccgcgcggcgctcgccgtgagcggcaccgacgaggtccgggagatggtcgagcagtgtaagcgcctggacgcgcaggcgaggagcggcgcggtggatctgtcggagtgggtgctcgccgggttctccgggaagtgcccagacctcgcggagcacgtcggggcggtggaggtgcgccggtccgcgcacggcggccgaggggtgttcgcggtgaagaacatcgaggcgggagctaacctggtgatctccaaggcggtggcgatcggaaggggagtaattccggacgccgccgatagcggcgagaagatggtggtgtggaaggacctcgtcgacaaggtgctcgacgccgccgagaagtgcccgaggacggcatctctcatctacactctctccaccggcgaggagccagaagacgagctccccatcccggacatggcacatttcaagcaagaaacggaggagctcgatgacggcacggccatggcgccgaaggcatctcttgatgtggacaagatcttgaaagtgctcgacgtcaattgcttgaccgaggacgcagcgccatccgccaatctgctcggcagcaatggcgtcgtcaactgcggcgtcgggctgtggatcttgccggcgttcatcaaccactcgtgccaccccaacgcccggcgcacccacgtcggcgaccacgccattgtccacgcgtcaagggacatcaaagccggggaggagatcacattcgcctacttcgacgtgctcaccccggcgagcaagcgcagggaggcagcgagagcgtggggcctcgaatgccaatgcgatcggtgcaggttcgaagccagcgacgccattgttgggcaagaactcacaaaacttgagaacgaattggtcaatggccgaggaggagacatgggagcactggtggtgaggctggaggagaggatgagaaagtccatggtgaaggagaggaggaaggcgttcttgcgcgcgtcgttctggagcgcgtactccgcgctgttcgactccgacaagctggtgaggaagtgggggaggcgcgtccccggtgaggccgccgtcgcagagagcgtcgccggcgcaatcggcgggaacgagagcgtgctgagggcaatgctgaggggtgccgacaatggcaacggctgcggcaatcggctcgaggtggaagacaaggtggtgaggattgggagggctacctatggcagggtagtgaagaggcaggcaatgagagctctcttcagacttacattggatgctgacagtaacaaaagcctgtag

SEQ ID NO: 12864 - DNA, 1230 bp, Oryza sativa
  Clone ID: TFbOSC9931j.C1.o1.fg
atggcgggccctcccggcccggcaccgggcacctcctcctcctcctcctccctgcccagccgccgccgccgccgcccccctccgcgcctcggccgacgccgcggcggcgatgatcaacagcccccgcatcctccaaaggcctcgtcggaggctctcccctgcgcggcctccccgcccgcgcggtgccgcggcggtgatcaccagcccccgcatcctcccgaggccgcgttagaggctctccgcggcgcggcctcccctcccgcgcggcgccgcggcggtgatctacatccctcgcatcctcccgaggccgcgtcggaggctctccgcggcgcggcctcccctcccgagcggcgccgcggcggtgatcgacagccctcgcatcctaccgaggccgcgtcggaggctccctccggctcggcctccccgcccgcgcggcgccgcggcggcgatcaacagcctccgcccgctgtggcggtggcggtgactagtgaaggcggcgtgggtccccgccgctcgttccgcatcagcctgcggcaccgcgtgcgtgtggtcccgtgggtgaagccacccgtggcgaggaagcccaaggaccccgcgaagcccccgcgcccgtcgatcgaggcgctcgcggcggaatgggcgaaggagaaggcagcttccggggcccccgaggaggagtgcgtcctgcctttcctccagaaagatgcgcctaagaagctcgacattgtaaaagttcttggactagatggatttggatatatggatacagtgatattgagcttgaagagttacaggaaaaacattcccattacagtaggaaatttcgtgattgtgatgcaaagctgcataaggcttgttctgaaaaaggtgatggatgctgtcctcgacatgatgcaggtccaacagatggaagccttccggcgcttacccctcccacacactttccaagagttcaacattgaccctataaagaaagaggaattggacaatgggacagaaccacctccatataaaattaagataattcctacaggtctctattggttagctgctctcgggcttgtcactgctcagatgagtgcactaacaaaccatttcgccgacagaaaaagattgagatcgttaagtggaatacttctgcagacacaatattgtggatggggatctagagcactggaagccattgagaaagatgattttgtcatagaatttgttggagaagaacaatag

SEQ ID NO: 12865 - DNA, 1182 bp, Oryza sativa
  Clone ID: TFbOSC8416j.C1.o1.fg
gtcctaaaaaaagggcaattcaaccttgtagcaaggtgaacacgggggaaggatcttcagtcattgatgtagcatcatccactatgggtgaggtcaaaatgtcactgaaatgcagtgttgacccaaagttccgcatgccttccttagaagcagttttcaagatggtggaggataaatatcttcactcatacaagattctgcctcctgagttttccattggtagcctcatgaatgagatatgccaatgtgttgtacaactgggtagtgatcatattgcagaacataatacagaatcagatgttgctggcaatgggagatgctcacaaaatgagccaatgacaggtagcattccatttgtgaagccaatagcatgcgaggatggtggaaataggaaatgtaaatctgcaggagaatcatttattgtggaagactcagaaaattcaagtgttgctaaacagcagactcatttggcacttgccaacttgaagcctatccatgatgtaactgatatatccaagggagaagagagagtgaggatatcggtggccaatgaatttgcaagtgagaaatgtcctccttccttttattatatacgaggaaaccttgttttccaaaatgcttatgtcaacatctccgttgcaagaattggtgatgaagattgttgtgctgattgctttggcaactgcttgtctgcacctataccatgtgcttgcacaagagaaaccgggggcgaatatgtgtatacaccagaaggtctggttaggacaccattccttgatgaatgtgtttctatgaatcgtttcccagaaaaatgtcacaagttcttctgtaaatcatcctgcccactcgagagatctaggaatgaagcttcaccagagccttgcagaggacatcttgctaggaaatttatcaaggaatgctggagtaaatgtggttgtaacatgcaatgtggtaaccgtgtggttcaacgtggcatcacatgcaatctgcaggtatttttcacaggagaagggaagggttggggtcttcgcactcttgatgaactgccaaaaggagcctttgtttgtgaatatgttggggaagtactaactagtacagaactgcatgaaaggacacttcaaaacatgaacaatggtaggcatacctaccctgttctcttggatgctgattggggttctgaag

SEQ ID NO: 12866 - DNA, 1128 bp, Oryza sativa
  Clone ID: TFbOSC900167j.C1.o2.fg
atggcgtcgtgggaggagcagctgcgggacgagctcgccgsccgagacctcgccgtcgcctccgtccccggraagggccgcggcctcttcgccgcacgcagcttcttcccaggagaagtcgttatttcgcaagagccttacgcttctacaccaaacaagatttctgtgggctccaactgcgacaattgtttcgcctccagaaacctgaggaagtgctccgtttgtcgagttgcttggtactgtgggagtgcgtgtcagagagaagaatggaagcttcatcaacttgaatgtcgagcaatcgccgcgcttacagaggatagaaagaagatgcttactcccacaattcgtttgatggtgcggcttgtacttagaagaaaactgcaggatgacaagatggccaatcttgtccaactgattcttccttcattcgagcttgatcttaaggaaattacacataccttttccaagtttgcctgcaacgctcataccatatgtgatcctgaactgaggccccttgggactggactataccctgttttatctattattaaccacagttgtgtaccaaatgcagttttgatatttgaaggtcggacagcatatgttcgtgcattgcaacctataagtaaaaatgaggaggattctgaggaagatgcgctccttgagggatacagatgcaatgaccaaaagtgtgatggatttcttctgcctaatgcagtagataacagtgaggtaggttctatgtacaagaccattgaagagctagagcggaagctttaccatcctttgtcaatcactttgcttcacacacgggaaacactcttgaagatatatatggagttacaagattggcagactgcattgatgtattgcagattgacaattccagtttatgaaagaatttacccaccttttcacccaatgattggattacagttctatacttgcggaaagcttgaatggttgcttgagtacacagaggatgctctgatgtctttaaccagggcagcagatatacttcgcataacgcatgggactaaatccgagttcatgaaggaacttttgggcaagctagaagaagtaagggctgaagcttcttttaggctctcggctggagatgaacaataa

SEQ ID NO: 12867 - DNA, 1689 bp, Oryza sativa
  Clone ID: TFbOSC400525j.C1.o32.gm
atggcggaggaggcgaagaatctggagacggcccgggccgaccgctccgtgtggctcatgaagtgcccgaccgtcgtctcccgcgcctggcaggaggccgccaccgccgccgcctcctcctcctcctcctcggacgccgccgctggcgccaactccaactccaacgcgaaccctaaccccgtcgtcgccaagttcaagatggagatggctcaaacaggcaatggcaatacaccaaagagttactccttgaacatgttcaaggattttgtgccaatgtgtgtcttttctgaatccaaccaagcaacgcccggcgccgtcggcgagttggccgagctggtcttgccgtggctgccgccgcaagacctcgccgctgcggcctccgccagccgcgccctgcgtgcggccgcttccagcgtcagcgccggccgcgccgccgacgcggcgcacgggctggagcctcaccccatccccttcgacaacctcgtcgacggcaagccctacgcctacttcctctacacccccttctccctcaccccgtcctccgcctccgcctcaccccgccgcgcccagccgtgggggcgcacgtgggcacgaccgccaggccccacatggcctcgctccgacctaggcgggttcccctcgtccgggtgcgcgtgcgctcagggggcgtgcggcggcgcgcgggggtgcccgtgcgctgacccggaggctgaggcggtcggcttggggtcggaggcggggatggggagcctcagggagtgcggcgacgggtgcgcgtgcgggccctcgtgcgggaaccggcggacccagctcggcgtcacggtgcggctgcgcgtcgtgcgccaccgggagaaagggtgggggctgcacgccgccgaggtccttcgccgcgggcagttcgtttgcgagtatgctggtgagcttttgacaactgaagaagcaaggaggcggcaggggctatatgatgagcttgcctctgtcgcgcagccacccggcagcagcaagcgccggggcgccgtggagcggccagctagcggcgcgggcctgcaggcggaggaggcgtcgtcggcggggcccggggcgccgtgcggggcgtgcaagttcctgcggcgccggtgcgtcccggggtgcgtgttcgcgccgcacttcagcggatgcggcggcagcggggtgggggcgggcgtaggagggagagggagggagcgcggcgcggcggagttcgccgccgtgcacagggtgttcggcgccagcaacgtggcgaagctgctgtcccgggtgcccgccgcgctgcgccgggaagcggcgcgcacggtctgctacgaggcccaggcccgcatcgccgaccccgtctacggcagcgtcggcaccatcctcgcgctccagcaccagctctccgtcctggagtctcagctcttcaacctgcgggtggccttggcgagcgcgcaccccgacacgccgccgcagcacttcgtcgtgctgcagccggcgcactccgcggcgtccacgctgaaccaggtggtggtgaactacgacgacctcccgcacgccgtggatttcatggacgcggagcccgccgcgctgaggggactagagtctctccagctctcgcagccactgcagcgggaggaagacgagggccaccgagacatgaacctcttctcggacagtgtaggacaacggcagctgtaa

SEQ ID NO: 12868 - DNA, 687 bp, Oryza sativa
  Clone ID: TFbOSC400536j.C1.o9.gp
ttaaaaaatgtatatatcatgttttcatcatcataaataagcaaactaacacaaagtttattcaactaatggttttgaatagttctttccagtgatgcagtattgatgcgccccttttgctacctagcaaagttcttcattcatgccaatcctagaacaaactcatcaattgcaccctagttaccccaaaatgagagcactatgggtacccaaaaagagatacctgctcacctacaaaatatccaaaaagacgagccaactgtctgtggggccatttgcagcttcctaacgttgcctcagcccgccaaaaccagttaccagccattgatccctcctcccccctcatggaccctagtccaagccatagtcgatggacagatcccgcattggagggatggtctccatggcaaacaccatcatgtgagggtaggattcatcctcattgccacggattacatattgaaggaacacattcggactgcagctgtggctaatgtagcaagccacgttcctcctctgtgacacgtcgagtcggtagcgcgcccctgcaaatagggggaaatggggtaccctgtccgggtaaaccacggatgcatctccccactccctccatctctcggggaacttggtcgggtcgatgatggagctcccgtcctccatcggaggcagaggggcgtcacctgagtg

SEQ ID NO: 12869 - DNA, 1596 bp, Oryza sativa
  Clone ID: TFbOSC900282j.C1.o4.fg
atggcagtttccgttttcaacacaaggaggcgtacttcccttgtttccgccttcatagatcgaacacgtatgttcatatccacacctctcccccaagtacgagacaaggtctcgagaacaaaaccccccaaaccccacggcggcggcggcgagcggcggcggaagaagcagccgcaagaggcagcagctcgcgccggcggcggcatgggtgggagcagcgcaagcccgtgtgacctggacagggatttcgcgccccaaatcgcccagctcctcgccacccctcctctccaacccgcgcaggaatactacaatgggctcatacagtccaggaaacatgatggtataagagtgaacttcagcagcaagcatgggaaaggtgtttgtgcgaacaaggagtttgcagaaggggaccttattctgaaggatcaaatattggttggtgctcagcacagtcttaacaagattgattgcgctgtgtgcagttattgctttcgcttcattggttctatagagttccagattggacgaagattgtattggcaaagcgttggttcaagcagtgactgcactaataggaggcattgccatgagagtgatgtgggatcgagtgccagttcttctggtgcaacaaaggaaaacagtagtactttgccagaagaggtcttaggatcacttattactggtgacatgtcactgcctttcacagaccattttagtttgcctcaagttgttccttgtcgtggatgtgaggaagaacgctactgcagccaatcatgtgctgattccgactgggaaacttatcactctttgctgtgtactggatctaagactgaaccatcccagagatctgctcttcagaaattcatagaacatgcaaatgggtccaatgatatttttcttgttgctgccaaggctatcactttcactctgctgaggtacaagaaactcaaaacgcagcctgaatttcaaaataacacagatgaatcaaacttttctttgcttatggaagcatggaaaccactttcgatgggctacaaaaagaggtggtgggactctgttgctttgcctgaggatgttgattcctgtgatgaagatacatttaggcagcaaattagggatctagcacttacgatcattatcttctgtgtttcgcagtcattgcagcttctcaaggatgctatttttgattctgatggtttggttgttgcgtctccagtggaagactatttcatacatattgatgatcttccagatgatgagaagtgcaacatatcccaggaggaagctgaaaaggttacaaggccatttctagatgctttaggtgaagactatgcagctccttgtgaggggacggcattctttcctttgcaaagctgtatgaatcattcatgttgtccaaatgctaaagcatataaaagggatgaggatactgatggtaatgcagtgataattgctctggagcctatcaagaaggacgatgagattaccatatcctacatcgatgaggatgtctcctacgaggagaggcaggcggagcttgcagattatggattcatctgtacgtgccctaggtgccaagaagaaaagcccaactga

SEQ ID NO: 12870 - DNA, 1392 bp, Oryza sativa
  Clone ID: TFbOSC406486j.C1.o10.fg
atgggtgggagcagcgcaagcccgtgtgacctggacagggagttcgcgccccaaatcgcccagctcctcgccacccctcctctccaacccgcgcaggaatactacaatgggctcatacagtccaggaaacatgatggtataagagtgaacttcagcagcaagcatgggaaaggtgtttgtgcgaacaaggagtttgcagaaggggaccttattctgaaggatcaaatattggttggtgctcagcacagtcttaacaagattgattgcgctgtgtgcagttattgctttcgcttcattggttctatagagttccagattggacgaagattgtattggcaaagcgttggttcaagcagtgactgcactaataggaggcattgccatgagagtgatttgggatcgagtgccagttcttctggtgcaacaaaggaaaacagtagtactttgccagaagaggtcttaggatcacttattactggtgacatgtcactgcctttcacagaccattttagtttgcctcaagttgttccttgtcgtggatgtgaggaagaacgctactgcagccaatcatgtgctgattccgactgggaaacttatcactctttgctgtgtactggatctaagactgaaccatcccagagatctgctcttcagaaattcatagaacatgcaaatgggtccaatgatatttttcttgttgctgccaaggctatcactttcactctgctgaggtacaagaaactcaaaacgcagcctgaatttcaaaataacacagatgaatcaaacttttctttgcttatggaagcatggaaaccactttcgatgggctacaaaaagaggtggtgggactctgttgctttgcctgaggatgttgattcctgtgatgaagatacatttaggcagcaaattagggatctagcacttacgatcattatcttctgtgtttcgcagtcattgcagcttctcaaggatgctatttttgattctgatggtttggttgttccgtctccagtggaagactatttcatacatattgatgatcttccagatgatgagaagtgcaacatatcccaggaggaagctgaaaaggttacaaggccatttctagatgctttaggtgaagactatgcagctccttgtgaggggacggcattctttcctttgcaaagctgtatgaatcattcatgttgtccaaatgctaaagcatataaaagggatgaggatactgatggtaatgcagtgataattgctctggagcctatcaagaaggacgatgagattaccatatcctacatcgatgaggatgtctcctacgaggagaggcaggcggagcttgcagattatggattcatctgtacgtgccctaggtgccaagaagaaaagcccaactga

SEQ ID NO: 12871 - DNA, 2307 bp, Oryza sativa
  Clone ID: TFbOSC401001j.C1.o46.fg
atggccctgcaacttatgatggacaactacctcttgtgttctgccatgaagggaagattgtctgtttactctgatagtcagctgatactagtgaagatgaaccgggaatcaaatttcatgcctactcctgatcaggatgttctggaagtcaagcccctgaggactttggctccaatgttccctgcaccattggggatcgatgtgcttaaccggttgacagccccaccgttggtatttgtcgcaccagctgggcagtttcctgggggttttggatctttgaacattcctgcggtcagatcgtttgccgctttcggtggtcaggatgctagtggaggcaagactgctggtggtggtgatcaggatgctagtggaggcaagactgccgctggcggtgatcaggatgctggtagaggcgagactgctgcttttggtggtcaggaaactgtcagaggtgaatttgttgcaaatgggactccaaatgtaggtgctagtgcaactgggccaattgacgccactcctatctcagcttgcaaatcaacacaaccaagtgtgatatcactggatgatgatgacaatgatgatgatgagccttacggtggtaaccaaacatcagcatctggacggaagatcaagaggccatcccatctcaaaggatataatgtaagtgatggtttgggcaccgacagctccaacggaacaaagaaacgccctaagacctctaataggaaggctgctactgacaatgagatttccttgatgcctccatccagcgatcccagggaggttgtggaagtgcttctcatgaccttcgaggcactgcggcgtaggcatcttcaattggatgagacacaagagactagcaaacgtgcagacctgaaggctggtgccatcatgttggccagtaatctgagggctaacattgggaagaggattggagctgtccctggagttgaagtaggggatattttctacttcaggatggagctatgcattatcggcttgcatgcacctagcatgggtggaattgattatatgaataagtttggtgatgaggatgactctgtagcaatatgtattgttgctgcaggtgtttatgagaatgatgatgatgatacagatacactggtctacagtggttctggaggtataagcaggaacagtgaggagaagcaggaccagaagcttgagaggggtaaccttgctcttgagaggagcctgtccagaaagaacgtgatccgggttgtacgtggttacaaggatccagcttgcttgactgggaaagtttatatctatgatggtctttataagattcatgagtcctggaaagaaagaacaaagactgggatcaattgtttcaagtacaagttgcagcgagagccaggacagcctgatgcagttgcaatctggaagatgtgccagagatgggtagaaaatccagctgctagaggcaaagttttgcaccctgatctatcatcaggtgctgaaaatctcccagtgtgtcttatcaatgatgttaacagtgagaaaggaccagggcacttcaactatattactcaggtcaagtacttgaagccactccgctctatgaagccatttcagggttgcagatgcactagtgtttgtctgcctggtgataccagttgtgattgtgcacagcataatggaggtgacttaccgtacagttcatccggattgcttgtatgtcgcaagcttatggtatatgaatgtggtgaatcttgccgatgttcaatcaactgtcgtaatagggtagcccaaaagggagtaaggatccaccttgaggtcttcaggacaacaaatcgaggctggggtcttcgttcatgggatcctatacgggctgggtcatttatttgtgagtatgttggtgaggttgttgatgatactaaagttaatttggatggtgaagatgattatctttttcgaactgtctgtcctggcgagaagacattaaaatggaattatgggcctgaattgataggggaacacagcataaatatttcagctgatacttttgagccgctgcccatcaagataagtgcaatgaaaatgggaaatgttgcacgtttcatgaaccatagttgcaaccctaacaccttctggcaaccagttcaatttgaccatggagaggatggttatccacacatcatgttcttcgcactgaagcatattcctcccatgacagaactgacttatgactatggcgacatcggatgtgaatctaggggtgtaggttctagagctaagaactgcctttgtggatcctcaaattgccggggcttttttagctga

SEQ ID NO: 12872 - DNA, 1504 bp, Oryza sativa
  Clone ID: TFbOSC401179j.C1.o22.np
tctcctttcctcggatcaaccgccatcagcttctcctcagccttcttcgccttcccttctattggcttggcctcctgtggcacaaaatgcgcttcagcctcggccgcgcgctccacaacctcaccccacgttgggtccgacaagtccaacccatgtatcttgaacttgatctcccccttcctctgcggcaaggctgcgagcctgggcggcgggagcgcgacagggttagcggccgcctcggcctgggcgcgcatgtcgtcgaggccccgcgttcgaggagtacgttaaggagtggaaggcgaagaaggcggcgctcggcgtgccggccggacgctgcgagctgcctttcctaaccggcacgcctaaggcggttgaatgtcgattatgttctaagattattcatcctggagaagaaataaagtgttcggttagtagatgtggagaattgttccacctgacttgtgcagcagaagataccacaaatttcattgctgaaagcttcaaatgccctcaacatggctgtatggtctgtaagcaaaagatgtttttttggcgttgtggacggtgtacggttgcagcacatacaaaatgtgcaccatggccagtaattcatttaaaagatgaccaaggaagtgctatctgttggaggcatccctctgattggctccttcaaaatgaggtctatccttttacccttaagattgacgaagtattttgccgactacctgttccatatgttaatgaagacttcaagattgattcaaccatcagggatttcactgcagctgtctgcaaaccaccacactttacgtttatcagacgcaatgtatatttaatcaagaaaaaacgtcctgattctcgcgcggaagctgggtgcacaaactgcagtgctgattctacgtgcaaagatgactgcgaatgcaggggcctttacatgagttgttccaagaattgccactgctcagatatgtgtacgaacaagccattccgcaaggataaaaaaataaaagctgtcaagacaaaacgttgtggatggggtgctatttcattggagccattggaaaaaggtgattttataattgagtatgttggtgaagtcatcaatgatgcaacatgtgaacaaaggctttgggacatgaaacggcgaggtgataaaaatttctacatgtgtgaaatcagcaaagattttacaatagatgcaacatttaaaggaaacacatcacgttttctgaaccacagttgtgatcccaactgtaaattagaaaaatggcaagttgatggtgagacaagagttggtgttttcgcctctcgttccatccaagttggagaacacttaacttatgactacaggtttgtgcatttcggggagaaggttaaatgctattgcggggcacaaaattgtcaaggttacctgggcaaccaaataaagaatcctacgcagcgtgctctcgcaattgcagcattggagaacgagtggcttgaatctttgaagatacaacaggac

SEQ ID NO: 12873 - DNA, 1266 bp, Oryza sativa
  Clone ID: TFbOSC22139j.C1.o1.fg
atgttgaggtcccactctaaggcgagggcattgccattggatggcacggtggagcacctcggttgtgggcagggggtcgtcatcggcgctgcccgacagggagaggaccaggtggggttcctgcaagagctgaggtcaatgccgacaacggagagcatgacggtgcgcacagtgcggaggaagttgaggagcgccatggcatgggggatctctgagaaggcttctgggctgaggtcattgagctggacggggtggttgaggtcaccgaccaccgcgtcgagctccgcctgtcgtccccgccgcgaagatgtcctggtacacgagatcgccggtgagctccgccgtctcggcgaccacgctccgcatctcctccatgtcgttgtcgtcgccggtccaccgccggcccatcaccatgcgagggacgatgttgctggtgacacccatcagcgcggcgtcgacgtcgacgtgctcggcgtcggtggcactccagctgagcgagccgacgaggcgcgccacctcctcgcggcggacatggcggagccggaggaagagcgcatggagccgccgccgccgccgccgtacatccacatcgagaccaacgatttcttgcacaggaggcacaagaggcagaaagaggaggacatagctgtgtgtgagtgccagtataatctgctggatccggacagcgcgtgcggggatcggtgcttgaacgtcttgactagcacggagtgtacgcctggatactgcctctgcggtgtatactgcaagaaccagcgatttcaaaaaagccaatatgctgcgacaaggctggtaaaaactgaagggcgtggatggggccttttggctgatgagaatattatggtgactgaatttaccttgattttatggtctgctaatgttgttaaatatattcaagctggacaatttgttatggaatattgtggagaagtaatatcatggaaggaagccaagaggagatctcaagcatatgaaaaccagggtttaacggatgcctatattatctatctgaatgctgatgagtctatcgacgcaacaaagaaggggagcctggcaagattcatcaaccattcgtgccaaccaaactgtgagacaaggaaatggaatgttcttggggaagtaagagtgggaatttttgcgaaacaagatattccaatcggaacggaactatcctatgactacaactttgagtggtttggtggtgcaatggaggctacatacctgtgggaagatgatgatgacaggtag

SEQ ID NO: 12874 - DNA, 3462 bp, Oryza sativa
  Clone ID: TFbOSC401762j.C1.o10.fg
atgttgaggtcccactctaaggcgagggcattgccattggatggcacggtggagcacctcggttgtgggcagggggtcgtcatcggcgctgcccgacagggagaggaccaggtggggttcctgcaagagctgaggtcaatgccgacaacggagagcatgacggtgcgcacagtgcggaggaagttgaggagcgccatggcatgggggatctctgagaaggcttctgggctgaggtcattgagctggacggggtggttgaggtcaccgaccaccgcgtcgagctccgcctgtcgtccccgccgcgaagatgtcctggtacacgagatcgccggtgagctccgccgtctcggcgaccacgctccgcatctcctccatgtcgttgtcgtcgccggtccaccgccggcccatcaccatgcgagggacgatgttgctggtgacacccatcagcgcggcgtcgacgtcgacgtgctcggcgtcggtggcactccagctgagcgagccgacgaggcgcgccacctcctcgcggcggacatggcggagccggaggaagagcgcatggagccgccgccgccgccgccgtacatccacatcgagaccaacgatttcttgcacaggaggcacaagaggcagaaagaggaggacatagctgtgtgtgagtgccagtataatctgctggatccggacagcgcgtgcggggatcggtgcttgaacgtcttgactagcacggagtgtacgcctggatactgcctctgcggtgtatactgcaagaaccagcgatttcaaaaaagccaatatgctgcgacaaggctggtaaaaactgaagggcgtggatggggccttttggctgatgagaatattatggtgactgaatttaccttgattttatggtctgctaatgttgttaaatatattcaagctggacaatttgttatggaatattgtggagaagtaatatcatggaaggaagccaagaggagatctcaagcatatgaaaaccagggtttaacggatgcctatattatctatctgaatgctgatgagtctatcgacgcaacaaagaaggggagcctggcaagattcatcaaccattcgtgccaaccaaactgtgagacaaggaaatggaatgttcttggggaagtaagagtgggaatttttgcgaaacaagatattccaatcggaacggaactatcctatgactacaactttgagtggtttggtggtgcaatggtgaggtgcctttgtggagctggcagctgttctggatttcttggggctaaatcacgtggtttccaggaggctacatacctgtgggaagatgatgatgacaggttttctgttgagaatgttcccctttatgattctgctgatgatgaacctaccagcattccaaaggacatcttaataaaagatgagccaaatacacaggatggcaacaacaacacaatccaaaatactgggattcctattattgcaagttcaagtgaattcacaccgatgaatgttgaaccatcgattgcgagttcaaatgagttcacaccgatgaatgttgaaccattgaatgtgagctcaaatgaattgacaccaatgactattgaaccattgaatgctattccaatgggagttgattttactcagaatggatcaattgaatatggtgcgcaatgtgctgaagatgctctgcaaaactcaacgcgtggagttgcaaacctccagaatcaaagtgcgccccgggacaacaaccatacagagttggttgcggtgaaacgtagacccacacttcgtggtggaaaagctaaacgtggtatgcgcaagcaactgaatgttgtgggtatctgtgatcggttagcatcagaggtggcacgtgaagaaatattgtattgcgaggaaatgaagaatgaagctgctgctgaaattgacagcctgtacgacgagataaggccggcgatcgaagagcatgagagggatagtcaagacagcgtggccacaagccttgcagagaagtggattgaggctagctgctgcaagtacaaagctgattttgatctgtttccattgttcaggataagtcgagtcatgggaaaatccgagcatggcaatctactggtatctctcagtgatgggctgccccattatagtcttgcagcagcagttggcctggcaataggagttgctgggttgtgcaaggcgctgcatagcagcttggtgataccaccagtttctcagaagaagttactttcgaactcagatagactttattacactggaggcctgaaaaatcttggcaacaattgctttcttaatgttatcctgcaggcacttgctagctgtgacgggtttgtttcctctctagataatttgcttggaagtgaggatgtgctacctgaggaaaagtccgaaaaaatgcctcttatttttgctctaagttctcttataaaagtggaaaataaagtgttggttcctgtgaccctagtggtctcaggaattaccgagcagtggtggtctggtggaatcgttacatactgtaatactgtaaacacgctgtcattggacttcgaaaatttctactgcttgcctctctcacctgtggctactataaatggagatattatcaatggatgtagtttggtggattgccttgagcactttacggcgttggagcatcttgacaactatcgttgtgatcattgttggcacaatgttgctgccaaatatttgtctcttaaatccgaagttgatgaggaaaaaattaacaaactacacacctgtgtcgactatggcacttgcagttgcaggcatatatttaccccggaggaaatgacatgttcgatatcttctcaggcaacaaagcagctggctatcactcatttcccaaagatcttgtgcattcatttgctacgcgcttctgttggtctagatggtgaatttgttaagcgtgggggacacatttctttccctttacttcttgatctttcaccatttgctggtggtgcattaatccctggacagggacctaaaccttcagcaatgaacaagcaaagacatggccagcaaactctccatctgtggcgacagctgaatgcagagatgcctgtgaatatgttccccgctgccactgatggggactcatcaagtcatcattgtggtgatgaatcaataaacacacttggacgctcattttacgtgggaaatagggatgcagatagtaggttcttgtcttcatcatcattgacagacaagttatatggcctctcatctgtcgtggaacactacggcgtatgtggaggtgggcattatgcagcttaccggagagtaacgccaaattcggattctaatgaaccagtgcaatctcttgcaagttttagaaaggagtggctttacgtctcggatgatcatgtgtcccatgtttcagagtgtgaagttttggcagcggaggccaccctgcttttctacgaaaggctgtag

SEQ ID NO: 12875 - DNA, 2100 bp, Oryza sativa
  Clone ID: TFbOSC900423j.C1.o11.fg
atggccgatgatcagtcagttggtaggaggagaatttactacgacccaattgtcaatgaggctctgatctgcagtgaaagtgacgatgatgttccagagccagaggaagagaaacatgttttcacagaaggagaagatcagctaatatggtggaaggaaagatcagaagttctttttgagaaatatgagaagcagtctcaatcttcttacaagacagatttgcaactttttcttgacaagaccatggatgtggctttagattcttttgataatctcttctgtcggagatgtttggtttttgattgccgtctccatgggtgctcccagaacttggtattccctagcgagaagcaaccatatggtcatgaacttgatgaaaacaagagaccgtgtggcgatcagtgctaccttcgaaggagagaagtatatcaagatacgtgcaatgatgaccgaaatgcttgtacaacatataatatggattcaagatcttcctcactcaaagttagtgctaccatattgtctgaatcagaagattcaaacagagatgaagataacatcaaatccacttctattgttgaaaccagcagatcaaaaataactaattctgaatatgctgacaaaagtgtgacaccacctcctggagatgcttctgaaactgaaaatgtgtcccctgacatgcccctaagaactttaggcaggcgtaagatttcaaagcatgcctccaagtctaacgatcattcacctgataaaaggcagaagatatatagctcaccgtttccttttgcaatgagtgtactgaacaagcaatctgttccagaaattggtgagacatgtccagattccatagaatctgcagttgatcaacttccaagtctggatgaccctaacaagaaaatttctaccaaagatatgtgtgctggaagcacaactaacactactgaaaatacattacgagataataataataatttgttcatctccaacaaggagcactctatttctcattggagtgctttagagagagatttgtacttgaagggaattgagatatttgggaaaaacagttgtctcatagctagaaacctattgtctggcctgaagacctgcatggaagtggccagctacatgtacaacaatggtgcggcaatggcaaagagacctctatctggtaaatccattttaggtgactttgcagaggctgaacaaggttacatggagcaagatttggtggcaaggacaagaatctgtcgtcgtaagggccgagctcgaaagctcaaatacacttggaagtctgcagggcatccaactgtaagaaaaagaatcggtgatggaaagcaatggtacactcagtataacccatgtgggtgtcagcaaatgtgtggcaaagattgcgcctgtgtggaaaatggaacttgttgcgagaagtactgcgggtgctcaaagagctgcaaaaataggtttagaggatgtcattgcgcaaaaagtcaatgcagaagcagacagtgcccgtgttttgctgccagtcgtgaatgtgatccagatgtttgcagaaactgctgggtgagctgcggagatggctcactaggtgagccactggcaagaggtgatggctatcagtgtggaaacatgaaactcctcttaaaacaacaacaacgtatattgcttggaaaatctgatgttgcgggttggggtgcattcattaagaacccagtaaatagaaatgattaccttggtgaatacactggcgaattgatttctcatagagaagcagataagcgtggcaaaatatatgatcgagcaaattcatcgttcctatttgatttaaatgagcagtatgtactggatgcttatcgcaagggggataaactgaagtttgcaaatcactcgtcgaatcctaactgctatgcgaaggttatgttggtggctggcgatcatcgagttggtatctatgcaaaggaccgcattgaggctagcgaggaactcttttatgattaccgctatggacctgaccaagccccagcttgggctaggagaccggaagggtcaaaaaaggatgaagcatctgtctctcaccaccgagcgcacaaagttgctagatag

SEQ ID NO: 12876 - DNA, 6420 bp, Oryza sativa
  Clone ID: TFbOSC403850j.C1.o3.fg
atggaggagcctgacggggaagcgcgtgggcgggaggatcatgctgcggttgggcggttgggaggagaggagggtgctgttggcggcggtggcctggctttgctcgctgttcctgagattggcggtgagctcggtgatggtgggaaggtctgcggtggtcaggagaggcgcctgcccacagaggaagatggagtccgagataatggaggtggctccgctgcagaattggtggaatctgctgtgaatgtttctaccccttttgaaggaaggggtcagattggtggtgagaaggagtctagtatgcaggaggggtctatgaacatggcgggagagaagcatggcagttatcatgtggaatctgctgaacccagcaatttgcagacgtgtcatgcgcccaatggcggggtatcgaataagacattatttgctcccttcagcgaagttttctccagtgataacagccatatgcgttacttgctggacaaagcgacagaggggagcatttgtgagcatggtgatttggcggacagtaaagatgatttgggtggcgcaacggacgtaaagacaaacacagaagatttacagatggtttgcacgaaaccacattgtgatagcgagggtttgtcggatttgcataatgacagtgagcgatggccacaagtggttgatggggtgggatttacgataaagggtaataatgagctgaaacaagttgatttgataccaaaaattgaagctgaagtctctaggtcggtggaggatgattcaatcccttctttttctggtggtattgatgattctttacgcaaggcaggttgtgcgtgtgaaactctcaatgatatggggatgtctcatatggccaatggtgatttgtggtgcaatgttttatatgcccctcttagtgaaggatgccagtccaaggatgctcgacacatagcagtcatggggaacaaggtgacacaggggagtcaatgcgggcagggtgatttggcgtgtgatggaattgttttgcgaggtggggtagatgtagagaaaagtctagatgatttacagatgtgttccaaggaaccacaatgtgataacaagggctttccatatttgacagaatttggtgtccagcagccatcatatggcatgaatgtcatatgttcgaagacagatcctaaccatcagctggaaaaggatgaattgttgacaaatactagaggagagttctctagttctatccatgaggattcagttccttcaatttctgtgagctctgttgattttacttttgatggcaatgctggtcagattggtaaaacatctgagcatagagcaatcatggagaaagtgtcgcatggttcacagcgaggaggtgtactttcctgtgagagtaggtctttaaaggagtctcatgcagatgagaatcagagttccacattggaggttaagacatgtgaagagggcttacagacaggtcaagtggaaccatgccacagcatcgtagctttgtcggattcagggaagtatggcaccgacatattaccacgtggtggtgacggtctgagatcgatgactggtgctaaccatgagctggtaaaggatgattttcatccaaaaagtgatgtagtggtctcctgtccagtggatgaggcatcgattccctctaactataatagccccattgatgttcttttatacaaagaggatggtttagttggtgagatatctgaaaatagaattggtgtggagaaattggctcatgatttgctcggagaagttatgctttcatttgacagcaggcctcagactgaggcttctggagatgagaatcaacacttctggatggatgttccaaagggttcaactgcatctgtttgtgaagtagaaaatacaggcactagaagatcttgtgatccctgtgctgaaatagagtttccactccaacaaagtcgtgaaaagcatgtgatctctgaatcccccccagagagagatctgactagttcgtcccataacctaccttgtgaaaatgaaccttgttatagtggcagggaaacacccgccttctgcctaggccatcaagattctgctggtcttggactggaatcttcagactgtttggtacaagagctcaatacgtgtacttccactgatgacaaagcttgctctgttgattttgttgagaatggtaatggttctcataaccaaaaggaagtgccggtgattttcttcaggcggaggaatccagtaagagctgcctcttcaagaaattctaattttgagaagtgtgaccagataaacaaatcaggtaatagtacacgcaaatctaagaaggttgacagtgtaagctcattacttaaaagcaccatgattaagttcccaaacaaaaccacaaagggaagaagtggcatcaataggccattgaactcttctgcttggggcagcctacaaaagctaatggatggtttcaatcagaactgtggtccttcaacttctcgttctcatcaaacttgtttgggaaaagaaatatcaaatagaggatctagcgagaaaaaacagctatctattcggaaaattcgaacttcaagatgttcaaaatataaaaacacatcactttctgatattggatatttagcaggtgaattgaatggccaaccgacctgttcagtgaggattgatactaatgtttcttctgatgcattgttcaattctccgaatggtgctcacaaagctgcacagtgtgttgaaggtaatcatactctaaaattaacatctagcctgactgacacacaacagtttggcttggagaatgttactcaagaaacatgccctgggtacatccatggagagtgtggtacttcaacttctgaacgttctctaaataatatagttgggttttcaccagactctgttttggatatagcttctgttacatgtgaaagcaacacttctgcaacccttgatgttatagtgcatgaaaacccatcttgtcctggtggattgattggaggtggtcttcgtgcatctgctttatctacttctcactgtgaaaatcatcatgcttcatcattgatggatttggagcagcaggtcaaaactgtgagggagaacgacatgggagaggaagatgtcattccatcacatgccatgatgtacaatgatattggtgaaggaaagcaaactttagcgaagtccaatacgatgaggaaaggtagaaatgtgggaaagcaggaatgccgaaagaaagatggaaagaagggaaaaaacataaacaaaaatagaagttccaccaaaatttcatctagtgaagcttcaaaactcgtgtccttttctaatgattcaccttcacttgatccatctgagttgctgcttcatacgagacctccaaagtttggttcttgttctaaggtcgtaacttctgccatacatgatgttggtatgcatggatatgacaatatgcgtccttttggaattgacaatgatgacgaagggagtgcatttgacaatgtgaaatcactaaggcgcaagaaaaaggatagtcatggaggaaagaagggtaaggtgcgggatccacatgggaagggcagaagcaagaagaaaaatatagctgataacacctacggtgatcttattcctgctgctgaacttgtattcaagaactcttctgccgtatctgttgaattacctgcagttgttgcttgcaaaactgatggtgcatctgtaccaccagcacctgcttgggtttgttgtgatgattgcgaaaaatggcgctgcataccaactgaactggcagataaaatctcaaaagaaaatctcagatggacttgtaaggaaaacgaagataagacatttgccaattgctctataccacaagagaagacagatgatgagatcaatgcagagcttgggctttcagatgcttctgctgatgaagctaatggcgatggatcaaactcgaaagcttctggagaaccaaactttgcacttctcaggtcaaacttgtttctacatcgtaaccgcaggacacaatccattgatgagttccaaaggcgcacctatgcaaaacttggtaagttccatactggtaaaaagggctatggattgcaattgaaggaagatgtatctgaaggacgattcctcattgaatatgttggagagggaaacatgctctgtttaaatgttgattatgttggtttcacattcgttgtccttgatataacggcttatgaatcccgccaaaggtattatgcctctaaaggccagaagcatttctatttcatggcacttaatggtggtgaggtgatagatgcttgtactaaaggaaacttgggccggttcatcaatcatagctgcagtcctaattgccgtacagagaagttatattcttattttgagtccattaaattactttttccttgtgagcagtggatggtcaatggtgaagtctgcattggaatatttgctatgaggaacatcaagaagggtgaagaattgacgtttgattacaactatgttcgtgtatctggtgctgctcctcagaaatgcttttgcggtactgccaaatgccggggttacatcggtggtgacatatcaggtgctgatatgattactcaagatgatgctgaagcagggactttcgaacctatggctgttcaggaggatgctgaggaagtacttggtgcaaatggtttgtcctctcatggcacacatctagatattgtcgaccatgaagcttccactaaaacagaagattcaaatgattgcccatctgtgaacccaccagagttagaatctgagcaacaaacttcaggaaccttatttgacacaagtgagccagaaaattccttagaagcattgagcccacaggatgatgaagatgtcgtccgcacacctgtccatgtgtcccggacagttgagagtacgtcgcggcagtttccagaatatggtactcggtcatcagaaattttgcaaagggctccatgcacactggatggaccaaaggttccaagcacaacaaatggaattccgcctagttccgatttggggagccactgggtaccaggtttccacgctaataagaaaaccaatgtaaaacatcatttgattctgaatccatcatcagctcctattgacagtgagcacattttgggagggttacatatgactgttaatgatcgctacctgacatgcacagttgaaggaagattgaacagcttgcttgatgtaaatggaggtattagcaaacgaaaagacgcaacaaatggatacttgaagcttctccttgtgactgcagcggaaggtgacaatgctgggggcacgtctaaaagtgtaagggatctttcgttaattcttgatgcacttctgaaaacaagatccaattctgtcctgttggatatcatcaataagaatggactgcaaatgcttcacaatatattaaagcagaataaaagcgatttccataggatacctataataagaaagcttgtgaaggtacttgagtttctagcttccaagggcattctgacatctgaacatataaatggtggtcctcgatgtgctgggacagaaagcttcagggagtcgatgttgggcttgttaaggcataatgatatgcaggttcaacagattgctcggaactttcgtgatagatggatccaatgggcccctcgaaatatttcaagaaatgagccaacagaatattcacgtgcatccatatctgcacacgatattcatgtcatttcaacagctggtggatcttttccaacttcagccaacactatggattggaaatccatcagaagaaaacgcaagagccgttgggattaccaaccagatgaccactataaaatgggtggcctgaaaattcagaaagtttgtcctgtacaaagtgagtttcggactggctcggtgggaaataagttgcatggtaattggggaacgaacagctcccacaatgatgttcctgtggtgggaagttcagccgatggtgcagatgatgaagcacctcctggatttgagtctcagcaggaaagtcggcctggacaagcttgtttagaatcgggggtttctccaggattatacttggagagcattttggaaccccagaagttgaaggagggccatgtcgcaaaaactggaaagtcgcacctggtgtgcctttccagccctttccaccattgccgccctatccaagagggagtccttgtccttccactcagatgtctcagcatgaacacaacagtttgggacattgtggcagggctgcaaatagagacgggagaatacataggaattggagaaatggggcgagaacaaaatttccatacaatcatcaaggacggagatttcctaacaataatcaaagattttgaaagttgcctgctgcctccaacgtctcaggagcagggtgatccaggacctagaggcagggagtga

SEQ ID NO: 12877 - DNA, 2481 bp, Oryza sativa
  Clone ID: TFbOSC401237j.C1.o16.fg
atgaaaagaaagagtgttaatgagcggcctagaaattaccatgttaatgagaagggaatttatatcttttttgaggaaatcctatcctctacaaaccagatttatatgtttttgaacttgttcgtccattgtgaacaagggtcagcagtttccacatctcagctaaggactggaatggccaaacccaatggcaaagagaaaacgggtgacacgggattgtcgatggctcctccaaagatttccaaggatagatttgatgctgctatcagagccatggctgatattggtatcctaaaggaaactgctgcgcccgtgttgaataatctactaaacttattcgattacaactgggtgcatatagaagctgataattatctggctcttgctgatgctatattttgtgattcagatcccaaagaaggacagaaaaggcaagctaatgagacaaatcttgatgcagaccaatctaacaagaagcttaagacaaaaaagcgttctcaaaatcctacatccaagatgcatggcaatgacaatagagagtttgttgaagctccaccacagcagggacgaggcacactgtctgcccgaactgttaatgggaagaaagtcaccagggcccacttggagttgccttcttcacaattactgatcaaggaaccacatacatgccctagcattgcaaagaatacaacaattgttgaaaataattctgctgtattatgccatggtcaagaccttcaaacttttgaggtcccagtagcaactacttgtccgcaagttgtagcccccagtactcgcaaagatgcacgtaggacttctggtgctcgccatgatcagaagcatgaaggtgtatctggtgcgcatgaaaggaacagggctgttgcgtgtagcaaccaggaaattgtaagcagcaaggattctccatccaacattgaggtagttttgtcaaattatggagctgggaaactatcattcacatacaactcttccctggcaaaccgttctgattttcatctgcctgacattaaattaatttgcaagaaaatggaggctagatgccttaggaaatacaagagcctagaacccaatttctcttttaagaatcttattaaagatacttgccagtgtattgttgaatctagtggacctagacatgaaggcatcatacaaactgttcctgccctggacattctgtccaaaccttcagtgccgcaaatattgcagtcaaatcaagctaattccgcttttatgccacctaataatgtcatgagccttggtggtacttcttcctcttgcactgttgctggagttagccagaattctagtaatatgccggttgttccgcatcaactacatattggtgccaacagaccacctcatgatgtcaatgatatcacaaaaggtgaagaacgtttaaggattccaattattaatgaatatggcaatgggattcttcctcctccatttcactacataccacacaatatcacactccaagaagcctatgtaaacatctcccttgctagaatcggagatgacaattgctgttctgattgtttcagagattgtctggcacaatcacttccttgtgcgtgtgctgcagaaacaggaggagagtttgcttatacaacagatggccttcttaagggagcatttctagatagctgtatctcaatgattcgagaaccacttaaacatccccatttctactgcaagatttgcccaaacgaacgaatgaagatagaagtaaattctgattcatcaaacacagaaatgaatcctggtccttgtaaaggacaccttacaaggaaattcatcaaggagtgctggagaaaatgcggctgcactagaaattgtggaaaccgtgtggtgcagcgaggcatcacacgccatttacaggtgttcttaacccctgaaaaaaaaggatggggattgcgcagtactgagaaacttcctcgaggtgcttttgtttgtgagtatgttggtgaaatattaacgaacattgagttgtatgaccgtacaattcaaaagactggtaaagcaaagcacacatacccattgttacttgatgccgactggggtactgaaggtgttcttaaggatgaggaagccctttgtctagatgccacgttttatggtaacgtcgcaagatttataaaccacaggtgctttgatgctaatattataggaatacctgttgagatcgagacgcccgaccaccattattaccatctggcgttcttcacaacaaggataatagagccttttgaggaactcacatgggactatgggattgattttgatgatgtcgaccatcctgtgaaggcattcaaatgtcattgcggaagtgagttttgccgagacaaaacgcgcaatgagtggttctatgctgctgcactcgtctggttcatcaatgaaattgcattagctgacaaaagtttatatactgccacaggatctaaatcgagggcgcgggtttaa

SEQ ID NO: 12878 - DNA, 2526 bp, Oryza sativa
  Clone ID: TFbOSC401000j.C1.o1.fg
atggggatcccggaggtggtggtgccgccgagggcggccggcccgcggaggtacaaggggctcgtgccgtggcgcttccagccgggcttcgtcaggccgcctccggtcaagccccctgccgccgccgccgccgttgccggaggaggggtcgcgggcacgcccggcggcaagggtcgcgggttgggggcgtcgggggaaggcgtcgggtccagtggaggccggggagatcctcaatcgaggagatgcacccgcagcgcgagcgcgaagggctctggtgatgcgcggagcgtggaggagggcggtccccgtgttgccggagacgacggcggttcgggcaaatccggcgtcgcggcggagggctccggatttgagggtttgaggaatggcaggggcggtggcgttggaacggcagctgccgaagattgtggtttggagaagtccaaccccgatggcatcgtcggagatgctgatgtgcatcttgagagcggcagcgatgcaagagatggggaatgcgtttctgagggtttgaagaagccttgtgtaaataatagcaatggttcttctgccgcggattgcgcgccgaaggtgaaaaagggaaatgacagtggcaatggaggtgccgatgagtgtaatgctgcagccaaaagtagcaacttagcatgtcctggcaacaatggcgacgaaacgaatcgtaaggggcggaaggtagtacttccatggaggttccaggttgggttcaagcggtcgttctcgaaagctttctgctccgatagtgaatcttcagggccctctggtactcaattctacagagcccaagactcttcgacaccgtgcactccagcaacaagaagttctgtccggtgttatgcgagtgctcattctggtgttagagtctcggccatgcgtgatttctcagtgaaaggtgagaaggaaacatcaactccatataagaagagcaaaactggcatggatggtcctagtcaagggatgccaaagaatggagttgtcctcgctagggaaaacattatgggatctctgcagaattttcgcttaatttacagggaccttttggatgaagaagaagagaagtcgacagaagcagtgattagacctgatctacaagcttacagaattttcagggagcggttcatcacagactgcgatgagaagaaatatattggcaatgtgcctggaatcaaagttggtgatatcttccacttgagggtagagctttgtgttgttggtcttcatcgcccacaccgggtgggtgtagatcatatcaaacaggaggatgggacttgcatagctgttagcattgtatcatatgcacaatcttccgatattaagaataatttggatgtcttggtgtattctggagcaatgacagctatagccaatcagaagatagagggtaccaacttagcactcaagaagagtatggacactaacacaccagtccgtgttatccatggtttcgtcactcacctcaatggaaactgccagcgaaagaagatccctacttatatatatgggggtttatatatagtcgagaaatactggagggagaaagagggtaatgatcgttatgtttatatgttccgactgagaagaatggcaggtcagaaacacattgacatccaagacattctgaattcaggacaagctgaatcatatggtggtattatcataaaagatatatcccgaggattggagaagatccctgtatctgttgttaattcaatatctgatgagtacccaatgccctatcgctacattgcacacctgcagtacccccgtaactaccagccagcacctccagcaggctgtggttgtgttggtggatgctcagattctaaaaggtgtgcatgtgcagtgaaaaatggtggggagattcctttcaatgataaaggccgcatcttagaagcaaaacctcttgtttatgagtgtggaccttcatgcaagtgccctcctacatgtcataacagagttggtcaacatggccttaggtttcgtttgcaagtcttcaaaaccaaattgatgggctggggagtaagaactcttgacttcataccatctggaagctttgtatgtgaatacattggagaagtgttggaggatgaagaggcacagaaaaggtcgaccgatgaatacttattcgctattggtcataattattatgatgaagccctttgggagggcctatcaagatccataccctcacttcagaagggtcctgataaagatgaggaagctggctttgctgttgatgcttcaaagatgggcaactttgcaaaattcatcaaccatagttgcacccctaacctttatgcacaaaatgtcctatatgatcatgacgacaagagtgtacctcacattatgttctttgcctgtgaggacattccaccccgccaagaactttcataccactacaactatacaatagatcaggttcatgatgccaatggtaacatcaagaagaaaaaatgtctctgtggctctatagagtgtgatggttggttgtattag

SEQ ID NO: 12879 - DNA, 1521 bp, Oryza sativa
  Clone ID: TFbOSC409873j.C1.o16.gm
atggctggaactcggcagacaacttcagttccgatggataatgcagcagttgttgatgcaaaacccttgcgcacattgactcccatgttccctgcggcacttggtctgcacactttcactgctaaagaaaactcatcttcgattgtctgtattaccccgtttggaccatatgctgggggcactgaacaggcaatgcctgctagtattccaccaatgtttgcatcaccggctgcccctgcagaccccaaccagaggcagccatatgctgttcacttgaatggagctgctcctgctaacggtacagcaaacaacacaggggtcatccctgatttgcaaatagctgtggcaggtacagtggaatctgctaagaggaagaggggcagacccaagcgcgtgcaagattcttctgttccttcagctcatttggttccttcagctccaggaggtaacatcactgctgtccagacgcctccttcagcaaccacagatgaatctggtaagaagaagaggggacggcccaagcgggtacaagatgtacctgtcctgtcaactccttcagctcctcagacaccttctgctgtcaccttaccagaagatggtaagaggaagagagggcggccaaagcgtgtgcctgatggtgcactgattcctttaagtcactcagatgatcctagggaatctgttgataatgtactcatgatgtttgatgcactgcggcggaggctcatgcagttggatgaggtgaagcaaggagcaaagcagcaacataacttaaaggccgggagtatcatgatgagtgctgaacttcgtgcaaataagaacaagaggattggagaggttccaggtgtcgaggttggtgatatgttctacttcagaatagagatgtgtctggttggactgaatagtcagagcatgtctgggattgattacatgtctgctaagtttggtaatgaggaggatcctgtggctatcagtatcgtgtcagctggtgtgtatgagaataccgaagatgacccagatgtgctggtttacactggacagggcatgtctggaaaggatgaccaaaagcttgaaagaggtaatcttgcacttgaaaggagtttgcatagaggagaagttattgacagaaacagtatcattggagaagatgattacatctttgagacaccgtcttctgagcagaatttaagatggaactatgcaccagaattactgggtgaacccagtctttctgactcaattttgtatgatcatggtgacgagggatatccacatatcgcattctttgcaatcaagcatattcctccgatgacagagcttacatatgattatggtcagagccaggaccctgccgccctttatttgggcggcaagctgacgtggcacatgggcgcaggacggacgtttttgggggctatgaattttgcacgtggtccccttgccgtcttctgtctgggcggcaaggggcctccgtgcaaaatttgcaagggcggcaaggggcccagatgcaaaaagaactag

SEQ ID NO: 12880 - DNA, 1992 bp, Oryza sativa
  Clone ID: TFbOSC422929j.C1.o3.fg
atggagaactcggaagatgaagcagagagtgacaaactacccttagacttggagccattgcgctcattagcaccaaagtttcctactattttgggatatgatgtggaaactcaatcaactgatccactgttagtttatgccacaccatccataccttgctcctcatcagaacagcctcaagaagccccagcttcattttctctgcccttaccaaagtcacccgtccctataaaggctacacccatctcagcggcatttccaacaccgcaacatgaagatgaatcatcagatcaagattacaagcccttttgcaagaataaaaaaccagcgatgccgaagagagccaagaggccccagcaagctgagaaatccaatgatgctaacatcaagcgcagatcaataaggaggaacctggacaacgagttcaacttgtgctcatcctcatcagacaacccaaaggaatcggtggaaggaatcctgatgatgtttgattcacttcggcgccgtgtactgcaattggatgaaaaagaggatgcaagcaggcgggctgacctgaaagctggcactctcatgatgcagaacaacctcagaatcaacaatcataagatgatagggcatgtgcctggtgttgaagtcggtgacattttcttctttaggattgagatgtgcattgttggtttacatgcaccagccatgggtggcattgattacatctcttctaagaacaaagatgagactctggctgtctgcatcatttcatctggaggctatgagaatgacgatgatgacactgacattttggtgtacacaggacagggaggcaacagtcgtcacaaggagaagcacgatcagaagcttgagagaggtaaccttgctctcatgaacagcaagagcaagaagaatcagatcagggttgtgcgcagcgcacaagaccccttctgtaactcaggcaaaatatatatttatgatgggctttatcgtatcgaagacacttggacagacacggcaaagaacggatttaatgttttcaagtacaagctgagaagggacccaggacagcctgatggaatttcactttggaagatgactgagaagtggaaagcaaatcctgccacaagagaaaaggctatattgttggatttatcatcaaaggttgaacacctacctgtgtgccttgttaatgatgttgatgatgaaaaagggccaagtcacttcaattatgttgctggagtgaagtatttgagacctcttaggaagacaaaaccattacaatgttgcaaatgtcctagtgtctgcttgcctggtgaccctaattgttcgtgtgcgcaacagaatggtggtgatcttccttacagtgcaacgggattgctggcaaagcacactccgatggtttatgagtgctcctctaactgtcagtgttctcataattgtcgaaacaggatcacacagaagggtataaaactgaactttgaggttttctggactggagaccgtggctggggtctgcggtcgtgggatcctatccgtgctggcacattcatttgtgagtacgccggtgaagtcattgatgaaactaagatggacatagatgttgaggaagacaaatatacctttcgcgcttcatgtcccggcaataaggctttaagctggaatttgggagaagaattacttgaagaaaaaagtacggctgtgataaccaagaactttaagaaactaccaatcatcataagagcaaacaatgaagggaatgtggctcgttttctgaaccatagctgttctccaaatctcctttggcaagctgtacagtatgaccatggcgatgacagctacccacatatcatgttttttgcaatggaacatatccctcccatgactgaactgacttatgattatggtacaagaggtgctccccctggctttgagggaaaacccttcaaagcttgcaaactcaaatcatgcctctgtggctctaagcattgtcgaggatattaa

SEQ ID NO: 12881 - DNA, 2220 bp, Oryza sativa
  Clone ID: TFbOSC401693j.C1.o9.gm
atggagatggacacatcgccatcgtcttcggcgccgtcgtcgccggcggcgtcgtcggactccatcgacctcaacttcctgccgttcctcaagagggagcccaagtcggagccggcttcaccggagcgagggcctctgccgctggcggcagcggcaccgccgcctccacctccgccgccgcccccaccaccgccaccgcaggtgcaggcggcgacggtggcaactccggtgccggcgacgcccgacctctcggcggcggcggtgatgacgccgctgcagtcgctgccgccgaaccccgaggaggagacgctcctggcggagtactaccggctcgcgacgctatacctgtcgtcggcgggggcggccggcgtaatcgtgccggcggcggcgccggaggcctccgcgggggcggtggcgcagcccgggtcggggtccggcgcgaagaagcggcggccgcggtcgtcggagctggtgcgggtgtcctcgctgagcgtgcaggaccagatctacttccgggacctggtgcgccgggcgcgcatcacgttcgagtctctccgcgggatcctgctgcgggacgacgagcgcgcggaggtgctcggcctcacgggcgtccccgggttcggcgccgtcgaccgccgccgcgtccgcgccgacctgcgtgccgcggcgctgatgggggaccgagacctgtggctcaaccgcgaccgccgaatcgtggggccgatcccggggatctcggttggggacgccttcttcttccgcatggagctttgcgtgctagggctacacggccaggtgcaggctgggatcgactttgtcacggctgggcagtcttcctcaggggagcccatagccacatctatcatcgtgtccggtgggtatgaagacgatgacgatcgcggcgatgtacttgtgtacacaggacatggtggtcgtgaccccaacctccacaagcattgtgttgatcagaagcttgagggtggcaaccttgccctcgagcgtagcatggcctatggtattgagatccgcgtgatccgtgctgtcaagtccaagcgcagccccgtcggcaaggtatacttctatgatggcctctataaggttgttgactactggcttgaccgtgggaagtctggcttcggtgtttacaagtacaaaatgctgcgcatcgaggggcaggagtcgatgggctctgtaaattttcgactagccgaacagcttaaggtcaatgccctgactttccggccaacagggtatttgggctttgatatttccatgggtcgagagatcatgccggttgcactgtacaatgatgttgatgatgatcgtgacccacttttatttgagtatctggcgcggccaatatttccgtcctctgcagtccaagggaagtttgctgagggtggtggcgggtgtgagtgcactgagaattgctcaattggatgttactgtgcacagaggaatggcggtgagtttgcatatgacaagctcggtgctcttttacggggcaaaccactggtatatgagtgtgggccatattgccggtgcccacctagttgccccaacagggttagtcagaaggggcttaggaatcggcttgaggtattccggtcaagggagactgggtggggtgttcggtctttggatctcattaaggctggaaccttcatctgtgagtttagtgggatagtgctcactcatcaacagtcagagattatggctgcgaatggtgattgcttggtgcggccaagcaggttccctccaaggtggttagattggggtgatgtctctgatgtctatccagagtatgtggcaccaaacaatccagctgttcctgacttgaaattttcaattgatgtgtcaagggcaaggaatgtggcttgttatttcagccatagttgcagtccaaatgtgtttgtccagtttgtgctgtttgaccattacaacgcagcttatcctcacctcatgatctttgccatggagaacattccaccattgagggagctaagcattgactatggaatgattgatgaatggggcacggcaattcagagcaaggttgtcacgccaaggatgttggcatggcaaggctatgacgtagcacagtctttcagtgtgtcacgttccatcatgccagggcgaataacagaagcttgcatatgggatgatgtttcaagccttcccatgaggaaggcaaagtcacagctcattgtcatccactag

SEQ ID NO: 12882 - DNA, 1785 bp, Oryza sativa
  Clone ID: TFbOSC416986j.C1.o5.fg
atggcgtctccgccgccgccgcctcgcctcctcactcccaagcccgaccccgacgcccccctacccccgctcccttaccccgaccccaacctcgtccaaagcatgctcttctccgcccagtccccgcaggcgcagccgcaggcgccgccaccccacatccaaccccccgcctccgcctccgccgaggccccctccggcgacgagaagaataagaagaagaagaagcgggcccgcgcctcccaggagatggtgcgcatcaccaaccttagcatcgccgaccacctccactaccgctccctcgtccgccgcgcccgcctcaccttcgaggccctccgcgccatctaccaacgccaggacctcgccaccgccgggggaatccgcaaccgcttcgacctccgggcctccagcaagatgctctccaagggcctctggatgcaccgcgacatccgcaccgtcggctccatccccggcctcctcgtcggggactccttcttctaccgcgccgagctctgcgtcctcggcctccacaccgcccctcaggccggcatcggctacatccccgccagcatcgtcgaccagggccaccccgtcgccaccagcatcgtctcctccgggggatacctcgacgacgaggacagcggcgacgtcctcgtctactccggcagcggcggccgcctgcgcaaccgcctcgaccacagcgccgaccagacgctccagcgcggcaacctcgcgctccactacagctgccactacggcatcgaggtgcgcgtcatccgtggccacgcctgcgaccacagccccagcagcaaggtctacgtctacgacggcctctacagggttgtcacctccaccttcggccctggcaaatccggccgcgacgtctgcaagttcaagctcgtgcgcatccctggccaggacgacctcggcagcaaggcctggcataccgcagcggagctcaaggatgcactggattccaagatccgcccgcccaagtacatctcgctcgacattgccaagggcaaggaaccattccgcgtgcccctctataacaagctcgacgacgacaggtcacccctcttctacgactacattgcctgtcccgacttccccaccacccagcagctgctcaaacgccagacccagaggggctgccactgtgccgagctgtgcggctccaggtgcagctgtgagaggaagaacaggggggccgacggccctgtgtacacctccgatggcatccttctcaggggacgccccttggtgtacgagtgcggacccctgtgtggatgccccatgacctgtcccaacagagtcacacagcaagggatgaagcaccgcctcgaggtgttccgttccaaggagacaggctggggtgtcaggacgcttgacttgatacagccgggtgccttcatatgcgagtacgccggcgacgtgctctccttggacagccactcaggtgacgcccctctgcctccgatggaggacgggagctccatcatcgacccgaccaagttccccgagagatggagggagtggggagatgcatccgtggtttacccggacagggtaccccatttccccctatttgcaggggcgcgctaccgactcgacgtgtcacagaggaggaacgtggcttgctacattagccacagctgcagtccgaatgtgttccttcaatatgtaatccgtggcaatgaggatgaatcctaccctcacatgatggtgtttgccatggagaccatccctccaatgcgggatctgtccatcgactatggcttggactag

SEQ ID NO: 12883 - DNA, 1380 bp, Oryza sativa
  Clone ID: TFbOSC401218j.C1.o25.fg
atgggtgggagcagcgcaagcccgtgtgacctggacagggagttcgcgccccaaatcgcccagctcctcgccacccctcctctccaacccgcgcaggaatactacaatgggctcatacagtccaggaaacatgatggtataagagtgaacttcagcagcaagcatgggaaaggtgtttgtgcgaacaaggagtttgcagaaggggaccttattctgaaggatcaaatattggttggtgctcagcacagtcttaacaagattgattgcgctgtgtgcagttattgctttcgcttcattggttctatagagttccagattggacgaagattgtattggcaaagcgttggttcaagcagtgactgcactaataggaggcattgccatgagagtgatttgggatcgagtgccagttcttctggtgcaacaaaggaaaacagtagtactttgccagaagaggtcttaggatcacttattactggtgacatgtcactgcctttcacagaccattttagtttgcctcaagttgttccttgtcgtggatgtgaggaagaacgctactgcagccaatcatgtgctgattccgactgggaaacttatcactctttgctgtgtactggatctaagactgaaccatcccagagatctgctcttcagaaattcatagaacatgcaaatgggtccaatgatatttttcttgttgctgccaaggctatcactttcactctgctgaggtacaagaaactcaaaacgcagcctgaatttcaaaataacacagatgaatcaaacttttctttgcttatggaagcatggaaaccactttcgatgggctacaaaaagaggtggtgggactctgttgctttgcctgaggatgttgattcctgtgatgaagatacatttaggcagcaaattagggatctagcacttacgatcattatcttctgtgtttcgcagtcattgcagcttctcaaggatgctagtggtttggttgttccgtctccagtggaagactatttcatacatattgatgatcttccagatgatgagaagtgcaacatatcccaggaggaagctgaaaaggttacaaggccatttctagatgctttaggtgaagactatgcagctccttgtgaggggacggcattctttcctttgcaaagctgtatgaatcattcatgttgtccaaatgctaaagcatataaaagggatgaggatactgatggtaatgcagtgataattgctctggagcctatcaagaaggacgatgagattaccatatcctacatcgatgaggatgtctcctacgaggagaggcaggcggagcttgcagattatggattcatctgtacgtgccctaggtgccaagaagaaaagcccaactga

SEQ ID NO: 12884 - DNA, 2055 bp, Oryza sativa
  Clone ID: TFbOSC900416j.C1.o2.fg
atggagatggacacatcgccatcgtcttcggcgccgtcgtcgccggcggcgtcgtcggactccatcgacctcaacttcctgccgttcctcaagagggagcccaagtcggagccggcttcaccggagcgagggcctctgccgctgccggcagcggcaccgccgcctccacctccgccgccgcccccaccaccgccaccgcaggtgcaggcggcgacggtggcaactccggtgccggcgacgcccgacctctcggcggcggcggtgatgacgccgctgcagtcgctgccgccgaaccccgaggaggagacgctcctggcggagtactaccggctcgcgacgctatacctgtcgtcggcgggggcggccggcgtaatcgtgccggcggcggcgccggaggcctccgcgggggcggtggcgcagcccgggtcggggtccggcgcgaagaagcggcggccgcggtcgtcggagctggtgcgggtgtcctcgctgagcgtgcaggaccagatctacttccgggacctggtgcgccgggcgcgcatcacgttcgagtctctccgcgggatcctgctgcgggacgacgagcgcgcggaggtgctcggcctcacgggcgtccccgggttcggcgccgtcgaccgccgccgcgtccgcgccgacctgcgtgccgcggcgctgatgggggaccgagacctgtggctcaaccgcgaccgccgaatcgtggggccgatcccggggatctcggttggggacgccttcttcttccgcatggagctttgcgtgctagggctacacggccaggtgcaggctgggatcgactttgtcacggctgggcagtcttcctcaggggagcccatagccacatctatcatcgtgtccggtgggtatgaagacgatgacgatcgcggcgatgtacttgtgtacacaggacatggtggtcgtgaccccaacctccacaagcattgtgttgatcagaagcttgagggtggcaaccttgccctcgagcgtagcatggcctatggtattgagatccgcgtgatccgtgctgtcaagtccaagcgcagccccgtcggcaaggtatacttctatgatggcctctataaggttgttgactactggcttgaccgtgggaagtctggcttcggtgtttacaagtacaaaatgctgcgcatcgaggggcaggagtcgatgggctctgtaaattttcgactagccgaacagcttaaggtcaatgccctgactttccggccaacagggtatttgggctttgatatttccatgggtcgagagatcatgccggttgcactgtacaatgatgttgatgatgatcgtgacccacttttatttgagtatctggcgcggccaatatttccgtcctctgcagtccaagggaagtttgctgagggtggtggcgggtgtgagtgcactgagaattgctcaattggatgttactgtgcacagaggaatggcggtgagtttgcatatgacaagctcggtgctcttttacggggcaaaccactggtatatgagtgtgggccatattgccggtgcccacctagttgccccaacagggttagtcagaaggggcttaggaatcggcttgaggtattccggtcaagggagactgggtggggtgttcggtctttggatctcattaaggctggaaccttcatctgtgagtttagtgggatagtgctcactcatcaacagtcagagattatggctgcgaatggtgattgcttggtgcggccaagcaggttccctccaaggtggttagattggggtgatgtctctgatgtctatccagagtatgtggcaccaaacaatccagctgttcctgacttgaaattttcaattgatgtgtcaagggcaaggaatgtggcttgttatttcagccatagttgcagtccaaatgtgtttgtccagtttgtgctgtttgaccattacaacgcagcttatcctcacctcatgatctttgccatggagaacattccaccattgagggagctaagcattgactatggaatgattgatgaatgggtgggaaagttaaccatgtag

SEQ ID NO: 12885 - DNA, 379 bp, Oryza sativa
  Clone ID: TFbOSC9932j.C1.o1.np
gcgtcaaatatttagaaacggagggagtattttatttattttgtgcgcaacattattgatgatgagacttgtgaagaaaggcttgaggacatgagaaggcgtggagataagaatttctacatgtgtaaagtcaaaaaggactttgtaattgatgcaacattcaaaggaaatgattgccgcttttttaaccacagttgtgaacctaattgccagttacagaaatggttagtcaatggcaagacaaggctaggtgtgtttgcttcaaaagctatagaagtgggggaacccttgacctacgactacaggtacctacattatggtcctgaaatagaatgtttttgcggggctcaaaactgccaagggaatatgtctgtgagtg

SEQ ID NO: 12886 - DNA, 1572 bp, Oryza sativa
  Clone ID: TFbOSC401276j.C1.o12.fg
atggcgggccctcccggcccggcaccgggcacctcctcctcctcctcctccctgcccagccgccgccgccgccgcccccctccgcgcctcggccgacgccgcggcggcgatgatcaacagcccccgcatcctccaaaggcctcgtcggaggctctcccctgcgcggcctccccgcccgcgcggtgccgcggcggtgatcaccagcccccgcatcctcccgaggccgcgttagaggctctccgcggcgcggcctcccctcccgcgcggcgccgcggcggtgatctacatccctcgcatcctcccgaggccgcgtcggaggctctccgcggcgcggcctcccctcccgagcggcgccgcggcggtgatcgacagccctcgcatcctaccgaggccgcgtcggaggctccctccggctcggcctccccgcccgcgcggcgccgcggcggcgatcaacagcctccgcccgctgtggcggtggcggtgactagtgaaggcggcgtgggtccccgccgctcgttccgcatcagcctgcggcaccgcgtgcgtgtggtcccgtgggtgaagccacccgtggcgaggaagcccaaggaccccgcgaagcccccgcgcccgtcgatcgaggcgctcgcggcggaatgggcgaaggagaaggcagcttccggggcccccgaggaggagtgcgtcctgcctttcctccagaaagatgcgcctaagaagctcgacattgtaaaagttcttggactagatggatttggatatatggatacagtgatattgagcttgaagagttacaggaaaaacattcccattacagtaggaaatttcgtgattgtgatgcaaagctgcataaggcttgttctgaaaaaggtgatggatgctgtcctcgacatgatgcaggtccaacagatggaagccttccggcgcttacccctcccacacactttccaagagttcaacattgaccctataaagaaagaggaattggacaatgggacagaaccacctccatataaaattaagataattcctacaggtctctattggttagctgctctcgggcttgtcactgctcagatgagtgcactaacaaaccatttcgccgacagaaaaagattgagatcgttaagtggaatacttctgcagacacaatattgtggatggggatctagagcactggaagccattgagaaagatgattttgtcatagaatttgttggagaagttattgatgatgagacttgtgaagaaaggcttgaggacatgagaaggcgtggagataagaatttctacatgtgtaaagtcaaaaaggactttgtaattgatgcaacattcaaaggaaatgattgccgcttttttaaccacagttgtgaacctaattgccagttacagaaatggcaagtcaatggcaagacaaggctaggtgtgtttgcttcaaaagctatagaagtgggggaacccttgacctacgactacagattcgagcaacattatggtcctgaaatagaatgtttttgcggggctcaaaactgccaagggaatatgtctactccatatatcctaaactttgagtga

SEQ ID NO: 12887 - DNA, 3477 bp, Oryza sativa
  Clone ID: TFbOSC421726j.C1.o17.fg
atgcagcctgaattagtccccgagtggaaaacttggaaacaggaagtcatgaaacagttcttttcatctcatccagttggcaatgctggcaactttgaacaacacaattgttatgatgatccaggtatggatcaacaagctcgtataaaacattccaaactcgaagtccgcagaggagaagctcatttttcacaagaggatgatgctaacctcaacacattaagtgaagacccaaacaaaagtaacctccccagtatctccatcattcatgaagctgtaggaccattagagtcaagagatcagaataaaactgctgccttccccagtacttctggtgtccaggacactggagaaccaaatagtgctttacacaatgtcagacatgaattggattcattcaagagttctcggcagtgttctgcatatatagaagcaaaaggaaggcaatgtggtaggtgggcaaacgatggtgatatttactgttgtgtgcatcaaagtatgcattttgctgaccattcgtctagggaagataagtcacttactgttgaaactccactgtgtggggggatgactaatcttggtagaaagtgcaagcatcgagcccagcatggttttatcttttgtaaaaagcaccgcttccaaacaaatccagatgcaatgagctcagatagtttgttaagttcgtctgagggccgtaagtgggaagagtcacagaaaagcgtggagaagatgtcttcctcaaatgcaacttgtagtgtaggctcagagcaggcaaataatttccaggttgctgtgcacatgaaagtgacaccaaccatggctgttgagacaactagtgataaagttaacgtgtcagagaacgctgatctctgctaccccatgtcaacttccatggaaaactctaacttagatgcttctatttgcattggaattcgctctcatgacaatattgctgaatgccaggattatgccgtacgacacacactttactgtgagaggcacataccgaagttccttaaacgtgccagaaatggaaaaagtcgactcatctctaaagatgtctttatcaatcttttgaagtgttgcacgtcaaggaaagaaaaactgtgcttacatcaggcatgtgagtttctttattggttcttgagaaacaatctttctcaccaacgcccgggtcttggtagtgaccatatgccccagatattagctgaagtgtcaaaaaatcctgatgttggagaatttttgttaaaactgatctctagtgagagagaaaagctttcacatgtttggggctttggtacagatagctctaatcaaatgcattctgagaaccaagatggatcagtgatggtgttacgtgaagatgggacacatccttcacctggtctgaagtgcaaaatatgttctcaggagttctctgatgatcaaggacttggattacactggacagaggttcacaaaaaagaagtgcggtggcttttcagaggctattcttgtgctgtatgcatggactcatttaccaacagaagagttctcgaaaggcacgtgcaggaaaaacatggcgctcagtatctccaatattcgacactcttacgttgtatatcgtgcaacagcaactttttgaacacagatcttttatggcagcacattgtttcagatcattctcgagatttcagccttctggatcatgtccctcgacgacctaggggtcaatctatcaaaagaacagaaagggcaagtgatgagctcctttatgataaccataaccttggtaaggatgatggtttacagaagttcacctgcagattatgtgggatgatgtttgatcttttgccagatcttggccaccaccatcaagttgctcatacaaactcaggtacagtcagtgatatcccttcaggacgtgaaaagtatcagtttaaccgtggtcggcactattattcagccttcaagaaaagtttaagaccatccggctcattgaagaagaggactagttctggagttgagaaacattttaaggctcaaagcttggatctatctatggatacatcacacattgtggaatctgagaccaccacccttggtaggttactggatttccaatgctcagacgtggcattgactttattttcaaagattcaaaagacaagaccccacccaagcaaccttgatattctgtctattgcccgttctgtttgctgtaagacaagccttcgtgctgcattgaaagctaaatatggaatcttgcctgataacatatttgtgaaagctgcaaagctttgtagtgatgttggcatccaaattgattggcatcaagaagaattcttttgccctaaaggttgcaagtccaggtctagttctaattccttgctccctttacagcctacccaagttgattttgtgatgagtcctccaattggtgatgagatatggggcatggatgaataccactatgttcttgattcagagcactttggttggaatcttaagaatgagatggttattgtttgtgaagatgttagctttggcagggagaaagttccagttgtctgtgccattgatgtagatgcaaaagaatttccatatatgaaacctggagaaattttgcaaagtgaaaattctctgccctggcaaggtttccactacgtcacaaagcgtttgatggattcatctcttgttgattcagagaacactatggttgggtgtgcttgttctcatgcccattgcagtcctgaggaatgtgatcatgtgagcctctttgatagtatctatgagaacctagtggatctccatggtgtacctatgcgtggtagatttgcatatgatgaaaatagcaaagttattttgcaggaaggatatcctatatatgagtgcaattcatcatgcacttgtgatgcctcctgtcagaataaagtactgcagagaggactgctggtaaagttggaagtcttcagaactgagaataagggttgggctgttagagccgcagaacctattccacagggcacatttgtatgtgagtacattggagaggttttgaagatgaaggatgatggggccataagacatgtagaaaggctagaaatctattggaatttctccggtgcattccataaactgataagaaaattattggatctcagggaggcaaaaagtggtagcagctacttgtttgaaatcacttctcagattgacagggaaagagttcagactacagggactactgcatacgtgattgatgccacaagatatggcaacgtatcccgttttattaatcatagctgttccccaaatctcagtacgcgtttagtttcggtggagagcaaagactgtcagcttgcgcacattggtttgtttgcaaaccaggatatcttgatgggagaagaattggcctatgactatggacaaaaattgctacctggtgatggatgcccctgccattgtggtgctaagaattgccgaggacgtgtgtattga

SEQ ID NO: 12888 - DNA, 2091 bp, Oryza sativa
  Clone ID: TFbOSC401583j.C1.o35.fg
atggaggtctcgccggtgccgaagccgccactggaggcggcgcttgcgctgcgccgcagcgttcggtgcttgaacaggacgcgccgtcccacttacgtggagcaggaggagcccaaggagagtgctggccggcggcgcggcggcaagaggaagcgggaagaggagaagaaggagccggtggcgcagcacgccatgaagccggtcaggatgggcgatgcagcctcggagaggaagccctcctcggaggggaagccgatgcccgcaattgcggcggagccggtttcttgtgccgggttcgcacgacctgctgccgaggatgatgtccttggcaacgggaagagtgcgaaactgcgggtgaaggaaaccttgagggcattcaccagccattaccttcaccttgtccaggaacgtatgttatctgacaatgcacttgtggaatttcaggaggagcagaaaagagcacaagcggtgttacaggaaggccagaagcgtccatcaaagcggcctgacttgaaagccattacaaagatgcaagaaagcaatgccgtgctttatccagagaagataataggggaactacctggtgttgatgttggggatcaattttattctcgtgccgagatggttgttttgggcattcatagtcattggctgaatggcattgattatatgggaatgaaatatcagggaaaggaggagtatgcaaacctaactttcccactggcaacttgtattgtcatgtcgggaatatatgaagatgatcttgataaggcagatgaaattatttatactggtcaaggaggaaatgatttactcggtaatcatcgccaaattggctctcaacaactgcaacgtggaaatttggcattgaagaacagtaaggataatggcaatcccataagagttatccgaggacatatatcaaagaatagctacactgggaaggtctacacctatgatgggctgtacaaggttgtagatgactgggtgcagaatggagtacaagggcacgttgttttcaaatataaattaaagcggcttgagggacagccatcactgacaacttctgagatagattactatgtttggtcatgctttgtttatagtgtgccattcttagtgacgctgatatcatgttgtatgacctgtgccttgctactttctaggttggtttgtgatgacatatctggtgggcaggagaatcttcctattcctgctactaatttggttgatgacccacctgttcctccaactggttttgtgtactccaaatctctaaaaattccaaagggcatcaagattccatcttattgtaatggctgtgactgtgaaggagattgcgcaaacaacaaaaactgctcatgcgcgcagcgcaatggttctgatttaccttatgtatcacacaagaacattggcaggttggtggagcccaaagctattgtatttgaatgtggtgctaattgcagctgcaacaacaactgtgtaaatagaacatctcagaaaggtctgcagtatcgcttggaggtatttaagacagcttcaaaaggctggggtgtcaggacttgggatactatcctccctggggctcccatctgtgagtacactggtgtgctgaggaggactgaagaagtagatggtttgctgcagaacaattacatatttgatattgattgtcttcaaactatgaagggtctggatggaagagagaaaagggctggctctgacatgcatctgccgtctcttcatgcggagaatgattcagatccacctgcaccagagtattgcattgatgctggctctattggcaactttgcaaggtttataaaccacagctgcgagcctaacctttttgtccagtgtgtcttgagctcccataatgatgttaagctggcaaaggtgacgctctttgctgctgacactatacttcctcttcaggagctttcatatgattatggctatgtcttggacagtgttgttgggcctgatggaaatattgtcagctgccttgcttctgtggtgcaccgtactgccggaagcgactttattagatctgcacctgtttgcatctatttggaatatgaaccactctaa

SEQ ID NO: 12889 - DNA, 3879 bp, Oryza sativa
  Clone ID: TFbOSC400435j.C1.o7.fg
atgagcgggctggatctccgggagatgttaagcagcgctgcgcggcggcatacgtggaggagaagcggatggggggcggagtggggcggcggcgacgacgctcgctcggccgcgcttccggctcgctgtcctcctccccctcctcctcgtcgtcccgcggctgcgggtgggcgtggcgacgaggggagcggtggagtgcgggggcgcggggaggaggggacgagtcgtggtggaagcggagcgaggcgcgaggacgcggcggggaccgggaggaatgcggtggccgtcgtcgccggtggctcggccacgtccggcgcggagcgggttgctgcgcgagcggaggacgggcggcgatcgatggacgggccgacgctggaactctccgagatgatgctccacgcggcgcagccatggagaagccgatgcacgcagcgtgacgttcgcccgggcgcggttcctcctcgtcccgtcgctgcggatgggcgaggcgagggcaccagtacagtgcgagggcgcgtgctggaggggacgactcgtggtggaggcagaggaggtggaatggagcgtgagcgcgaggtggtggcgccggcgagaaatgcggtggccgtcgccggtgatttggccacgcacggcggcgagcgggttgctggccccttggtggcgaaggagaagagaaatggcggcggtgagttggggacgaagagggggctagagaagcgggccccgcttccgccgcccaagcgcagggtggtgtccgctaagcgccagtttccaccagatttcggtagggactctgctgttccactcggccgcggccggggccgtggtggtggtgttcgtccgtcggatggggcgcctgcccgtgctgttctgggtgagaaggtggcgtctgcgggtaatggtgattcaatggcgaatgtgcatcatcatgctgtgatggacacggtcttgatgaaatcttcacatgcttcggatgagaatctggttgctttcaaagttggttcaccagagaatggtgcagaaggggcagcaaggggaaagggagcacacaatggtgaattgctgggaaagagggaagtgttggctcaagctgtgaatttgcttcccatgaggaggactgtatctgcgacgcaccgcttcactgctgggtgtgggagggacgctgcagctccacttgctcgcagagaagagggtaaggtgggttcaggtttggaagtcatgcctgttgatgttggtgggggtgtgtcaaaggaggtgatggctacggatggcagtaaacattcggttaaccagtgtacggcgaacattgttggagctgtcggtgttttggatggaacagtacagtaccaggaattggaggagggtgaggtggctgatgaggcatactgtgatgtagagtcacaaaaagttgttggttgtgattcttttgatgattctgcaggtgaaagacatgagggtgttgttcctgtaacgtttgctgttactgaagttttgacaagtcacgcttatgatgagatgatgcaaattaaggcattgcaagaagggggcagtgatgctgcgcaggaaactgaacatgacttgccaatgggaggcaaatgtgaaactatcttacctgatgcttctcctaaatgttcgtttggtggtccttcaaatgaaattgtccacggcaagagagtgttggggagtcatggcatgaaaggggaagttcccagtcttgcaattgaagatcatggtggcattgctcaaattgaccaagaactggaggacgttgagatgactacaggggaataccgtgttcaggatgctcaaattgccacccatgttatcccacacgagtctacaactggtagacatgagggggggctttgtgcatctgcagctgctgaagatgttaaggtgatgaacaaatacaaagggaccttacccaaaggtgctgctaaatcatcgatgaatattgcaacaggagtatttggtgatggtatcatgagaagtaagatactatcaacagctagaaaagtagtcaagccacctgtcagagcaagccataagcctccattgaacactctgcatagacccttctccacaaatagtgcttcatttggtcataagaagttgaaggtaaaacgtccagatcaaagtaaagatattcctatgaagattgcctctacatctggattggcgggcaaggacaaccttatcgatgaaaaggctttgagcttggaagatgatgatattttgaaggcactagttgttcatgatggaaagcttgaggtgtatctcaatgttccctcatgcgttcagcttcataggcaacatggaagtgggaatgctgatgataggagcaaaatcaggatgttgtgcaggaggtttcagtttatatgcagggctctcttacatgccgtcgaacagggttcattgaagattcgaagagttgaccttgcagctgataaaatcatcaggaaattgccaggctttaccaaacctggacctactgtgggaaatgttaatggagtggaagttggtgacgaatttatgtacagagttgagctagcccttgttggtctccatcgcccataccagggaggaattgataccaccgattataatggagtgcttgttgcaataagcatcgtttgttctggaggttatcctgatgaattgtcaagctcaggtgaactaatatacactggttctggaggaaagcctgctggtaagaagaaagatgaggatcaaaagctagagagggggaaccttgccttgaagaattgcatcgagacaaagacacctgtccgagtgattcatggattcaaaggtcaaaatagagaggacaacagtcattcaagagctaaacaaatcctaacatttacttatgatgggttgtaccttgtggtggattgctggacagaaggactaaaaggttcaaggatcttcaaatacaaattacaaaggattcctggacaaccagaacttcctctgcacatagctaaagggctgagaaggtctctttcacgtccaggcctctgcatagctgatatatctcaagggaaagaaatggatcccatctgtgtgatcaatgatgttagtaatgtccatccaacatcttttcagtacatctctagaatcaagtacccgtcatggcttacaaaaagacatcctcagcatcatggttgcgattgctcagatggctgcatagattctactaagtgcttttgtgctgtgaagaatggaggaaaaatcccattcaactccaatggtgcaattgtccatgataaacccctcatttttgagtgtggtccatcctgtaggtgccattcttcatgccacaacagggtaagtcagaagggtatgaaaatccacctggaagttttcaggacagccaataaaggttggggtgtaagatccctaaggtccatctcttctggcagctttatatgtgagtatgttggtatcctgttgactgacaaggaagctgacaagagaacaaacgatgaatacttgtttgatataagccataattgtgatgatgaggattgctccaaggggaggccatcaactatttctagtctaaactcttctggtggttgctctcagaccatggaagatgtgtgcttcacgatagatgcgtctgagtacggaaatattggaagatttatcaaccatagttgctcacctaacctctatgcacaaaatgtgctttgggatcatgatgaccaaagggtgccccatatcatgttctttgctgcagagaacattcctccactccaagagctcacttatgactataactataaaataggtgaagtccgcgacctgaatggcagagtaaaagttaaagattgccattgtggttctccacagtgctgcggcaggctctattag

SEQ ID NO: 12890 - DNA, 2037 bp, Oryza sativa
  Clone ID: TFbOSC1067j.C1.o1.fg
atggatgcttcagcgctcagcaacccgcggctgcaggccatgctagaggaggagaagaggaaggcaatggcaaacgagttcgtggcgaagctgactgatgtttgctgggacaaatgcatcactgggagcattggaagcagcttcagcaacagcgaagcctcgtgtctgtccaactgcgcaaaacgctttctcgaactgaagatgctcaccatgcaacgacctcaagaagccccagcttcattttctctgcccttaccaaagtcaccagttcctataaaagctacaccaatctcagcggcatttccaacaccgcaacatgaagatgaatcatcagatcaagattacaagcccttttgcaggcagaaaaaaccaacgctgccaaagagagccaagaggccccagcaagctgagaaatctaatgatgccaacatcaagcgcagatcaataaggaggagcctggacaacgagttcaacttgtgttcatcctcatcagacaacccaaaggaatcggtggaaggaatcctgatgatgtttgattcccttcggcgccgtgtactgcagttggatgaaaaggaggatgcaagcaggcgggctgacctgaaagctggcaccctcatgatgcagaacaacctcagaatcaacaatcataagatgatagggcatgtgcctggtgttgaagtcggcgatatcttcttctttaggattgaaatgtgcatcattggtttgcatgcaccagccatgggtggcattgattacatctcttctaagaacaaagatgagactctggctgtctgcatcatttcatctggaggctatgagaatgacgatgatgacactgacattttggtctacacaggacagggaggcaatagtcgtcacaaggagaagcatgatcagaagcttgagagaggtaaccttgctctcatgaacagcaagatcaagaagaatcagatcagggttgtgcgcagcgcacaagaccccttttgtaactcaggcaaaatatatatttatgatgggctttatcgtatcgaagacacttggacagacacggcaaagaacggatttaatgttttcaagtacaagctgagaagggacccaggacagcctgatggaatttcactttggaagatgactgagaagtggaaagcaaatcctgccacaagagaaaaggctatattgttggatttatcatcaaaggttgaacacctacctgtgtgccttgttaatgatgttgatgatgaaaaagggccaagtcacttcaattatgttgctggagtgaagtatttgagacctcttaggaagacaaaaccattacaatgttgcaaatgtcctagtgtttgcttgcctggtgaccctaattgttcgtgtgcgcaacagaatggtggtgatcttccttacagcgcaacgggattgctggcaaagcacactccaatggtttatgagtgctcctctaactgtcagtgttctcataattgtcgaaacaggatcacacagaagggtataaaactgaactttgaggtattctggactggagaccgtggctggggcctgcggtcttgggatcctatccgtgctggcacattcatttgtgagtacgccggtgaagtcattgatgaaactaagatggacatagatgttgaggaagacaaatataccttttgcgcttcatgtcccggcgataaggctttaagctggaatttgggagcagaattacttgaagaaaaaagtacggctgtgacaaccaagaactttaagaagctaccaatcatcataagagcaaacaatgaagggaatgtggctcgttttctgaaccatagctgttctcctaatctcctttggcaagctgtacagtatgaccatggcgatgacagctacccccatatcatgttttttgcaatggaacatatccctcccatgactgaactgacttatgattatggtacaagaggtgctccccctggctttgagggaaaacccttcaaagcttgcaaactcaaatcatgcctctgtggctctaagcattgtcgaggatattaa

SEQ ID NO: 12891 - DNA, 1008 bp, Oryza sativa
  Clone ID: TFbOSC900159j.C1.o20.fg
atggtggtggattattggaaagaaggcccagagggctcgatggtctacaagtacaagttgcaaaggatcccaggtcaacccgagttagcattacacataatcaaggcaacgaggaagtccaaagttcgcgaaggtgtttgtgtgcctgatatatctcaaggaagggagaggattcccatacctgcgatcaacacaattgacgatacgcagccaacagcatttaagtacactacggaagtcatatatccacattcctatgcaaaagaacctctgaaaggctgtgattgcacgaatggttgctcagactctaatagatgtgcctgtgcagtgaagaatggaggtgaaatccctttcaattccaatggtgctattgttgaggcaaaacctctcgtatatgagtgtggcccatcatgcaggtgccctccaacatgccacaacagggtgagtcagcatggtatcaaaattccgctggaaatattcaagacggggaacaaaggttggggtgtaagatctctgagctctatctcttcaggcagtttcgtatgtgagtatgcaggtgaggtgctgcaagaaaatggagatgaacatgtagagactgatgagtacctttttgatattggtcatcactatcatgatgaagtttgggaggatcctaaatttgaaggcattttgggtctagaatcttctacgtccaagacaacggaggatactgaaggcagtaaaacaacggaggatactgaaggcagtactatcgatgcatcaaagtgcagcaatgttggaagattcatcaaccacagctgctcgcctaatctgtatgctcaaaatgttctctgggatcatgatgacatgaagaaaccgcacatcatgttctttgccaccgagaacataccgccgctgcaagagcttacttacgattacaattacggtaaagtcgaggataagaatggcaaggagaaggttaaaccttgcttctgtggttcgcctgattgctctcgcaggctgtactga

SEQ ID NO: 12892 - DNA, 3048 bp, Oryza sativa
  Clone ID: TFbOSC400961j.C1.o13.fg
atggagcccgggcaattgcccatggtggccaggcgctgcatccgccaccaacagtcgacgtcgcggctgatgagcgtggcgtggagcgcaatgcggccggctctccggcccatgagcttggtgaggccgacgccgttcactgcgccctcggtctccacgtgcccggtggcgatggcatgctgcgccgcgtccaccgccgtgtggaacccgaacgagccgccgctgctggacctcacggtggattgtcgccgcgccgcgcatcatgtcgtccccaccgccgttggggtgggacggaggaggagcagaggcggcgcagggggacgaggatgcaggaggtgggccagcgagggaggagcctggaagcttgttctgtccccgcagccgatgttttgcgaggaagggagcagtgaatcgggctatgttctatgtgttattgattcgctgaagaagaaaatcacatcggaccgctttgtttacatccagaaaagggtagaggagaatagcattaagcttagcccgattacactgcactctcacaatttgtcaaaaaataggcaaactagtacatccaacagtacagatttagtctcgaatttgctcacaaagaggaaagaagatgccctgtgtgctgtgaatagtcgtgagtcatctcctgatgaaagtgaaggtgccaattgccaagatgagtgttcatcgactgttattgtgggtggaaatctatccgcgaggaattctgtccgtccgattagactaccagaagtggcaacactccctccatatacaacttggatatttttggacaggaaccagcggatgcaagaagaccaatctgtacttggtcgtcgaaggatttactatgatacaaactgtggcgaagctttaatttgcagtgatagtgaagatgaagctgttgaggacgaggaagagaaaaaggagttcaaggattctgaagattgcataattcggatgaccattcaagaatgtggcatgtctgatgctgtgcttgaaactctagctcgagatatcgaaagggctcctgatgatataaaggccaggtatgagatcctacaaggggagaaacctgagggttcttccaagaaagtgtctgaacttaatgtcaaaatggaagacgtgtacggtgataaagatctggatgcagcattggattcctttgacaatctcttttgtcgccgatgtttggtttttgattgcaagctacatgggtgttctcaagatttagtatttccgactgaaaagcaggcaccattgtgcagctcggatgagggtacaccatgtggtattcactgttacaaactggtctctaaaccagatgctatcatggagattgattctcatttgcttgttgatgttgaggagccaacatcggacaatctaaaggatcagatagggtcaaataagaaaaagcttggttctagtgggcagaaaacaaaatctcaacaaagtgaaagttcttcaactgcaagggtttcctcagaaagcagtgagtctgaagtacaactgttaagcaataaatccccgcaacactctcctggcctctcaaaaaataagcttggcgcaaaaggtggaatcaagaaaagtactaacagaagaattgctgagagaattctaatgagtgtgaaaaaggggcaacaggaaatgtcaccggactctaattctattgttaatggatgccattggcctagggatatgaagcttagatctgatactaggagtggaattaaggattctgttgtatcctcacagtgtaattctccaagcacaaggagttttagaaagaagggcacacttcaaatggagaataactcatcttttgtggatgctcagagtgattcaatggaggatacaaataatgaacattcagcaacagatggttgtgatagttcaaggaaagaggaatgtgttgatgagagtatatgcaggcaagaagctcatggcaggtcctggaaagtgattgagcaagggcttctattgaaaggattagagatttttggaaagaacagttgtttaattgctcggaaccttctgggtgggatgaaaacatgcacagatgtttttcagtatatgaattacattgaaaacagcagtgcatctggagctcttagtggtgttgattctcttgttaaaggatatatgaagggtaatgaattacggacaagatcaagatttgtgagaaggcgaggaagggtccgccgtttgaagtacacctggaaaactgcaggctaccattttataaggaaaaggattacagaaaggaaggatcagccttgtcgacaatacactccttgtggttgccagtctgcatgtgggaagcaatgtccatgtctcacaaatggtacctgctgtgagaaatactgtgggtgcccgaaaatgtgcaagaatcgcttccgaggttgccattgcgcaaagagtcagtgtcgcagccggcagtgtccatgctttgctgctgacagggaatgtgatcctgatgtgtgtagaaactgctgggtagggtgcggtgatggtacattgggagtccctaaccaaagaggtgataattatgaatgccggaacatgaaactgctgcttaaacagcaacaaagggtcttacttgggagatctgatgtttctggctggggagctttcctcaagaatagtgttgggaagcacgagtatcttggcgagtacactggggagcttatctcccataaagaagctgacaagcgtggaaagatatatgaccgtgagaattcatcgttccttttcaacttgaacaatgagtacgttcttgatgcctacagaatgggcgacaagctgaagttcgccaaccattcccctgatccaaactgctacgccaaggtcatcatggtagcaggcgatcacagggtggggatcttcgccaaagagcggatcagcgcgggcgaggagctgttctacgactaccgctacgagcccgaccgggccccggcgtgggctcgcaagcccgaggggcccggtgccaaggacgacgcccagccttccaccgggagagcaaagaagctcgcccactga

SEQ ID NO: 12893 - DNA, 3582 bp, Oryza sativa
  Clone ID: TFbOSC417639j.C1.o16.fg
atgccgcactcgcgctccgattcggggtcgggttcccgcggcgctgacccttgccgtgggaggaagcgcgggaggctgttgatgctcgaggaggaggaggaggaggaggagtcggggatggaggggtgctcggcgccagcatgcggcgatgtgcggggggatttcgttggatggtgttcggaccggcatcaggtggcttcctgcagcggcgaccagacgcaaagcgccagcatgtttgccgcgatgcaggagaacgcctgctccatcgatagcaaaggtgtggtgtgtccgcagtccgggctagggtattcagctggccagaacgggacgcacggtggtggcgggtctatgctgcatcagaatttggaaggctgcatgtatatgaatcagcttgggcagatgtgcggcccttatccacctgaacaactgtacgatggattatccactggtttcttgcatcgagaccttgctatttatgccgtttttggtgggaaaatggccaaccctgtttccttaggttccctgaaacagtttctttcacaatggagttctgattctgtggtcgccacaagagacgaatcggtggagaataagaaaatggcccctgttaacaaattgattcttcctgataatctttcaagtgaagaatcatgttggatgtttgaggacgcagaaggccgcaggcatgggccacattctcttgctgaactttcttattggcatcacagtagctatctacatgacctttcaatgatttaccatgttgatagcaagtttggcccatttacacttgtatcactaattgattggtggagtggaggcacagagcattcagaatcttcagccaatgattctgggtcactgaacgctttaatggatgatgtagttgaagatatcagccatcagctgcatgctggaattatgaaatcagcccgcaaagtttttattgatgaaatatttagcagcgtacttccagaaatgattgcttgcaggaagacagagaagcaaatggctgcaaaacgtaagagccaagctgctaagactgacaatgtgagtaacaagaatgctttggtacttaagggcaagggtgatggaacatctactcgtccaaaaagcctaaactcgtataataataaagtaccggaagatccttctgtggctgttcaatcaactgcaatgcagtatgaatttgctgatatattatcggcagtttgggaaacaatttataacaaatccatgaagagtatctgggatgaagtactgtatgatcctgtcatggactactgtgatgcatggcttaaaagaaaaaatgagtcgaatcttctctctacagttgttcctggagcctctgataaccaaaagatgcaagacacagatgaaatgtcaccaaaggcaatttgtgattcagatgctcctgaaagtgacatggatttccctccaggatttggaccaaatcaggaatctgctgagcattcccactctgcgtgtgttgagtatgttactgaaaaaacagatgggaggtctggatcaagtatcacgttgttttctggccccttaggacgagttcaggaacgaattcgtacgcctgttcacgcaccagaaccatccagtcctcctggaatatctgtgcatgaaacgcccagtcctgctgaaatgcctcgagatgaaatttcggatatggctgaaatggctcgagatgaaatttcagatatggctgtagatacaataccctgccctgctgatatggcggcatctggaacatcaactgttcctgaagtgacaacagacaaactgatcattccttacgtggaacatcaatcgccctctgcatctcatgcaagtatatttgaaaagttggatgcacatgaagaagctgaattggatgacagttttgatgaggtgcctcctggaacagaggctggcttagcttcattggtgattatggagaaaaacaaataccagccctcaaaatcagtagactcagtgcttgacatttatagatatactagttgggcattcttcaggcaaatactgcatgagagtgtaatgaaagagtgggcatctctcttctcaggtgctctcagcaattgttttgactcatggtatgccaggaaaaatattgtggctaaaaccatggatgatacattgagacccaaagaatatacttactacaggaagaggaaactgaggaaaaactgtgaagcatcatcatcagaaaaaccaatggatgagcagctctccagacctcttcgtgatcttgttgaatgcaaggttaatatgaaaaatatccatcgatcaagcaaggctgggatttcgcagagagtttctgttgtggagaagccctccaaaaagcgtgccaaaccttcacataatgataatattaatctgaatatccagcaggacttgaaactcctttccgacaaggtgccaaagagaaacaggtcttcccatcctaccagtaagcctcttgttagtagcaaagtgcctactgaggatagaactacatcagcaatgcctgcaaagaaaagaaagcagaaaaacttggccactgagtccaacctgaagacaaaagcagtaattttatctccagaatcacatggttgtgaagcgcctactgagaaaagaactacagctataatgcctgtaaacaaaagaaagaaaaacttgtctggtgaatccaaactgaaggcaaaaccgttaacaagtccagaatcgtatgtttgtgaagctcctattgacaatagaactacatctacaatgcctgcgaagaaaagaaagcagaaaaacttgtccaatgagtccaacctgaagaaaaaaccgttggttttatgtcctgaatcatatggttgtgcaagagcttctgtgagtggatgggaatggcgtgattgggcacgcaatgccactccatcagaaagagctcaagtgagaggctaccgagtgaggagtattctctcagctccagaaaataatgtattgaaaagttcacaagttaagggctcatctgcaagaacaaaccgggttaagctacggaatctgttagcagccgctgaaggcactgacctactaaaaattatgcaatcgaagtcaaggaagaagcggctacgttttcaaaggagtaagatccatgaatggggtctggtggctcttgagtctattgatgcagaagattttgtaattgaatatgttggtgagctgatccgccgacaggtctcggacatacgcgaggatcaatacgagaaaagtggaattggaagcagttaccttttccgtttggacgatgactatgtggttgatgctactaagcgtggtgggttagcaagattcatcaaccattcttgtgatgtgccgcggatcaatgaattaggaagtaaagtttataagtcaggaggtaactgcaattgggtgctaccccagtatgtatgtgtcatgcgtgcttgtcgattgtactgggcagaagttcactgcagaaatgttcttggatttactgacaggatggttagatggactaattcgggctatccagaggaaggccaacaacattattacattgactggattgaggatatagagtttacacggtga

SEQ ID NO: 12894 - DNA, 1011 bp, Oryza sativa
  Clone ID: TFbOSC401117j.C1.o6.fg
atggctgatatttgcttagacaaagcttcaaggacaagaacaaattactatgaatcacgttcaaaggatgctgatgagattgatactggtgctgttaaagtttccgaagatttcattgtctctgatattgccattcatccaagacatgcgaagcaaatgagaccacatcagttggaaggattcagcttcctggtcaagaatctagtcggagacaaacctggaggttgcattctagctcatgctcctggttcagggaagacatttatgctcataagtttcattcaaagcttcttagcaaatgttttcaatgcactctacagcgaaccggtgatacaaggtagagttctcaataggaagggctggatctatgttggcgagcagggtgatgtcagaaaaaattacatatggtgtaaattaggtacttggaagagggagtttcagtggtggcaagtggaggacataccactatatgatttctattctgttaaggctgacaaaagagtagagcaactggaagtcctcaaatattgggaagcccagatgagcatactatttcttggatacaagcagttctcacgaatcatctgtggtgatggagatggaaacattgcagctgcgtgctgggacaggctgcttatggtacccaacctacttatactagacgagggtcatacaccaagaaatcgggagacagatgtactggcatcactaaaaagacaccacgcaaagtggtcctgtctgacgtataatgagtcaggtagcaatatcaggtatcagagtttaaaaggggttcatgacagtgcattcactgagtcagtggaagacaccctgctgaatgatgacaacttcactagaaaagcccatgttattagaagtcttagagaattaacaaaagatgtgcttcactattacaagggcgatatcttagatgaactatctggcctagtggattttagtgtgttcttgaaactcagtaacaagctgaaagaaattgttcactgttggaattaa

SEQ ID NO: 12895 - DNA, 2760 bp, Oryza sativa
  Clone ID: TFbOSC18752j.C1.o1.fg
atggcgtggacgtggcggccggaggacctgttcctagagacgctgaaggacagcctggcgcggcagcgagcttggcggcatcggggaattgcctggagatggcctggcatgcgcggccaaagtgggcgtggtgtagcgacggggcgaggaggcacgacatggcggttagatgatgatattgctagagattatgcggttggcgacgtgggcttggagggtgtggaggacatgcagctcgtcgtcctgcgcgtggccaaaggaggcgacggcggtggcgctgcagcggaagctgaggaggccgaggaagcccatccagccgactacaccgccggtacacaacactgcttgggtgcttttgaagtggtggcggtgactccagctctgacagacacgcggaatgtggatgcagtactcgcccgtctcccctccatcactgagggacattcccatctacaaaagcgtgctagggagcggtatgctgctcttagtgctggcgacaaggaagctaggcttcaaaagatgcgagagtactaccagcgaaaaaagagtattgatcctgtacctacccatgttattttgccagatgaaaagcagcttaaggttttgaatccatgcaagtttgttttaaatgttctgacgaagcgtgcgcgtggaaaacgatgggttttctccctcaatgtcaccggaacgaacacagataatgagaagtcgtatgagttggacacaacatattactgtaagggtatctacaatccgcggtggcggacgacaagcggcgcggggacgggcgcggtggcggagggcagcagcgcgcggggtcgccgagccgtctccgtcacagggtcatcgccggtcgtcgtcgccaactctgtctcctcccagcgaaacccgaaagcaagatttaggacctgcactggagttaagcagacctcccaggccagtgtgtgtttttttatcaacacatgggcctctcagcgaagaggccaagggtggaaggagaaaaatcaggtgcgggagccgtgtcctcaagccacgacgtcgcccaacgtgtcccctagctccgtggctcgacgaaaagcgactgaggagcggaggaagacgcgcccctctgctagggacggcaaactgatggactggcgacggctgtaccagctggaggcgctggagcgggcggtgcgggggaacaccctggcgttcctggagaccgggagcgggaagacgctcatcgcggtgatgctgctccgggcgtacgcgcaccgcgtgcggaggccggactcgcgccgcttcgccgtcttcctcgtccccaccgtcgtcctcgtgggccagcaggcgcgcgtcgtcgagcagcacaccgacctcgtcgtcaagcagttctgcggcgagatgggggtcgacttctgggacgccgccacctggcgatcccaactggaggacggcgaggtgctcgtcatgacgccgcagatcctgctcgacaacctccgccacagcttcttccgcctccaggacatcgcgctgctcatcttcgacgagtgtcaccacgccaggggcaatacgccgtacgcctgcattttcaaggaattttatcacccccagttgaattctagtgcgtcagaccctctgccaaggatatttgggatgtctgcttcgctcatttattcaaaagatttgaatccgcacaattattcaaagcaaatttctgagattgagaatctcatgaattccaaggtgtacactgttgatagtgaatcagctttgtcggagtacataccatttgcttctacaaaaatagtggactttgacgattccaacatttcatctgagctgcatgccaatattctcagttgtttgaatagattgaataaaaaggctgctgaggtacaatcatacgaggaaaacagcctatccttctggggtgaaacattggataaaaatgttgagggcttcattagaaactacagcgaagaagtacatagagaactttcatgtttcttgaagaatggtcatattggtgaaaaatttccagctgattctcaagatgggatattgacacccaaagttcattgccttattcgaactcttctgcagtacaggcatatgcaagacttaagatgcattgtgtttgttgagagagttatcacaagcatagtattagagcacctactttcatctattcatcaaatgtctgggtggaatgttaagcacatggcaggaagccgtcctggtttgctatctcagagcaggaaaaatcatacagaaattgttgaatcttttcgaaaaggaaaggtacatataattattgccacacaaattttggaggagggtttagatgtgccaagttgtaacttggtaattcgctttgatccatcagcaacaaaccagaggggggatgtggaagctcaaactaatgcagagaagtttctcgcaagtgggcaaataatgcgggaggaatctctgagattgggatcaatttcttgtcaaccacttgagaacaccttatattttaatcctctaccaagattcgatatagacaaggcatctggcacatgcactctgcatcttcctaagagcagtcctgtgcagacagttaatgtagaaggagaaggttctattctcaaggagacagtttgtcttaaggcctgccaagaactacatgccattggtgcactcacagattctcttttaccagaattagatgttccatgtgatgaagaacctgacatcggaaaacttgatgcatggtgggtaaggttatatctgaag

SEQ ID NO: 12896 - DNA, 2367 bp, Oryza sativa
  Clone ID: TFbOSC900120j.C1.o3.fg
atgggtggccccctcaccgccgccggaggtcgaggagatgggggcgccaaggcggtggaaccgctccggcctccgccgccgcccgacccgaagacaatggccagatggtaccagctggaggcgctggagcgggcggtgcgggggaacaccctggcgttcctggagaccgggagcgggaagacgctcatcgcggtgatgctgctccgggcgtacgcgcaccgcgtgcggaggccggactcgcgccgcttcgccgtcttcctcgtccccaccgtcgtcctcgtgggccagcaggcgcgcgtcgtcgagcagcacaccgacctcgtcgtcaagcagttctgcggcgagatgggggtcgacttctgggacgccgccacctggcgatcccaactggaggacggcgaggtgctcgtcatgacgccgcagatcctgctcgacaacctccgccacagcttcttccgcctccaggacatcgcgctgctcatcttcgacgagtgtcaccacgccaggggcaatacgccgtacgcctgcattttcaaggaattttatcacccccagttgaattctagtgcgtcagaccctctgccaaggatatttgggatgtctgcttcgctcatttattcaaaagatttgaatccgcacaattattcaaagcaaatttctgagattgagaatctcatgaattccaaggtgtacactgttgatagtgaatcagctttgtcggagtacataccatttgcttctacaaaaatagtggactttgacgattccaacatttcatctgagctgcatgccaatattctcagttgtttgaatagattgaataaaaaggctgctgaggtacaatcatacgaggaaaacagcctatccttctggggtgaaacattggataaaaatgttgagggcttcattagaaactacagcgaagaagtacatagagaactttcatgtttcttgaagaatggtcatattggtgaaaaatttccagctgattctcaagatgggatattgacacccaaagttcattgccttattcgaactcttctgcagtacaggcatatgcaagacttaagatgcattgtgtttgttgagagagttatcacaagcatagtattagagcacctactttcatctattcatcaaatgtctgggtggaatgttaagcacatggcaggaagccgtcctggtttgctatctcagagcaggaaaaatcatacagaaattgttgaatcttttcgaaaaggaaaggtacatataattattgccacacaaattttggaggagggtttagatgtgccaagttgtaacttggtaattcgctttgatccatcagcaacaaaccagaggggggatgtggaagctcaaactaatgcagagaagtttctcgcaagtgggcaaataatgcgggaggaatctctgagattgggatcaatttcttgtcaaccacttgagaacaccttatattttaatcctctaccaagattcgatatagacaaggcatctggcacatgcactctgcatcttcctaagagcagtcctgtgcagacagttaatgtagaaggagaaggttctattctcaaggagacagtttgtcttaaggcctgccaagaactacatgccattggtgcactcacagattctcttttaccagaattagatgttccatgtgatgaagaacctgacatcggtgggcaagacaatgctagtgttaccatgaaatatgttggcatcatccatctcaatcaagaacaggtaattattgctagaagatttcagacaactattctttcgtttcttattggtgatgaccatttggaggttagcaatggtattaaatacttccatgagatgcaagtgcctattggagtagtctatctacttctgcctttagtttctggcagaattgattggtgcagtatgaagttctcatcctcaccaatatatgaagctaacaacaaacatatgacacattgccattcttgtaaagatattgatttactgcagacaaaagatggtcctttctgcaggcatggtcttactttgacttttgaaaatcagccgctcttggctggcagtaaacatgtgaaagtgcggaacttcctccacaactgctactctaaaaaagaaaaagaacctggtgatagatatagtgttgagttgccacctgaactctgcagaattatcatgtcaccagtgtccgccaataatttgcacatcttctcatatgttccttccataatgttccgcatccagtgcatgcttctttctgtgaaattaaaggtccaattaggcccaacagtgcagcagtttgacgtaccggttttgaaggttgattttctcatcaatagtttcctatttatgaattattga

SEQ ID NO: 12897 - DNA, 3015 bp, Oryza sativa
  Clone ID: TFbOSC401693j.C1.o16.fg
atggccgctgccggcagggacccgccggcgacgccatcctccagaatgtattactgcaggcaaaggaaggcttcttctgaggtcaatgccaatgtgtttgtgcctgggggtcagaatggtatttcatttcctgcatcaaatagggctcatgattggggatatggcggtgttcgcgaagaatgggaagctagttatgctcgcaaactccagttgatcaattttctttcttcactgcatcaacgcactgcaaattctttgataaccactagaatggatgctaacatggacactcctttggagcaaaaacaaaaggacagctcagcaataatagttcttgattccgatgatgaggacgaagcagaaagatgtgaacagctcgcatctgagaacaataaacaacaggcaccatctggacccactagtccttgcacaacatggattgtatccagtgcgaaagaccaagtaaatggaaccttgcatgttgatggagtccaaagcactcaaattgttccatatggtcaaaatgcacctttaataaatcagtcccctttgcaaaccagctggcaaccatctatccaatatgaaagggttatattgcagagaagacctgaggagcaacgcgttcaagatcttgtggcagcaagccatgcagagaagatagcagaaacacaagttttccttactctgcctactcttcctaatgagagaaaacgaaggaaatcagaaccgaccaccctggtagatggagatggtggaactaacctagggaaaggaaaaaggaaaaatcatcaaaatcaagcagcagttgattcaatcttggatttgcaacaaactgttgttcctttgcaacaaaatgatgttccttcacaaagctacaggactatgatagaagaggagaaacctgtaaaagaaagtgatggtctcgaggatctttggaaagatttttcattggctgctgaatgtacaaagcttgatacaaatgaagacatgtccaatgaaaaagatgtggatgatgaaaacgagatggatgacgattgcaatcatgacattcggattcatgaagatctaggccatgtatgccgtatttgtggcatgattgttagaaaggctgaaacaataattgattatcagtggaaaaagaaaaacctgctatgggggatcttctctttactgaaatacttcctaaaatgggagagtgttttcattaccaactatattgatattgataccgctttggagtatatagcttcaaggacaagaacaaattactatgaatcacgttcaaaggatgctgatgatattgatactggtgctgttaaagtttctgaagatttcattgtctctgatattgccattcatccaagacatgcgaagcaaatgagaccacatcagttggaaggattcagcttcctggtcaagaatctagttggagacaaacctggaggttgtattctagctcatgctcctggttcagggaagacatttatgctcataagtttcattcaaagcttcttagcaaagtatccttctgcaaggcccctcgtagtgcttccgaaagggattttaggtacttggaagagggagtttcagcggtggcaagtggaggacataccactatatgatttctattctgttaaggctgataaaagaacagagcaactggaagtcctcaaatcttgggaagcccggatgagcatactatttcttggatacaagcagttctcacgaatcatctgtggtgatggagatggaaacattgcagctgcgtgccgggacaggctgcttatggtccccaacctacttatactagacgagggtcatacaccaagaaatcgggaaacagatgtactggcatcactaaaaagagtccaaacaccacgcaaagtggtcctgtctggtacacttttccagaatcatgtttcggaagtgtttaacatcttggacctcgtgcgccctaagtttctcaagatggaatcatcccgtcctatcgctagacgtataatgagtcaggtagcaatatcaggtatcaggagtttaaaaggggttcatgacagtgcattcactgagtcagtagaagacaccctgctgaatgatgacaacttcactagaaagtctcatgttattagaagtcttagagaattaacaaaagatgtgcttcactattacaagggtgatatcttagatgaactacctggcctagtggattttagtgtgttcttgaaactcagtaccaagcagaaagaaattgttcacaagatagaagcctatgaaaagttcaaaagaagtgcggtggggactgcattgtacattcatccctgcctgtcagaaatttcagagggtgatgctgcagatagggcgaccaacttgacagatgccactgttgacagcttgattgagtctatcatcattaaagatggggtgaaagccaagtttttctttaacattctgtctcttgctaactctgcaggagagaagttgcttgccttcagtcaatatatacttcccatgaaatttttggaaaggttgttggttaagaggctgggctggcatgtagggaaggagattttcatgatatctggtgatactagtgcagacgacagagaagtggcgatggatcagtttaacaactctgccgatgcaaaagttttgtttggttccatcaaggcctgtggagagggaatctcccttgttggtgcatcgagagtcatcattctagatgttcatttgaacccatctgtcacccgtcaagcaattggacgtgcattcaggcccggacagcagaagaaagtgtttgtgtacaggcttgttgctgctgattctccagaggtgaagttccatgaaactgcgttcaagaaagaagttataccaaagctatggtttgaatggagtgagctctgcactactgaagacttcaaactgaatcaagttgatattgatgactctgaagatgaactattggaggctaatgctattcgccaggatatcaaggctttgtatagaagggtgtggcagtag

SEQ ID NO: 12898 - DNA, 4374 bp, Oryza sativa
  Clone ID: TFbOSC23980j.C1.o3.fg
atggacccgcggcgccctccgtcgcgcgggggcgccgccgccaacggcggcgggctctcctactccaccctcttcaacctcgagcctttgctgaactttaaggtccccttgccggaagatcttgatcgctataggcgtagtagcccaaatgggagtatgagtagccaaggtcaagggtccttgtcagaccagtataatggaattaatgatgcttcccatgggctacatcggaagcgcaaaaggaatctggatggtgctagcgatgatgatgaggtagatgcctacagtaaccaaataactgaggagcactaccgtacaatgctgagtgaacacgttcagaagtacagaaggtcaaagtttaaggaggatgtttttagttctgatcctcctcaggtgatagttcctcagaaacacaaaaatggtagtgcaagagttacaaagtacagaagtgatacaaggaatgttgcaatgttgggtggggtagaagccacagctgagtataatgggacaaaatctactaatgcatatggtggtttcaataaggttgtagcttcactggattcttcctatttagatatgggagataatgtaagctacaaaatcccagaagggtatgataagttggcactatcccttaatctacctgttttttctgacatacgtgtcgaggaaactttcttgaatggcacactagatttacgcactctagcggcaatgctcagtacggaccaaaaatttgagacaaccaatcgtggtggattagctgaacctcagccacaatatgaatcactccaggaaagggtaaaggtgcagaaattttctcttcaagtaactgaggatcccttcgcaattccagaaggagcagctgggaggatacggagatttattatttcggaatccggcagtttgcatgttcattacgttaaagtcttggaaaaaggagatacatatgagattatcgagcgtagtttgccaaagaagcaaataataagaaaggatccttctgaaattgcaagagaagagtcagaaaagactattaaactttggcatgctattgctgttaaaggcattcctaggcaccacaggaatttcatggctttgctgaagaaacggcaagtagatgctaagcgtttttctgagaattgccaacgggaggtaaagttcaaagtaagcaggtcactgaaattgatgaggagtgccgccatacgtacacggaggctggctagggatatgttgatattttggaagcgagttgacaaggagcagtatgaattgaggaaaagagaagaaaaggaggcggctgaagctttgaagcgtgaagaggagctacgtgaagcaaaaagacagcaacagaggctcaactttctcctatcccaaactgagctttatagtcactttatgcagaataaggctggtgaatcagcaccatcagatgaggcatctgtccctgaagaggatgaggaagatcctgaggaagctgaattaaagagagaggccttgagagctgcgcaacatgctgtctcccaacagaaaaggatgacaaatgcgtttgatagtgaaactgggaggcttcgtcaatcatctgactctggtattccaactgatgatttagctagtatggagcctaacaagattgatctattacacccctcaacaatgcctgagaagtcgtctgtgcagacaccagaattgtttaaaggtgcactaaaagaatatcagttaaaaggtttacagtggttggttaattgctacgagcagggattaaatggtattcttgctgatgagatgggtcttggcaaaaccgtccaggctatggcattcttagcacatttggctgaggacaaaaacatatggggtccctttcttgttgtggctcccgcatctgttgtgaataattgggctgaagagatacttgtgaatgaagagaagcttttgagacgtgttaagtggcaatacatggttttggatgaggcccaggctattaaaagttcaagcagccagcgatggaagacattactgagttttaactgtcgaaatcgcttgcttctcactggaacacctatacagaacaacatggctgagttatgggcgcttcttcatttcatcatgcctactttgtttgacagccatgaacagtttaatgagtggttctcaaaaggaattgagggtcatgccgaacatggaggtgctctgaatgaacatcagcttagtcgactgcatgctattttaaagcccttcatgctccgtcgagttaagattgatgtcattgcagaaatgaccaaaaagaaagaagaaattgtgccctgcagattgagttctcgccagcaagtcttctatcaagccataaagaataaaatatctcttaacgagttgcttgatggaagtcgtggcaatctaaatgataagaaattacttagcctgatgaatattgtgatgcagctccggaaggtctgcaatcatccagagctgtttgagcgcaatgaggggagctcttacttttactttgctgacatcccgaactcacttctttctcctgcatttggggaattgcaagatgtgcattatgcagggaagaggaatccaataatgtttgagattccaaagttagtctacaaaggaatcgtctcgaacatggaaatgcctgtgcgtggttgtggatttctatatggatctttcaacaggatgtttaatatattttcgccaagctacatccatcaatcagcttttccagaagctatctcaccaaataatactgttctgttatctggtgcattcggttttacacgtttaataaatctctccccagttgaagcttctttcctggccacttgctcattattcaacagactagcattctcagcagtgcgatggaacaagaagtacaccgatgaacttgtggatgtattccttgactcagaaagtactgatcttgagtccactcataatgatttaacaacagttcgtgctgttgttcgcttgttgctttcacctacaaaagcagagtccagtttcctaagaacaaagattgagacaggcccgagtgatagcccatatgaagcactagtgctttctcaccatgaaaggcttgtgtctaacataagacttcttcgttcaacatatgcttttattccacctgctagagcaccaccgataaatgtctggtgcgcagaccgaaattttgcctacaagttaactgatgagatgcatgatccattggccaagaaactggttctgggatttgctcgaacttctgagttcaatggccctagagaaccaaccagccctcattctctgatagaagaattacatactgatttgccattccccgagccgatgctacaactgccatataggatatttgggtcatctccacctatgagtaactttgacccagctaaaatgcttacagattctgggaagctccaaaccttagatatactgctgcggcgcctccgagctgagaatcaccgtgtgctcttatttgctcagatgactaaaatgttagacattcttgaggactacatgaacttcagaaaattcaagtatttcagacttgatgggtcatcggcaatatctgatcgacgtgacatggtccgggacttccagaaccggaacgatatatttgttttcttgctaagcacaagagctgggggcctaggtattaatttgactgctgctgatacagttattttttatgaaattgattggaacccaacacaagaccagcaagcaatggatagaacacacagacttggtcagacaaaggaggtaacggtgtatagacttatatgcaaagatacaatagaagagaagatattgcagagggcaaagcagaaaaatgcagtgcaagagttggtcatgaaaggaaaacatgtccaggatgatcatctgatgagacaagaggatgttgtttcattacttattgatgacacacagatatcgcacaaattaaaagaaatatcaatgcaggcaaaggaccgactaaaaaagaggcgtacaaagggcatcaaggttgacaaagaaggagatttgatgcttgaagacttggatgatcaaacttcaggggctgcagaacatgataacacatcaagcaaaaagaagaaaagctcccaaaagaagcttccaaagttgcaggataatggtagtgtggacaagaatgcagaggctgaaggcggtgaagtggaggatgaagatagtattgcagctcctaggcctaaaagatcgaagagactgatgaagaacttgaacgaggacaaggaaccagaacaggaaccaacgactgatggtgacaatccggcagaagcagctgagaataacatatctcctgacgataatgatacagaagaggcaaaagatcggactccttcagcctaa

SEQ ID NO: 12899 - DNA, 679 bp, Oryza sativa
  Clone ID: TFbOSC420110j.C1.o1.np
tttctccgtatttaagctcatggactatgagcccgtgttaaaatgcctgaagaagttgcctggagttgctgtgcaagatataccttacaaaacaaggaatgttatcaagaatctccctaagttctttgccgaaagctgcgcttctgataaagaagttgacgggcttctcatgaagttgccacaacacttacgagatgcactcctaccctttcaacttgaaggtgtgaagtttgggcttcgaaggcatgggcgctgccttattgcagatgagatggggcttggtaagactctccaggcaattgcaatagcttgttgctacaaggatgagggcccagtgttaatagtgtgtccagctgttttgcgttatacatgggcagaggaattggaacgatgggatccttcatttctgccaaaagatattcatcttgtgtttggtcaccaagacagtcttgaacgtttaggagcttgcccaaaggcagtggtcatttcatatcagatgctaagccgtcttcgcaaaagcatgatgaataggagatgggcactgatgattatcgatgaatcacacaacatacgctgcacaaagaaaaaacacgaaaaaaatgagacacaggctgtactggaactagcgccaaatgtcagtcgcattgtgctgctctctgggacaccctctttgtcaagg

SEQ ID NO: 12900 - DNA, 5613 bp, Oryza sativa
  Clone ID: TFbOSC400505j.C1.o62.fg
atggacccccccgcccgcagccgcaggtgcactctcctcacgcgggccctcctcctcgccgtcgccgccctcgccctccgcctcatctacgccgccttcctcgccggcatggcgctctacccgcccctccccgccgccgccgtccttggctccaagacctacctccactccgccgtcgccacccccgacgcctggcgcacccgcgactggcggaaggccgtcgactaccacgccaccctcctcgccccccacctcgccgacggcatcctctccccgacctcccgcgccgtctgcctcggcgccgtgcaggaggccctcgccatgcgcgagctcggcgtctccaccgccgtcgccgtcgccaggaagcgctcccccccgctcgccgtcgccgggaacgaccgccgcctccccttccaggactcctccgtcgacttcgtcttcgccgcccgcgccctcgactcctccaagcgcccggctgacctcgccgccgagtccgcgcggatcttgaagccagatggacatctcgtcgtcctcactaccagcgccgccgacgcattcagcctccgcgcgctccaggcactcctcccctctctccgcttgctccgatctcgccagatcaaaggccccgacgactccaccctgcgggagctcgtcttccagaagatccaggactccactgacgatcctgtaaacaagtgcacaattggggatcacaagctccaactcctcacacatgcggagccactcatccaagaggagccgcgcaagccatggatcacgctaaagcggaacatcaagaacataaagtatctcccaactctcgcagacatcagcttcaagcgcaactatgtgtatgttgatgttggcgcccgtagctatggctccagtatcggcagctggttccggaagcactaccccaagcagaaccatacattccaggtgtttgccattgaggccgacccggccttccactctgagtacgccgcaaagaaggctgtcacgttgcttccatatgctgcttgggtcaagaatgagaccctcaattttgagatcaatgctgatcccgggaaggaggatgaggccaaggctaatggccgcggcatgggccgcatccgccccatggctggcaagaagatgtccggtgaggtgcggagtgtcccggcattcgactttgccgagtggctcaagcgcacggtgtcggagcaggactatgtggtgatgaagatggatgtggaggggacagaattcgacttgatcccaaggctgtttgatacaggcgcaatctgcttgatcgatgagctgttcctcgagtgccattacaaccgatggcagaaatgctgccctgatagagctgaagcatttgagatggcaaaaggggtctcatgcttctactggagtattcagtttccaaatttcaaagaccacctctgtttcagaaactgcagcaatgctagtagtacaaggcacttcagttacaggtctcttttgatccgaacagaaaagccagttactactagaaaccatgcatatgcagaagtagttgtatttgtcttggatcagaatcctatgtttttcctattcctccgttttttctaccctgcgattcaaaggggccctaactgctggtcatctgctaactccacagtgatgaggcaagcatttgaggtgttttatgatggatcatggcatggggtaaattgtataaggataaggaacggcaacctgtttgttaaatttatctactctggatcaacagtcgagcataatgttgatggggattgtctacgcttacggtcgagaagggcgacttgttctgattgttcaaatgttctcaagccaggtgttgatgtctgtgtgcagtcatctcatacacccgaagcaagttcacaaggaggaacaaacgcttctgtgttactgcgtcatgatgcaaggcttatcacaatcaagaagaatcatcaagaagataagtgtctctgcttgtttgttgttatactctacaagaaccagtgtcctggcaatgcagaaaaagtgataactgatagaagagcagaggtagtaaccataaacgatattttcctcctgcaaaagcttcaacctgaggtccatgaaggaagcatgaaatggagtttttcaaaggatcgcctctctcttaataaaggcaggctaataagtgctagattctcctcagaaattacacatctgatagtcttgtcgatcttgaggggaatggaattcaacatcaaattggtagaaggccagatcgtttatcaaataatcaaaggagatcaagcacaatggaatcttgattccatggccatccctccaggcttcgggaatacaatggagataatatcattccaattgcgtgatgaggccttgcgcccaacaatcacaaatatccctatcactcatgtgaaaaagaacaatatcacagaagacatgagattcactgtgaagagtgaaatggatagtgaactggatagggcattagatgttgagatcttgtatgagcatgtggatctgaggcgttcaaagcgcttgaagactcagccagatcgctttacaagttacgatacacctaggttccttagtggctacaagaagaaagaagcaagttcatcacccaccaagcatgtaaggggagctgtgcattgtgattcaccggtagacgattccaaaaaagaagtagaatcatgctgtgtagagattccagggaatgttacacagaagcaaacaggtgtacactctcccatggtcgatgaaaagtcaaactctccagaaggacagcataagaacacaactaagagaactacatgctctcttgtgaaggaaaaagcaagctctccagaaggacagcatgagaaaacaacaaagagaactacatgcgctttgcctgtgaaggaaaaagcaagctctccagaaggacagcataagaacacaataaagagaactacgtgctctttgcctgtgaaggaagagccaagctcagtggaaatagaggagaaaagctcaaaagagcaaagtgcaccggagtttcacattccacggacacctgcacagaataaagagaagcataatcgtcctcctttctcatgtaagccgaagctatttacttcatcaggcacccttggtgttaactgtgaaccagcattctgccaaaaggtgggcgggaaaagaaagaggcacatgtgcgagagagaatacaaacaaatgattgaccaatgcataggaaacattgagagtgaaatggagagggactctatgtttaacttcgatgccaatatgatgaattacgttcagcattcttatcgagaagaggattttacatggccaccttctgctgataaccaagaggtggaggaggatgagcttgaagaactgtggaaagaaatggattattcactgacgacattagcacttcttgagcaaaagcaggtgatggctcaaagtaggataaacatgctggtggataattttgatgggttgaggctggattgtttaactttgacggatgattacagatgctattatcaaaaaaaagaaaagtttgcagagtcaggatcagttaatgagagcaccgattattttggaaaagttggaggaataccatgccatcatgaatgcatactggatgaggagcttggactagcatgcagattatgcaatgttgtatgcactgaggcaaaggatatatttccagaaatgttcaatggaaatgactacaaggacagacctggatgcagcaatatttgccttgatgatgatatacttgatccttctcttcttgcaaacttggcaccagagttgtcagaattgaagaactcagggagcgtgtggagtgcaatatctgatcttgatccaaagctgcttcctcaccagagaaaagcactagattttctgtggaaaaatttggcggggtcgatacaggttgaaggaatggataactcaaatgtcagtacaggtggctgtgtgatagcacacactcctggatctgggaaaacactgctgcttatctcatttctggtgagttacatgaaagctcacccaagaagccggccattggtccttactccaaaagctgcaattcatacatggaagagagaatttgagaaatggggcatttcacttcctttacatgtgttccaccatgctaacagaagtggcaagccgttgggggcaatggattctaaactgcggtcgttattaaataattttcacagaccaacctggacaaatatgcgccttatggattctttggacaaactattcaagtggcatgcacatccaagcgtcctcctcatgacatactcatctttcttagggatgacgaaacaagactcaaaagtgcgaaaccgataccgagaatttatcgcagaggtcctgatgaacaaccctggactcttgattcttgacgaggggcacaacccaagaagcaacaagtccaagttgaggaagctgctgatgaaggtgaagactgagttcagaatcctcttatctggcacggccttccagaacaactttgaagagtacttcaacaccctatgtttggccagacctcggtttatcggtgatatcatgagtgaactagtgccagagaggaaaagagaaacagttggcaggagagccaaacatcaagaagcagtggcacgccgcgcctttgtggagaaagtgggccagaagattgagtctgacaacaaacatatcagaagtgatggtatcagtttgctaaacaagcttactcgtggattcatagattcattcgagggagcgaagctgatcaaccttccagggatacatgtgtataccgtgttcatgaagcccacggacattcaggaggagatgctggcaaaggtaacaatgcccaagctcgggtcgtcccggttccctctagaggttgagctgctcatcacgattggctccatccatccttggctcataaaaacgacgaaggccgtcagcaccttcttcagtccagccgaagtgaagaaggttgagaggtacaagcgagacttcgcggcggggtgcaaggccaaatttgtgatcgatctgctgcacaagtcgtcgttcagaggggagagggtgctgatattctgccacaacgtgtccccgatcacgttcctggtgaagctgatagagatggtgtttgggtggcggctcggggaggaggtgctggtgcttcagggtgatcaggagctgcctgtccggtccgatgtgatggacaagttcaacggcgacagcgcggggaagaggaaggtgctgatcgcgtcgacaacggcatgcgcggaggggatcagcttgacaggcgcgtcgaggctggtgatgctggactcggagtggaaccactccaagacgaggcaggcgatcgcgcgggcgttccggcgtgggcaggagaggacggtgtacgtctacctcctggtggcatctgggacatgggaggaggagaagtacaacagcaacaggaggaaagcttggatgtccaaaatggtgttcctgggacgctatgttgatgattcctcgcaaaaccgtgtcactgacatcgatgatgaggtcttgaaggagcttgccgatgaagatcacaccggcaccttccatatgattgtcaagcaagactga

SEQ ID NO: 12901 - DNA, 2406 bp, Oryza sativa
  Clone ID: TFbOSC400938j.C1.o6.fg
atgcctcgccgcggcgcgtcctccgcttccaccagccgcggccgccgccgcccccgcgaggaggaggaggaggaggatgaggaggaggtggtgggggatgtcgcctccgacgactccgccgactccgacttcgtcgccgacacggaggaggaagaggcggcggacgacgagtacgactacgcgtccgatgggaaggatggcgcggggcccgcggctgctgctgctgctgctcctgcggcggtggccccgccgcccccgcaaccgaagcggctgcaaggggggaggaagaagggggcgggtggccacgggaagctgcccctgccgtgggaggagtgggaggaggcgaacgagaagtggctcgacgagcgggaggcggcggccaagggggaggaacccccggacccggaggttccccccgccgtggccgcgggggtgcccacggcggagccggccccggaggtgctgctcccgctgctgcgcttccagaaggagtggctcgcgtgggcgctcgcgcaggaggcctccccctcgcgcggtggcatcctcgctgacgagatggggatggggaagaccatccagggcatctcgctcgtcatcaccgcgcgccgcctccgccccccggcaccgcctcctcgccgccgcgccgcgtcgtcatctcagggccagccgaagcgttgggtgggatgcacgctggtggtctgccccgtggtggccgtcatacagtgggcgcaggagatcgagcggcacacggccaaagacagcgtgcgcgtgctggtgtaccacggcggccggcggggtgctcagaagtatgatttcaacaagtacgacttcgtgatcaccacctactccaccatcgaggcggactaccggaagcacatcatgccacccaagactcggtgctgctactgtgataaattgttttaccccaacaagctgaaggtgcatttgaggtattactgtggtcctgatgctcagcgaaccgagaagcaggccaaacaggagagccggaaatggggtagcaaaaaggggacatcgaagaggagggtccaaaagaagaaaaatgatagtgatggtgaggattttgaggaacgtgatgggggatcggggagccaatcaaggggtcagtcacctctacactcagtgcggtgggagcgtattattttggatgaggctcacttcataaaagacagacgttgcaatacagccaaggctatttttgcattagaatcggaatacaagtgggctctgagtgggacacctttgcagaatcgtgttggagaactctactcgctgatccgttttttgcaaatatttccttactcgaactatttctgcaaggactgcaactgcgagatactagatacccttctaaagaaacaatgtgattgtggtcactcatctgtcaggcatttttgctggtggaacaaggtgaccttaaggagggactctttcgataaaaatgaaatggaattctacgaagctttatatactcagagtcgcacgcaatttgattcatatgttgatgctgggacgctgatgaacaactatgcacatatctttgacctcctaacaaggttgagacaggctgttgatcatccatatcttgtggcattttctaagacagcagaactcagtgacagaagtaaaaatgaaggaaatgagaacatggaaagccagtgtgtgccccttactgtcgacctaacaacacgaagttctggagaaaaggtcactccaaatttgaagggtggcaaacgctcaggaatattaagcagactacaaaaccttgcagattttaagacaagcacaaaaatcgatgccttgtttttggcctacatgtttttgttgattgagttacataatgatgttaatggtgatgttaatgatgaaaatactttggttaacctgagagaagagataagaaacatggttgagcatgatggttccgccaaagggattgtgttcagccagttcacatcattcttggatttgattgaattctccctgcagaagtctggtatcaagtgcgtgcaacttaatggcaaaatgaacattgttgagaaggggaaagctatagataccttcaccaatgatccagactgcaggatttttctgatgagcttgaaagctggaggagtagctctcaatctcactgtggcatcacatgttttcttgatggacccttggtggaatcctgcagtcgagagtcaggcccaggatcgaatccaccgaattgggcagttcaagccaatcagaagcatgaggtttgtgatcaaggacaccgttgaggagcgtatactgcagctgcaagagaagaagcgactggtgtttgaaggcaccgttggcgactcacctgaggccatgtccaagcttacagaggctgatctcaagttcttgttccagaactga

SEQ ID NO: 12902 - DNA, 3447 bp, Oryza sativa
  Clone ID: TFbOSC420824j.C1.o3.fg
atgtctggttctggcaacagtttagacactgttgccctcatcgtaggcggaggcagcgacagcagtggcatcgtgggaaggaaacgaaggcgttgcgatctgattcgtgaaaggtggtgttgtctttgtccggtgtggtgcaaagaagcacaggaggtggtggttcctgggaggggcaggaatggtgcaaggcagagagatgggggaggttgtgctcttggcactacagaagttctaggaagaatttgcaattcttctgtggagaaagcagaagaaagagaaacagtaattccggccattagcaacacggagaagatgggagaaaaacaacagaaatcaatccctagggacagaaaaagaaaaggcgagctagatccagcagcagattatgttaaggatctttgggatgctttctatgtgactgcggaaagcacacatctcgacacatcagaagtgaataataaaaaacagttggacaattgcaaccacgatattcatgtttatgaagatctgggccatgtatgccatgaatgtggtttggtcgtgaggaaagctgactcattatttcactatcagtggaaaaaggcttcaaggaaaagaacaaatgtgaatgaggtttgcttgaagaaggtaggctctgatgctattagtctctctgaagatttcatattttcagatattgccattcatccaagacatgccaagaatatccggcctcatcagttggaaggattcaaattcctggttaataacttggtcactgatgaacctggaggctgcattcttgttcatgccccaggttcaggggaaatatttatgcttatcagtttcattcaaggcttcatggcaagacatttcactgcaaggccccttgttgtgcttcctgaagggatattaggtacatggaagagagaattccagcagtggcaagtggaggacataccactgtatgatttcgattctattaaggctgacaatagagtagagcaactggaagtcctaaaatcttggagctctaagaggagcatactctttgttggatccaagcatttcacccaaattgtctgcgatgatagggatgaaaatgctgtagctgaatgcagggacacgcttcttatggtccccagcttgttgatacttgatgagggccatacacctagcattgatgagactgatatgctacaatctgcgcgcaaagtgcaaacgccatgcaaagtggtcatgtctggtacactcttccataatcatgtcaaggaagtgtttaacaccttggatcttgtacgcccaggttttctcaagacggagacattctggcccattgttacacgtatgatgggtcaactagaaatatcaagtgccaggagtataacagagatctctgagtcaatggaagataccctgctgaatgatgataacttcacaagaaaagttaatgttatcagaagtcttggagaactaaccaaagatgtgcttcactactgtaagggtgaggacttgaatgaatttcctgtcttactagacttcagtgtgttcttggaactcagtcccaagcagaaagacattctttgcaagttagaagaagaccatgggatgctcaaaacaagcgctgtaggggctgcactctatgttcacccttgcctttcagaaatttctgaagctaatgatgttgatagggatgacagagttgatagtttggtcaacagcatcaacctgggagatggggtgaaggccaggttttttctgaacatccttgcgcttgccaactctgcaggagagaaattagttgcttttagtcagtatacactccccatgaaatttttggaaaggctgctggttaaggagatgggctggcatgtagggaaggaaatttttgtgataaatggtgatactagcatggaagatggacaattggcaatggatcagttcaacggctctgccgatgcaaaagttctgtttggttccatcaaggcatttggggagggcatctcccttgtgggtgcatcaagaattgtcatcctagatgttcacctgaacccgtctgttacgcgccaagccatcgggagcacattcaggcctggacagaagaagaaagtgtttgtgtatagacttgtagctgctgattctccagaggagaaggcccatgaaactgcattcaacaaggaagtcataccaaagctatggttccaatggagcgggcgctgcacaactgaagacttcaagctgaatcaagtctgtatcgatggctccagagatgaattgttggagactgatgttattcgtcaggatatcaaggctttgtatcaaagtattgacatgggtttagtcagtgaagcaacagtttgttttaataatgtgtccagctcaggactcagtgtccatgatactggcggtaatgttataggccaaggtgaccaagattctgaaaaaaaccggtacttaagcattgcctctgaaactatgttagtccactttgttcatgtgttctccttcgtctgtgtccctgtaaatacaacatgttctctctcaatatgtagagaaatcttatggttcttgattggtacccgggaagtaccattttctagtgtaaaatttggtatttcctcgtggatgggaaaaatcacccttatacgtatctttcgtattttgtacgacgaaaaggggcagattgccttgcttgcaagcaagggcagcatcaaggataagcaagaagcttgcaaaagctggaggtatccaagtatccatccatggctaactgaagcagtggtactggcagtgacagctgcaacccctccccatctattggcagtcgcaggaccattacctcttccttctctctgctctgctgtgccttttgctctgctatactactttgggaagggaagaaaggtggtgcatacgcttaagaattggctgcaacaagtttctgttgaaaacaagatttgtggatggggatacaacactacagaagttctaggaagaatttgcaattgttccgtggagaaagcagaagaaagagaaacaataattttggccagtggcaacatggagaagatggaagaaaaacatcagaaatctgaccaggactttcatttcagtgatagcactatggccatccctagggagagaaaacaaaaaggagaggtagatccagcagcagattgtcttaaggatcgttggggtgctttctatgtggctgtggagagcacacagctcgacacatcggaagtgaataataaaaaacagttgaacaattacaaccacgatattcatgtttatgaagatttgggtcgtgtatgccatgaatgtggttcaggggaaatatttatgcttatcagtttcattcaaggcttcatgacaagacattccactgcaaggcccttagggacatggaagagggaattccagcagtggcaagtggagcattgtagtggatttatttacttgtag

SEQ ID NO: 12903 - DNA, 3369 bp, Oryza sativa
  Clone ID: TFbOSC404928j.C1.o12.fg
atggcgaagccggtgaagtacgacgaggaggaggaggaggtctcgtcctccggcgaggaggaggaggagcagtcggacggcgccgggtccggatctggcgaggaggaggatgaggaggaggaggaggcgcccgcggcggcggccggcgaggcggctggtggggaagaggaggaggtggatgaggaggagatcgaagccgtcaccaccggtgccggcgccgacgaggaagaggaggaaagcggtgcggccgccgccgcccccggggagggcgatgaggagtcgcagtccactgaggacgacgaggccgtcgtgggggaggacgacgacgcagatgaggctgaaggaggtgcagtagtagggaaacgtgagaaagccaggctcaaggaaatgcagaaattgaagaagcagaaaatacaagaaatattggatacacagaatgctgcagttgatgctgacatgaacaataaagggaaaggacgattgaagtacctactgcagcaaactgaaatatttgcacattttgccaaagggaaccaatcaaaagagaagaaaccgcgtggaaggggacgccatgcctcaaagatgacagaagaggaggaagatgaagaataccttaaagaagaggaagatgcccttgctggttcagggggaacacgcttgctttcacagccttcatgtataaaggggaagatgcgagactaccaactagctgggcttaattggctcatacggttgtacgagaatggtatcaatggtatattggctgatgaaatgggtcttgggaaaactcttcaaactatttcgctgctgggctatctgcatgaattcaggggaataactggtccgcacatggttgttgcaccaaagtctactcttggcaactggataaaggaaattcaacggttttgccctattctacgtgctgtgaaattcttagggaatccagaagagaggaaccatataagggagaacctattgcagccaggaaaatttgatgtgtgtgtcactagttttgaaatggcaatcaaagaaaaaactacactgaagcgtttcagctggcgttacattattattgatgaagcacatcgcataaaaaatgagaattctcttctgtccaagacaatgaggatttataatactaattatcgtctccttatcacaggcacaccactccagaataatctccatgagctttggtctctcctcaacttcttgttgcctgaaatatttagctctgctgaaacatttgatgaatggtttcaaatttctggtgaaaatgatcagcaggaggttgttcaacagcttcataaggttcttcgcccatttcttcttcgaaggcttaaatctgatgttgaaaagggattaccccccaaaaaggaaactatccttaaggttggaatgtctcagatgcaaaagcagtactatcgtgccctgcttcagaaagatttggaggttattaatgctggtggtgaacgcaaaagattgcttaacatagccatgcagttgcgcaagtgctgcaaccatccatatttattccaaggagcagaacctggtccaccttacacaactggtgaacatctagttgagaatgctggaaaaatggttctgttagataaattgctgcccaaactgaaggatcgtgattctagggtgctcattttctcacagatgaccaggcttttggatatattggaagattatcttatgtacagaggctatcagtattgccggatagatggaaatactggtggagaagatcgtgatgcatccattgaagctttcaacaaaccaggcagtgaaaagtttgtttttttgctttcaaccagggctggtggccttggcatcaaccttgctactgctgatgttgtggttctttatgatagtgattggaatccacaagctgatctgcaagctcaagaccgtgcacataggataggtcagaagaaagaagttcaagttttccgattttgcactgagtataccatcgaggagaaagtgattgagagggcatacaagaagcttgcattggatgctttggtcattcaacaaggccgactggcagagcagaagactgtcaataaggatgatctgttgcaaatggtaagatttggtgcggaaatggtattcagttccaaggacagcacaattacagatgaggatattgaccgtatcatagctaaaggagaggaaacaacagctgagcttgatgcaaaaatgaaaaagttcacagaggatgctattaaatttaaaatggatgacactgcggaattgtatgattttgatgatgataagtttggaagtttacttaattccatttacattcttgatttcttgaaggaggaaaacaagcttgattttaagaaactggtcagtgataactggatagagccacctagaagagaaaggaagagaaactactctgagtctgaatactttaagcaagcacttcgccaaggtgcacctgcaaaacctagggaaccacgaattccaagaatgccgcacctacatgatttccagttcttcaacaaccaaaggctcaatgaattgtatgaaaaggaagtccggtaccttatgcaagcaaaccagaagaaagatactattgatggtgaagatgaagatcagctggagcctttgactgcggaggagcaggaagagaaagagcagttgttagaagagggttttgcaacatggacgaggagagacttcaacacatttattcgtgcatgtgagaagtatggtcgaaatgatattaggagtattgccgctgaaatggaggggaagacagaggaggaagttcaacgatatgctaaagttttcaaggagagatacaaggaactgagtgattatgatagaattatcaagaatattgaaaggggagaggccaggatatcacggaaggatgaaattatgagagccatcgggaagaagttagaccgctataagaatccatggttagagttgaaaatccagtatggacagaacaaagggaagttctataatgaggaatgcgaccgttttatgctttgcatggtgcataagcttggttatggaaactgggatgaactgaaagctgccttccgcatgtcgcctttgttccgatttgattggtttgtcaagtccagaaccacccaggagttggctaggagatgtgatacccttatccgtctagttgagaaagagaatcaggaatatgatgagcaagaaaggcaggcaaggaaggacaaaaggatggctaagaacatgacaccgacaaagcgatctgcgttaagggtttcagaaggtgaaactactccatcgaattctttcaagaggcgacgccagtcccttatggatgactatgtgggctcgggaaggcgtaagcgaggttga

SEQ ID NO: 12904 - DNA, 2877 bp, Oryza sativa
  Clone ID: TFbOSC900293j.C1.o26.fg
atgtattaccgcaggcaaaggaaggcttcttctgaggccaatgccaatgtgtttatgcctgggggtccaaatgatatctcatttcctgcatcaaatagggatcatgattggggatatggcggtgttggcaaagaatgggaagctagttatgctcgcaaactccagttgatgaattttctttcttcactgcatcaacgcactgcaaatcctttggtaaccactagaatggatgctaacatggacactcctttggagcaaaaacagaaggacagctcagcaataatagttcttgattccgatgatgaggacggatatacggaaggatgtgaacagctcacatctgagaacaataaacaacaggcaccatctggactcactagtccttacacgacatggattgtatccagtgcgaaagaccaagtaaatggaaccttgcatgttgatggagtccaaagcactcaaattgttccatattatggtcaaaatgcaccgttaataaatcagttccctttgcaaaccagctggcaaccatctatccaatatgaaagggttatattgcagaaaagacctgaggagcaacgcgttcaagatctggtggcagcaagccatgcagagaagatagcagaaacacaagttctccttactcttcctactcttcctaatgagagaaaacgaaggaaaacagaacccaccaccctggtagatgttgatggtggaactaacctaggaaaaagaaaaaggaaaaatcatcaaaatcaagcagcagttgattcaaacttggatttgcaacaaaatgatgttccttcacaaagctacaggactatgatagaagaggagaaacctgtaaaagaaagtgatggtctcgaggatctttggaaagatttttcattggctgctgaatgtacaaagcttgatacaaatgaagacatgtccaatgaaaaagatgtggatgatgaaaatgagatggatgacgactgcaatcatgacattcgaattcatgaagatctaggccacgtatgccgtatttgtggcatgattgttagaaaggctgaaacaataattgattatcagtggaaaaaggcttcaaggacaagaacaaattactatgaatcacgttcaaaggatgctgatgagattgatactggtgctgttaaagtttccgaagatttcattgtctctgatattgccattcatccaagacatgcgaagcaaatgagaccacatcagttggaaggattcagcttcctggtcaagaatctagtgggagacaaacctggaggttgcattctagctcatgctcctggttcagggaagacatttatgctcataagtttcattcaaagcttcttagcaaagtatccttctgcaaggccccttgtagtgcttccgaaagggattttaggtacttggaagagggagtttcagcggtggcaagtggaggacataccactatatgatttctattctgttaaggctgacaaaagagtagagcaactggaagtcctcaaatcttgggaagcccagatgagcatactatttcttggatacaagcagttctcacgaatcatctgtggtgatggagatggaaacattgcagctgcgtgtcgggacaggctgcttatggtacccaacctacttatactagacgagggtcatacaccaagaaatcgggagacagatgtactggcatcactaaaaagagtccaaacaccacgcaaagtggtcctgtctggtacacttttccagaaccacgtttcggaagtgtttaacatcttggaccttgtgcgccctaagtttctcaagatggaatcatcccgtcctattgctagacgtataatgagtcaggtagcaatatcaggtatcaggagtttaaaaggggttcatgacagtgcattcactgagtcagtggaagacaccctgctgaacgatgacaacttcactagaaaagcccatgttattagaagtcttagagaattaacaaaagatgtgcttcactattacaagggtgatatcttagatgaactacctggcctagtagattttagtgtgtttttgaaactcagtaccaagcagaaagaaattgttcacaagatagaagcctatgagaagttcaaaagaagtgcagtggggactgcattgtacattcatccctgcctgtcagaaatttcagagggtgatgctgcagatagggcgagcaacttgacagatgccactgttgacagcttgattgagtctatcatcattaaagatggggtgaaagccaagtttttctttaacattctgtctcttgctaactctgcaggagagaagttgcttgccttcagtcaatatatacttcccatgaaatttttggaaaggttgttggttaagaggctgggctggcatgtagggaaggagattttcatgatatctggtgatactagtgcagacgacagagaagtggcgatggatcagtttaacaactctgccgatgcaaaagttttgtttggttccatcaaggcctgtggagagggaatctcccttgttggtgcatctcgagtcatcattctagatgttcatttgaacccatctgtcacccgtcaagcaattggacgtgcattcaggcccggacagcagaagaaagtgtttgtgtacaggcttgttgctgctgattctccagaggtgaagttccatgaaactgcattcaagaaagaagttatcccaaagctatggtttgaatggagtgagctctgcactactgaagacttcaaactgaatcaagttgatattgatgactctgaagatgaacttttggaggctaatgctatccgccaggatatcaaggctttgtatagaaggtcagctatctctttctcccggtgcgcatgtgcaagttaa

SEQ ID NO: 12905 - DNA, 3459 bp, Oryza sativa
  Clone ID: TFbOSC409799j.C1.o8.fg
atggggaagccggggaagtatggcgacggcgacgacgacgactcggaggaggagcagctctccccttcgtcttccgccggcgaggaggaggaggaggaggtagaagaggaagagggggaggagcagcaggaggagcagggggaggaggaggaggggtttagcggggacgaggaggagcaggaggtggagggtgaggcggatggggagcaagtggaggaggaggaagaggaggagtctagtgtcggggaggaggaagcagaggcggagggtgaggaggaggaagaggaggtggaggaggagcagggggctggggaagaggaagaggaggaggttgatgaggaggagatcgaggcggtcaccaccggcgccggaggggacgacgacgacgaagaagtgggcgatgacgggggcgcggaggaggagtcgcagtccacggaggacgacgaggtcgccgccgggaaggatggcggcggtgaagatggcgacaagttggaagatgctactggaaacgcagagatcgggaagcgggagcgagcaaagctcagggagatgcaaaagctgaagaagcacaaaatccaggaaatactggatgcccaaaataaggccattgatgctgacatgaacaacaaggggaagggacgtctgaagtatctcctgcagcaaactgaaatatttgctcattttgcgaaaggaaaccaatcgacagagaagaaatcacgtggaaggggacgtcatgcatcaaagatgacagaggaggaagaagatgaggagtatctcaaggaggaggaagatgcccttgatggtgcaggagggacccgtctggtttcacaaccatcatgcataaaaggaaagatgagagattaccaactagctggacttaattggctcatacgcttgtatgagaatggcatcaatggaatattggctgatgagatgggtcttggaaaaacccttcaaactatatcactgcttggatatttgcatgagtttagaggaataaccggtccccacatggttgttgcaccaaagtccactcttgggaactggatgaaggaaatacaacggttttgtcctgttctgcgtgctatcaagttcttaggaaaccccgaagaaaggaaccatatccgggaaaatttgttagtcccagggaagtttgacgtctgtgttactagttttgaaatggcaattaaagaaaaaactgcattgaagcgtttcagctggcgttatattattattgatgaagcccaccggataaaaaatgaaaattcccttctctctaagactatgaggatttacaatactaattatcgtctcctcattacgggcactccactacagaataatcttcatgaactttggtctcttctcaacttcttgttgcctgaaatatttagctctgctgagacttttgatgattggttccaaatctcaggggaaaatgatcaacatgaagttgttcagcagcttcataaggttcttcgtccatttctgcttcggaggcttaaatctgatgttgagaaaggtttaccaccaaaaaaggaaactatacttaaagttggaatgtctgagatgcaaaaacaatattatcgtgctctgcttcagaaagatctggaggttgtcaatgccggtggtgaacgcaaacgccttcttaacatagccatgcaattgcggaagtgctgcaaccatccatatttattccaaggtgctgagcctggtccaccctataccactggagaccatctaattgagaatgcaggaaaaatggttctgttagataaattacttcccaagctaaaggaacgtgattccagagtacttattttctcacagatgactaggctcttggacatcttggaagattatctgatgtacaaggggtatcaatattgccgaattgatgggaatactggtggtgaagatcgtgatgcttcgattgaagctttcaacaagccagggagtgaaaaatttgttttcttgctttcgactagggcaggtggtcttgggataaatcttgctactgctgatgttgttattctttatgacagtgactggaatcctcaagtggatctgcaagcgcaagatcgtgcacatagaattggtcaaaagaaagaagttcaagtttttcgtttctgcactgagtatacaattgaggaaaaggtgattgagagagcttataagaagcttgccctggatgctttggtcatacaacagggtcgattggcagagcagaaagctgtcaataaggatgagctattgcagatggtcagatttggtgctgaaatggtattcagctccaaggatagcacaataacagatgaagatattgaccgcatcatcgctaagggagaagaagcaacagcacaacttgatgcaaaaatgaagaagttcacagaagatgctattaagttcaaaatggatgacactgctgaactgtatgattttgatgatgataaggatgaaaacaaacttgattttaagaagttggtcactgacaactggatagagccaaccagcagaagagaaaggaagcgaaactactctgagtctgattatttcaagcaagcacttcgccaaggtgcaccagcaaaacctagggaaccgagaattcctcgaatgccacacttgcatgatttccagttcttcaacactcagagactcaatgaattatatgagaaggaagtcaaataccttgtgcaagcaaatcagaaaaaggatacggttggtgagggtgatgacgaagatcaactggaaccgttgactgtggaggagcaagaagagaaagagcagctattggaagagggcttttcgacatggacaaggagggacttcaatacattcatccgtgcttgtgagaagtacggtcgtaatgacataaagaacatatcctctgaaatggaggggaaaacagaagaggaggtgcagcggtacgctaaagttttccaggaaagatacaaggaattaaatgattatgaccgagttattaagaacattgagaaaggagaagcaaggatataccggaaggatgagattatgaaagctattgggaaaaagctagaccgctataagaacccttggttagagttgaaaattcagtatggccagaataaagggaagttatacaacgaagaatgtgatcgttttatgttatgcatggtgcacaaactcggatacggaaactgggatgaactgaaagcagcctttcgcatgtcgcccttgttccgatttgattggtttgtgaagtctagaacaacccaagagctagctaggaggtgcgagaccctcattcgtctagtggagaaggagaaccaagaatatgatgagcgtgagagattggccaggaaagataagaagaatatgtcgccagcaaagcgttcttcatcaaggtcgctcgatacccctccacaaagctcttcgaagaggaggcgccagtcctacactgaagccaatgcaggctcgtaa

SEQ ID NO: 12906 - DNA, 3849 bp, Oryza sativa
  Clone ID: TFbOSC400996j.C1.o76.fg
atggaggaagcggcggcggcggcggcggatttcgatggcggcttcggcggcgccggggaggacaacctgtccatgcccctcggcgacttcatggccttcctcgataacgaggactggaaggagcagcagcacgagtggcgatgggctataaatggccatcaggctgttgggattggagaaggtcaaacaggaagcagcttggtaatgaatggtcaagcattacaaacaaaaactcaaaacgacaagtattttgggacggagggcaatcaaggtttagagatgccagtggacagcacaagttctgaaaatgcatttcaaaaccatgaagaaatttttgagaataaagaaaattggtcaaactactcgcatacagatccttcacatagtcagatggatgtaatggtggaacttaacaatggtggagaatcttttgatcactcagaggatacctcttatagattgcttagcaatgattttttggaaaattcaaggaatggtaatcctgagatgcatttaccaatggatgcattaaaccatgctaaaactgttgatgaagaaattgtccctccatatgaagattatacaaatggtttatactatgattcgggatgtgatatgttcgcagagcaatctggtttaagtgaagttaaatgtgagggcacaggtcccatgcttggtaattctgagcaggagggtaaccatttcacgtcagtgcctatgtttgaccatagtgctgttatacctgatattccttacaccgagttgaacatcggtgatgtgcctggaagcatgcagaatggaaatggcagttgcctaactgtacaaggagaatatctgcagggggagtatcaggagtatcctcagccagattatggatcgtttgatatggctaatgaaatagtgctgcatgatttgccacaaaacaatcagtcatatgagctggaacaattaccacagaatatatgtgaaagcagttcaatgcaagtgggctctccagatcaatattgtgatgatacatctctgtcggattattacatggatgatgtatcttcgatagagtcgatgtccagcgagcagaaccgatcagaagatatctgtttccggagtgagtctagcactgactcttctccggtgccctcaagcagaaactccaccactgaggatgctgataaatactttggagatgcaccaaaacatttgcagaattccatgtttcctgtcagtacccaacaccaacactcattcatgaactcaagtgatccaatgcatccaacttttcataaaaagtatgacattcctagaaatggcagctcttctattctgggtaactcatcaaggaattgcttcagtttagatagcaatcgtgattctgatttatgtattcttgagggtagtagaagtcttgctagtggacatgtgttgccaccccaaggattgcagcataactttcaacaatctgtgtgtgccaatcctaatcttcctcggtttggagggagatacaggccgcatgaggaaagaatgactttgcggcttgcattacagccattacttgatgcacctcttgcatccagtttgcttgatatttctcagccaaagtctgaggctaatccacctgatggagttttagcagttcctttattgaggcaccagaaaattgccttgtcatggatggtacaaaaggagagaaatggttcgagttgctctggcggaattcttgcagatgatcagggcctgggtaaaacagtgtcgactatatcactgattttgacagaaaggtcaccagttccatcttcagctgttaagcaagaaccatgcgaagctgtaacccttgacgatgacgatgaggatgacgatgctgagcctcatttgaagaaaccggcactagcacatctagcagatacatgtaaacctgaagcgacaagtagtaccattaagacagaaaatcctattgcaaatgttaaggctagaccagctgctgggactttggttgtttgccccacgagtgttctacgtcagtgggcagatgaactgaggaataaagtcaccagtaaagctaacttgacctttttagtatatcatggtagcaaccgcacaaaggatcctaatgatcttactaaatacgatgtcgtgttaaccacatattctatagtaagcatggaagtaccaaaacaatcaagtcctgatagtgatgatgaagagaaagggaagcctgacaggtatggtgctcctgttggctcctcaggcagcaaaaaacggaagacttcctcttctaagaagaacaaaagtggaagcacaccagagagtaaattgcctgagaaacctctcgcaaaagttgcatggtttagagttatccttgatgaagcacaaagtattaaaaattatcgaacccaggttgctagggcatgctggggtctgcgagccaaaagaagatggtgcttgtcagggacacctatacagaatgctgttgaggatctctatagctatttcagatttctcagatatgatccatatgctgaatacaaaaaattttgcttcatgataaaaacaccaatcagcaggaacccaattactgggtacaagaagcttcaggttgttctgaagacagtaatgctgaggaggacaaaagcaacgatgcttgatggaaaaccaataatctcattacccccaaagaccgtctctcttaagacagtggacttcactagtgaagagcgtgctttctataacactctcgaagcagaatcacgagagcagttcaaggagtatgcagctgctggtactgtcaagcaaaactacgtcaatatcctgctgatgcttttacggctcagacaggcatgtgatcaccctcacttagttcgaggtcatgagtctacttctagttggatgtcttcattggagatggcaaagaagctgcctgtagaaaggcagcaatcgttgctggtttgcttgcaatcgtgttctgcgatatgtgctctctgcaatgatgcgccagaagatgccgttgttactatatgtggtcatgttttctgcaaccagtgcatactggagcaacttaccggtgatgacagtgtatgtccagtgtccaattgccgagtccgactaaattcaacttccttattctcccgaggcacccttgaatgtgctctgagtagatcaacctgtgagtttctgtctgatgattcctgtgaagacatggtgcaagggaagcaacctagatttgattcgtcttatgcatcttccaaagtgagagctgccctggatattcttctctcgttgcctaaactggatttaacccatatgagtgatgacaaaaataaaattgtgcatcctgacaaaattaacgggaatagtactccctctgaatatgctggcaccaaaataactgagaaggccatcgttttctctcaatggactagaatgctggatttggtagaggttcatttgaaatcttctcatctatcttatcggaggcttgatggaacaatgtccgtcgcagctcgggatagagctgtaaaagacttcaacacaaatccagaggtttctgttatgattatgtctctcaaagctgcaagtcttggtctgaatatggtggcggcctgtcatgtacttttgcttgatctttggtggaatcctactacagaagaccaagctgttgacagagcgcatcgtattggccaaactcgacctgtcacagtgtcacggttaaccataaaagataccgttgaagatcgtattttggctctccaggagaaaaaacgggagatggtggcttctgcatttggggaagacaaatctggtgcccatcaaactagattgacggtggaagacttgaactatttgtttatggtttag

SEQ ID NO: 12907 - DNA, 2097 bp, Oryza sativa
  Clone ID: TFbOSC407487j.C1.o21.fg
atggcgccgccacaaatgtatgagcgccgcctcctcgccgccgcctccctcctcctctccgccgatgcgcagggccaaccaccccacgccgccgcccaactcggagtcggagtcacggccgagctcaagccgcaccaggtcgatggcgtcgcgtggctcatccgccgctaccaactcggcgtcaacgtcctgctcgtggtcttatgtcctctaagtgtcaccgatggctggctctcggaattcaataaattttgtccttctttgagggttatccagtatgttggtgataagttgcaccgtcgtgatctccggagaatgatgtttcaggatgtccaaaaatcttcatcgtcatctcattccactgagttaccgtttgatgtcatgatgacaacctatgacatagccttaatggaccaagaatttctttcacaaattccttggcactatgttgtcattgatgaggcccaacgtcttaaaaacccatccagcgtactgtataatgtccttgagcaacgctttatcatgccaagacgtctgctactaacgggcacccctatccagaataacctttctgaactatgggcattgatgcacttttgcatgccctcgatttttggtaccctggatcaatttctttctactttcaagcaatcaggtgattcattgacaggtggcgaaactaataaaacggacaaacagtttaagatccttaaacatgttatacaactgcgaaaagcttctagtcatccatatctattcagtggcattgaacctgagccttatgtggaaggggagcatttggttcaggctagtggaaagcttgtcatgctagatctcattcttaagaagctccatgaagtaggccatcgagttctgctatttgctcagatgactcaaacactggacattcttcaggacttcttagaattgcgtcagtacacctatgaacgtctggatggttcagtgcgtgctgaggaacggtttgcagcaataaaaagtttcagctctcaacctaccaagggtgttgtcagagatgataatcagagtggagcttttgttttcatgatatcaactagagcagggggtgttggccttaatctcattggtgctgatactgttattttttatgagcaagattggaatcctcaagctgacaaacaggccttgcagcgtgcacaccgcattggacagttaaataatgtcatcatgcgaagagcagaaagaaaacttaagcttagccacagcgttattggagaggaggatgcaacttatgggaaggggaaatatgtagaaaatgaagctagcgacatgcgctcgattatatttggcttacacctatttgatacttcagatacgactgcagagacaatgaatgatgacacagcttcggagactatcaaagaagagactatgttgaagctgaaatcaatgtctgaaaaagtagtgttgatgcgtagtcatgaaccttcagaaaaggatgaacgggcattcgaaatcaatccaaatatgacagacaacagtggggctgttgttacgagggtatctgattccgttaatgttgatccggattttaatgaagccgcatacttatcctggcttgagaagtttaaagagtcttcgcattctaaggaaaataccagagctgaactagaaaggcaaagaatagcacctgaagaaaagttcctaaaacgtgaagctattaagaaaaaggtggaagaaaagagattagccaaatgggaatccttggggtaccagacattaaagatcaaagatcctgacatcttaccgaaccagaatattccagactctggatccgtccaacttgtatatggagattgcactaatccttcagtagtttgccctgcaaagcctgccatcatattcaggtattattttccgagagtgaaatatgttacattctatgaaagggaattactccatcctaggattgttgaaggaaatgttgtgttgataattcaggaacctggggacatggaggaatgttcgatgctttggccaatctctcaacatgcattccagatgcttataatcgtgcttctgaatttgatgatctccacctggcagatcttcacttga

SEQ ID NO: 12908 - DNA, 1038 bp, Oryza sativa
  Clone ID: TFbOSC22947j.C1.o9.fg
gcatacgctgctgctggtacactcaaacagaactatgccaacattcttctaatgctgttgcgccttaggcaggcctgcgatcatcctcttcttgtgaaggggcatcagtcagagtataaaggcgatggttctatagaaatggcaaagcaacttcctaaagaaatgataataaatttgcttgcaaagctggaagttggagagttttgttctgtatgcagtgatgtacctgaggatgccgtcgtgacgatgtgtggccatgtcttctgctatcaatgtatatacgagcggataactactgatgagaatatgtgtccctcccctaattgtggaaacacattaagtaccgattcagtattttcgtcaggagcgttaaggatttgcatgtctggtgtatccagttctcatgcatcagggagttcatcattagatgacgagtcatcttctattagtcaaactagttacatatcctcaaagatacaggcggcaatcgatatactgaattcgatcattaacacctatgcccttaccgacagtgataccgtcgaatcaaatcctagccgagtggccccagtgaaagccattgtgttctcccagtggactggcatgctggatttgctggagctttcattgaatagcaatctcatacagtacaggagactagatggaacaatgtccctcaattcaagagataaagcagtgaaagattttaacacagacccagaggtcagggttatgatcatgtcactgaaagcaggtaatcttggtctcaatatggttgctgcttgccatgtaattctccttgatctttggtggaatccttatgctgaggaccaggcaattgatagagcacacagaattggtcagactcgtcctgttactgtctcccgtttaaccattaaagatacggtggaagatcgcattttagctctgcaggaggaaaagagagccatggttagctctgcttttggcgaagacaaatcgggtggccacgcgactcggctcaccgtggatgatctgaagtatctatttaggttttga

SEQ ID NO: 12909 - DNA, 2436 bp, Oryza sativa
  Clone ID: TFbOSC415522j.C1.o1.fg
atgtcggaagttagatccgtccctgggatgaaggtggaagcatccccggccgcggccgccgctgccaccgtggattccccgacatccgttctggaggatgatgagaagatttctgaatgtaagaatggggatgtcttggataccaccgaggcgattaagcaagaggaggatcatctcgatgtgcttattgaggagaaagttgatggttttgtggatgcaagttcttccctgaatgtggaacctgcggctaacaacagtgatttgtcacctctcactgtgccggtgaaggaagaaggtcagttattggagcctgtcaaggaggaaaaagctgatgattttgtggatgcagttccatctctaccgattgaccttgaggccaagaatggtgatgcatccctcatcactgatgcgatgaaggaggaggaagagaagttgcacgacgcccgggttaaggctgaagaagaagaggtagcacggaagagggaagaggctgcaagacttgcttttgatccaaatgcacgttttaacaagttggacgagctactatcacagacacaactctattcagaatttctacttgagaagatggaaacgatcgctgatgtggagggcgtccaaactcatgctgaagaggagccagtagaagagaagaagaatgggcgtggcagaaagaggaaagctacttctgcaccaaagtacaatgataaaaaagccaagaaagcagtggcagtcatgcttacaagatctcatgaagattgctcacctgaggattgtactctcacagaagaagaaaggtgggaaaaagagcaagccagacttgttcctctaatgactggcgggaagttgaagtcctaccagataaagggtgttaagtggttaatatcactttggcagaatgggcttaatgggatattggctgatcaaatgggccttgggaaaacaatacagactatcggttttcttgcccatctcaaggggaagggtcttgatggtccatacctgataattgctcccctatccactctctcaaactgggtgaacgagatctcaaggtttgttccatctatgactggtctgatttatcatggggacaaagcagcccgggcagagataaggagaaaattcatgcccaaaaccactggcccagattttccattaatcgtaacttcctatgagatggctatgtcagatgcaaagcatcttgctcactataagtggaagtatgttattgtggatgaggggcatcggctaaagaattccaagtgtttattattaagggagctaaagcgcctgccaatggataataagctccttttgactggaactcctcttcagaataatctagcagaactgtggtccctgctgaacttcattttgcctgatatattctcttcacaccaagaatttgagtcatggtttgacttttctgcgaaaggaggtgaagaagaacaagaggatagtgaagagaagagaaaagtcgatgttgtttcaaagcttcatgccatattgcgcccgttccttctaaggcggatgaaggaggatgtagagcatatgcttccacgaaagaaagagataatcatttacgctaacatgactgaccatcagaaacaaatccagaatcacttggttgaacaaacatttgatcaatacctgcatgaaaaatcagaaattggtctgtatccacctgttgagaagctcttggaacagtgcggcaaatttcagctcttgaacagattgctaagtttgctgcttgcacggaagcacaaggttctaatattttcacagtggacaaaagttttggacattatcgagtactacttggaaacaaaaggccttcaggtttgccgaattgatgggagtgttaagttggaagagaggaggaggcagatagcagaatttaatgacttgaacagcagcatgaatatctttattctaagcacacgggctggcgggcttggtatcaatcttacttcagcggatacctgtatcctatatgatagtgactggaatcctcagatggatttgcaggccatggatcgatgtcaccggattggtcaaacacgcccagttcacgtctatcggttagcaacatcacattctgttgagggccggatcatcaagaaagcatttggcaagttgaggttggagcatgtggtgatcgggaagggtcagtttgaacaagacagagccaagcctaatgccctagatgaagcggagttgctggcgctgctcagggacgagcagggcgacgaggaccggatgatccagacggacatcagcgatgaggacctcctgaaggtgatggaccggagcgaccttacaggccctcctgccaatgccgacgccgcccctctcgtccccctgaagggacccggctgggaggtggtggtgccgacgaagagcggcggcggaatgctgacgtcgctcaccagttag

SEQ ID NO: 12910 - DNA, 665 bp, Oryza sativa
  Clone ID: TFbOSC408712j.C1.o1.np
caaacctaataatgctaatatttaaatcacttgatattaagtgctgcttatgcttttcattaatgaacttttaggaggctaactatgcttccttgtgcaaataaacaatctaattgcaggagtatgcagctgctggtactgtcaagcaaaactacgtcaatatcctgctgatgcttttacggctcagacaggcatgtgatcaccctcacttagttcgaggtcatgagtctacttctagttggatgtcttcattggagatggcaaagaagctgcctgtagaaaggcagcaatcgttgctggtttgcttgcaatcgtgttctgcgatatgtgctctctgcaatgatgcgccagaagatgccgttgttactatatgtggtcatgttttctgcaaccagtgcatactggagcaacttaccggtgatgacagtgtatgtccagtgtccaattgccgagtccgactaaattcaacttccttattctcccgaggcacccttgaatgtgctctgagtagatcaacctgtgagtttctgtctgatgattcctgtgaagacatggtgcaagggaagcaacctagatttgattcgtcttatgcatcttccaaagtgagagctgccctggatattcttctctcgttgcctaaactggatttaacccatatgggtgat

SEQ ID NO: 12911 - DNA, 2082 bp, Oryza sativa
  Clone ID: TFbOSC422293j.C1.o4.fg
atggcgccggtcaggggagagagagccgtgctgcctgcaagggccgcgtgcgggctccgggctgccgccggcacgcctgcgcccgtctgggttcccgtcggcgggcgcgcggtcccttgggccgccgccgccgccgtggacgtgggctgctgctcaccgctctgctcgctcccgtgcccttcctcttgccagctcctcaagctccctgtcggcggtgatgtcgccggcgatggagccgttgatgttgctgcgcaaggtctcaacctctacctccgccgcacgtgccgcatcttccgccgcctccgcctccgcctccgccctggctgctgccaactccgctgccgccagtctggctgccctcgctgctgctgcagcggtctgagccgttgctcgcctgcgctcttctgctgcggcgagctcggcgtcctgctgacgccgagtgctcgaggcgaccgaacgccgagaccgagcgtcggacatggcgcacctccggggggctgctgcgtggagagggggaagggaaaggggaaggaggagcaaccggtgctgttgctgctgctggctaagagctcaaccgagcttgggagggggtggaacaagagatgtttagtctacaggaaagtagctgcttttcttcgtggtttgctccaggcagatgtcatacacaacgcaatgatcatttgcccagtcacggtgatagaaacctggcgcaaagaacttaatattgttggtgtgctggttatcaaagtgttccgttatgatagaagaaccgactgcattgcactaaaaagcatagctactgaattttatgcgctgatgaacttctgttgtcctaatctacttggagagtccggacaatttcatgaaaacttcagcatgccaattgaaagggctagatatagaggcgcatctgcgcaattgataaaagagtcaatagaagcatctgagaggctgaagaaacttgttagcccttttgtattgagaaggacgaaagagatgttaaagaatagcgcctctaaacttggtactaaacatgaattgactgtgtggttgaagatctctgctgctcaagaatatctttacaccaatcttatcatgagcaatgttttgggagatgagcctggcacacctttggcagcttctcaagttgcgaggagtatctgcaatcacccagtaatggtgattggttctgactttgaacagaggggtgaatcagaagagaagaaggatgctttaactgacattatccgaaaaggtttattggcgagagcattgtccaccatagtagatccaagcaaaatgattcgcatggatgggaaaacacctcagaaacagcgaccaatgttaatccaggtgattaaaggtgagaaggcaacagctgtaacgaaggaaaatcagagcaggcgggaaataacaaagccgacaaggagggtcctgagtatgcctcctgaaggttttggagtctccaaaactttgattgagcttctagctatacatggaggtgcttttgatccgtcacttgatgaatctgaaatcaggcaagtcagaggacatgaatctgttgttggtgtatcaaaccatttgcatctgttttcccagagggaatctgaccctgtcacaaatgaaaaacacaaatatacagctggcccaagtcgcaagcgcagcgaactatctatgccagtagatgcagaaattctgaagtcaataaggagcacatttatcgaaattcctatacaacagctttataagatatctggcaccccgcatcaaataagcaaggcggaaaatcttgtaaaggaattcctacaagagatggattctatggttgaggaggagatctccgttcctatggagaaggttggtttggtcatcgggagtggtggtgcaactattaaaaaatacaaaaatttacatccaaggagtgagtcaggcactacaggaaggtttgttatccggggttctcaaaaccaggccatccgatggggctggaaggccttttactctgatttacatgtttgccttggtgatgtggccttttactctagatactgcaggaatgttcttaggcagatactgcggtaa

SEQ ID NO: 12912 - DNA, 2031 bp, Oryza sativa
  Clone ID: TFbOSC25681j.C1.o1.fg
atgcggcgaggctacgaggagatcgacgacgacgagtggtcgaaccacagcttcaagccttcgcgcgtcctcaagcgaccaagccgaggcgcccagccggactcgcagcctcccccgcccatcgactccttccgttacaaccccaggccttcctcctcctccgccgccgccgccgccaccgccaccgtcgtcctctccgacgacgacgacgatttcgaacttggtgaggaggagcggttgcgccgcgccgggaagagcacccgcgtgctcaatcgtccgcagcggcagcacagcccccctgggcgggcccttccgccccgcgagtccttccgctacaaccctaaacccgccaaggccgccgccgcggtgtcggtttccgatgacgacgacgacggctttgatctcgaagacgatgatttcgacatcccttcttcgaggacctcgcgtccgcgccgtaccgctggtcggcgcttggcaaccgccgtcgccgacctctcggaggaagacgacgatttagagctcgctgatgatgattttgaccatccagacccaaggccaacgaggccgcgtcgagccaccgctcgccgtttcgtgattaaggacgatgatgacagcgacggggatgtgggtgcgtctgaggtggatggggtagaagcagaggaggatgatggtgtgaactggtcggagttggagaatgaggacgatgaagatggggactatggtgagacgaaggtggaggtggaggagggggatgtagtgggtaaggcattgcgcaagtgcgcgcgcatttcggctgatttgcgacaggagctgtatggctcatcgacaaggaattgtgagagttatgctgagatagatgattccagtgtccgaattgttacccaggtgtggagttttgattcaatggatgtgtcggagcaggatgatgtggatgctgcatgcacaagcgaggagtcggagtttgagcctattctgaagccctaccagcttgtgggggtcaattttcttcttctcttgcaccggaaaaatatcggtggagcaattttggctgatgaaatgggtcttggtaagacagttcaggccgtgacctatcttactctgttgcggcatctatataatgacccaggtccacatctaatagtttgcccagcttctgtgttggaaaattgggaaagggaacttaaaaaatggtgtccttcattttcaatcatcatgtttcatggtgctggaaggactgcctactcaaaggagttgagttcattgggcaaagctggttatccgcctccatttaatgtcctccttgtttgttactctctctttgagcggcggagtgctcagcaaaaggatgatcgcaaagcactcaaaagatggcgatggagttgtgtgttgatggatgaagcacatgtactgaaagataagggtagcttccgatggagaaaccttatggctgtcgcacaacatgcccgccaacggctaatgctgacaggaactcccctccaaaatgatttgcatgagctatggtcattgttggagtttatgatgcctgatatatttgccactggagatattgatctgaagaagctgttaaatgcagaagatcatgagctaatttcacgtataaagtccattttggggccatttattcttagacgtttgaaatcagatgttatgcagcaacttgttccaaagatacaacatgttaatttcgtaacaatggactcagagcagtttcaagcttataactatgccattgatgaataccgtggtgcttgtcaagctcgtagcgcaaaatccacatccaatttttctaataatgttgttgggttgattccaaaacgacaaatatcaaactatttcatgcagttccgtaagattgcgaaccatccattgcttataaggcgcatttacagtgacaaagatgttgatcgaattgcaaagttactgtaccctaaaggtgcattcggttttgaatgttcattggaaagagcaacccaagaacttaggaagtacaatgattttgctatccaccaa

SEQ ID NO: 12913 - DNA, 3114 bp, Oryza sativa
  Clone ID: TFbOSC900282j.C1.o6.fg
atggatattattgacttgtgttcagacagtgaagagtacttcagcccgtactcagatacagaagacaatcttgattttgacgatcccaatgatggtgttaaccaggtggttttgcacaacacagcatttggcaataatagttcagaactactagtcgggctggatgacgataactggttaaacaacactcatgctttatcctctcatagacctgctgagaatagatcagacattattgaaagcagcagcggtgtcaacactgactgtcagaatagtgcttggcaatacaggactcttccacataccttcatgagcagcagttacaagtctcgtccactttctctaacaggaggtaacaatgttgaaagtacacaccccactgtgaagcctaacactgtgcactataatggaattgggtttccttcacctgctattgcaagtggctacaagccatatgttagttatggccagggtgtttcaattgatgatgatgacgatgatgtctatgaggttctgcatcaaccatttccgttcagtcattcgagtttaggtgacaagaagatcgaggaagaatccacttggaagtacaatggttttcaaacaagttctgcctatggaatcgagatgcctacatctgcaaggtcaacaggtggtgtctctgcatatggaggtctaaactcacataggatctttcctccatcagtgccatacaacaattctgttaacaattttggagtcaatggccttggcactcagagccacttaaatatagaaaagaggctttttggccgtgatgagagggtggtgtatgatgaagccctgaagcaaatcagtcaagaaacaacggaagaaaatttgcctgaaggtgttatgtcagtatcactccttaagcaccagagaatagcattagcttggatggtttccagggagaatagctcacattgttcaggtggaattttggcagacgatcaggagagggttgagcagtctaagttcatgtctgctgatgtgggcagcatgaaatctgtagctaaccttgatgaggatgatgaagtagtgatagtcatggacaagaagcaactgaagggtgaatctgtgaatatgctacaggattcaacactgtttccatcatcagaagcagcaagtgatgccgctgatctgaagccctgggctagtctaccggggtctgctgttgatagaatggtaaatgctgtcaaagttgaacccaagaagaaggctagagtgagaccatcatcttcgtcaactttgaggtctgctaatagatcaactgcgggaacactagtggtgtgtccagccagcgttcttagacagtgggctagtgagttggctgccaaggttactgaaagttctaaattgtctgttttggtttatcatggaggttcaaggactaaagatccaactgagttgacaaaatatgatgttgttgtcaccacatacactattgtagccaacgaggtacccaaacaaaactctgatgaggatatggaggaaaagaacagcgaaacatatgggttatgtccagcattttctattggcaataaaagaaagaaagacagcgaaccaaagaagaaaaagaaacccaaaaattcagatgctgaccttgatggtggaccacttgccagagtgcgatggttcagagttgtgcttgatgaagctcaaacaataaagaatcacaatactcaagtggctagagcctgttgtggactgagagcaaaacggagatggtgtttatcaggaactcctatacaaaatacaattgatgatctgtatagttatttccgtttcttgaagtatgaaccatattctgtgtatggttcctttcgctctatgataaaataccaaatttctagagatgcaactcgtggatataagaaactccaagctgtcttgaagatagttctgttgcggcgcacaaaagaaacactaatcgatggagaaccaatcataaaattgccaccaaaaacgattcagctgagcaaaatagacttctcaaaagaggagcgaactttctatatgatgcttgaagaaggttctagggaaaagttcaaggaatatgcttctgctgggacgataagagaaaattatgcaaacattcttgtattgctgctgcgacttcggcaggcttgtgaccatcctcttcttttgaagggaaaggaaaaagatttgattgatactggttctgtagaagtggcaaagaaacttcctaaggaaacagtgataaatttgcttggacagctggaaggagactatgcaatttgttccagatgcagtgacccacctgaggatgttgttgtagcaacatgtggtcatgttttctgttatcagtgtgtgcataagagcttaaaaagtgatgagaatgtctgtccctccccttcttgtgggaagaaattaagcgctcaatcagttttttcacctggagtgttaaggttttgtatagctgataaattggagtctggtgcaacaactagtagttctgtagaagcagatggctctccatcaatctgtgaaagcagttacatatcttctaagatcagggcaaccactgacatacttaactcaatcgtgaatacacctgctctaacttggagtgatactatggaatcaagtccaagtgaagtagccccttctaaggcgatagtattctcccagtggactggcttgctggacttgctggagctttcgctggatagcagccgtataaaattcagaaggctcgatggtgcaatgtctctcaacttaagagaagcagcagtgagagaattcaacactgatccagaggtgagagtgatgctcatgtcacttaaggctggaaatcttggtctcaacatggtagctgcttgccatgtgattatgattgatccatggtggaacccttatgctgaggaccaggcagttgatagagcacacagaattggtcagacccgtcctgtaaccgtttcccgcttaactatcaaagacacagtggaagatcggattttagctctacaggagaagaagagaaagatggtccaatctgcttttggtgaggacaaacctggcggcagtgcaactcggctcaccatagatgatctccaatatctattcggaatatga

SEQ ID NO: 12914 - DNA, 12738 bp, Oryza sativa
  Clone ID: TFbOSC4701j.C1.o12.fg
atggcctcatcccaacaagttgagcttgaggctgcaaagcttcttcagaaactcattcaagagtcaaaggatgaacctgctaaattagcaacaaaactttatgtgatatgccaacatatgaaactaagtggaaaagagcagtcactgccatatcaggtcatatcaagggccatggagactgttgtaagccaacatggaatagatatggatgcgttgcgatcatcgagaatcccattagctggtggtccacaagcaggagattctagtggtgctatgcctaaggataaggagatcattggcagtcaacctcccatggttggtactgatgcatcccaaagtagtgcgcatgctggattatggaattttccatcaggttcagcagatatggcacgtcacagtgcatctatttcaggcagggtcccagcaggaccaaataggagcgatgttgcaggagctgatattcatcaaggctccatgtcacagaagagtggaagatcctctggaatggaaagccctgccagtctgcaaatagaggatactagatctatgaattcacatgattctttgaagtcagatgaaaaaacaagcaaaaaatcatcttctaagagaaaaagagtggatccaaaagcagcaggggacttgcattctgaagacaactcaaaatcagatgccatgtctaccggacaaaatattagaaagggaaaacagcctggcaaagctggtactcagggtcaactttccaggacagtcgaacacgatccatcacatacattacaagttggtaatgctcaggtgccaccgttacccagtggtgcacctttctttagggctcaccaggaaggaccatcagcttcttctgcaaggactatagacaagactaaaccatcaaatccattcacaatggcacaaatttcaaattttgctgaaggactagcttctggcaacattcctgctgagttgcagaaaagtatattgggaggagcaaatctacttaatgctagttttggctggaaccagaatgcacaaggtccagttatgaagaatactcaagggtctgttcccaacctaatgagacctggtgttaatgtcgaagggaaagttaacttaggatcacaaggaacttttaattctatgtctgcatcacaaatggattaccccacagttcctccttatgtgtcttcttcctttggaggtggtccacagtatcttgacaaagggaaagacttgacttcaggcaatactggcagtgaactaaattcttctaaagctggagctcagctggggatcatgcatatgcattttgacacacaaatgcggtataactttcagggcagtccaatgcaagaaaggcacggaattgtcagagcacctcagagagctggttcatctcaaatgtctcaaacctctcccagcattccattcaaagagcagcagttgaagcagctcagagcgcagtgcttagtatttcttgcatttagaaataatctgcagccccggaaggtacatcttgaaattgctttaggtgttggtccccctgcttcagaaggtggcagtgcaggtcagagaggtagtgagagcagaatggctgatggttctggaaaggaaaatggaaacagccaggaaaaccctgctatttttggtaggcaaagtgatatttctagacttcaatcaacatctacaggcagtgttgcggatgttgattccgcatcaaaggacccagaaattgttaaaaagaagatcaagatagctgaacatgagaaatcatttgaagcagaaaatatccagcaaaccgttcctatacagggaactgattctgaaatgcattctcaagaaacgatatctcccatgccatctgggcaactgcattactttcagggagatacaagaaaaactacccctgagatctacaaggctgatgcagaaaatttgaataggaacttaggctgggtaggaggccagggaccatctcctttgggtggtaataggcatactagtatggaagttggcctcttggccaaagatgaagtgtccaaagaaccatttgcagttttgaggcctcatcatatgcctgttgatggtagcaaccacaatttatctggaaaggatcaaactcctgagacagctggcaatgaaattgataatggtagccacatgggagagatgatatttgagcgatctgcagatgaaggagacgaagatctttctgagcaagatgatttaccattatctcctccgaagtacacaatgactgataaatggattttggatcatcagaagagaagatatgaagaaaacaaaaggaaggcattagagttacagaaggcacacaggagaatttcagcatcctatgagaagctaaaggaaaatgttagttcatcggaggatctttctgcaaaaacaaagagtgtcattgaattgaaaaagcttcaacttctccaacttcaacgtcgtgtgcgcagtgaatttttgcaggactttttcaagcctaatactactgatttggaccgcataaaatcagtaaagaaacatagacatggacgtcgtgttaaacagcttgaaaaaattgaacagaaaatgaaggaagaaaggcaaaagagaattcgtgagagacagaaggaattctttgctgatatagaggcccacagagagaaactggaggatagcttcaaggttaagagagaacgcttgaagggtttcaatcggtacgtaaaagagttccacaagaggaaagagcgaattcatagagagaagttagacaggatccagcgggagaagatcaacctgcttaagaataatgatgttgaaggatatcttaggatggttcaggatgcaaaatctgatcgtgttaagcaacttctgcgagagactgagaaatatctacagaagcttggtgccaaactacagggttccaaatcgatggatggccgtgtttcatatgcttctgatagcacagcaaatgatattgaagatgagagctaccagccgcagcattatctagaaagcaatgaaaaatactatcaattggcccacaggtaccagatgaacggcttgcgttggctggtttcattgtacaataataatttaaatggaattttagctgatgaaatgggtcttggcaaaacagtgcaagtaatctctttgttatgctacctcatggaaacaaaaaatgaccgggggccattccttgtggttgtaccatcttctgttcttcctggatgggaatcggagctcaacttctgggcacctagtataaataaaattgcctatgctggccctccagaagaaaggcgcaaactattcaaagagatgattgtacatcagaaattcaatgttcttttgacaacgtacgagtacttaatgaacaagcatgataggccaaaactaagcaaaatacagtggcattacataattatcgatgaaggacaccgtataaagaatgcatcttgtaagcttaatgctgatttgaagcattatcggagctctcacaggctattgttgacaggaacacctctgcagaacaatcttgaggagctatgggcacttttgaattttctgttgcctaatatatttaactcatcagaagacttctctcagtggtttaacaaaccatttgaaagtaatggtgatagctcaaccgaggaggttgaaaatgaattgccggagaagattgaaagacttgtaagatgttggccatctgcttatcagaaacttctaataaaaagggtggaggaaaaccttggtggaattggagcagttaagattgagggttatttacctagacactacctgccatcaattctgaggctctgtggaaaacttgagatgttggatagattgctgcccaaactcaaagccactggccatagagttctgcttttctctacaatgacaagattgcttgatgtaatggaggattatcttgtatggaagaagtataaatacctccgattggatggtcacacttctggccaggagagaggagctcttatcgacaaatttaataatcctaattctcaagctttcatttttctgcttagtatccgagcaggaggtgttggtgttaatctccaagcagccgatactgtcatcatatttgacactgattggaatcctcaggttgatctgcaagcacaagctagagctcacagaattggtcagaagaaggaagttcttgttttacgtttagaaacagtccaaacagtggaggagcaagtcagggcttcagcagagcataaattaggtgttgctaatcagagtattacagctggattttttgacaacaacacaagtgctgaagatcggagagagtatcttgaatcactgctacgtgggggtaagaaggaggaagcagctccagtgttagatgatgatgctctcaacgatcttcttgctcggagcgaagatgagattgatatatttgaatctattgacaagcaaaggagagaggaagaaatgatatatgagtcatcaaatataaaaagtgtgaaggttgtaaggaggaagggtgagcttgggggtcttgacacacaacattatggaaggggcaaacgtgctcgtgaggttcgctcttatgaggaccaatggactgaagaagaatttgaaaagctttgtcaggttgattcccccgattcacctcaacctggtggtatatcaagggatgcagatgtccctaaagtggttaagttggaagtacctccagagagttcaaaagaaccagagcaagccaaaaaagagccagcttcttctgttggagactccccgcctgctaaacggcgacgaggtcgacccagaaggtctgatgcttccttatctcctgttacagctccaccaaatactggcaaacaagaggcaggaactataattgatggcagttcttctgcaccaactactaccattcattcggttgctccagatgttaccattgattctactgcactatctgctacgggcaatccagatgttggtactgagattaagggtactacaccagatggtaccatcaaaccagtaatttgtactgacaataagggtaccgcatcaattgctgttttggaagggtctaatgcaaaggaggttggtataccagcacacagtgttcatgaacctgtatccagttcagcacctcatccaccaacccctgctacatctagaggtagaaagacccaggcaggagaaacacctcgcaggcgaggccgaaaaccaaagtctcttgctgctagtgcaggagatgttattctaagtcctgtggttgcagttggtagtggagaagcatatgcgagttctgtggtttcatcatatcctcaagggaatgtgtcctcatcacatgcaaatgctatggcaggtttgcagaaggatacaatcatatataaacctgctgcattattgccagaaggagttaaaggcactctaaccccatctggaggagataaagatgaaatggttaagacacctctggcagaagacatatatgctggaactgtaactacctcaggaaatgccaactcacagctgccaatgatagctcataatgaaaatgctggattggttcaagggggcactgatcaaaacttgtccgtagctacacctaccatacctgtggtttcagaagggtcaacaaaaatatcagaggttgtggttgcggataaacctgctgagaagcaaggtgctcgtcgccgcagaaagaaaacatctggtactggtagtgaggacactggggtgagcactaggcaaagagcagctagcaggagattgtacggtattggtaccgctgatattgcaggtactgacatgagcacaggggagaaaataggaatagtgaaggaaatagatggtagttgtcaagatacttctaagggattaccaaatattatctctccatcatatgagaaatctggatatgactctcaaccaagtacgccgatagctgttcctattaacgaggctgcacttcctagtggattcagcgaagcccatgctactcattctgaactacatcctgccagagaatccattagttctgttggccatgagaaactagcaggtgcgcacttggaagcacctccatctgtttcattccaggctccagtgcagcatgagacacggaaggattatgtgggagtacattctgaagtcgcgactactcatccggaaacaattactacccactcatcagtgaatcctgttattgatcataaactagcaaatgtccaatttgaatcacatgcttcacttcatacttcgggcaaggatatcaccacaatgccatccgaggtcgatagtggtgctccgagcaaggcaccaggtaggaggaggaaaggttcagctcgggaaccccgcaccagaagtaattctgcaacagctgcatctgaacgtcgtgctcgacttgctggatcaaagcagccagatgatattaaaatggcagagatgtcaggaaaccccagcactgcagtctgctcttctacacagcaacaggaagacaacactttgaaagctgcgcatgctactggttctgttggtgaagaacagaacaatgctgagaatcgtgtgcgtgaagtgtcaatgccagcaggcatattggaggcaaagttagagctgactaaacaaactgaccaggcaggtcataattcagagcaggaacaagagatggtttcggcagcaaaatcagcatctgcaaatgatgaggagcataaggtgcatgaagtacatcaaataattgctgatcacaatgcacttccatctagtgcacagtacactcttcaggataaaattgatagcagtgcggatgcgggcctggtcccttgtgacaaaattgctagtgtggttattgcagtagatgaccaagaccctagcaatgcctcagataaggatgctcctgcctccacagaagatgatggaaatggtctgcaaagtgaatgtgttcatgttgatttggttctggctaagcaagataatacgaaagttgaagatacgcaaaagtcgaatcaaccagcagaacaaggggaaagcttggagatgactgggtctaaatttagatcggagacgagactggaaaaaacagaagaaaccgtggataagagtggtggtgacaatctaccaactattgagaaaaatgatgattctcccatagaaaggtcatctccttcagcagacaaaattgcccaagtagcatatgggggtgaagcaggaactgaaacaactacggtggaggccgtttctgctatgaattctgatggcttacaggatgttcgcaatgccttgtccacccatggcttatcaaccaatgatattactgttgcttcggaagaacacagggatcctgagagtcatttgtctggtgaagtgtcaatgtcaggtggatcctcagagctcaagttagaatcgctaaaccaatcagaatctgcttgccagtctggtgaagtaactctggaagatacacatgccaccttggacattcagattcctgcattgattgaatcagaagaaaaaaagtcacctggaggcgatgtgcatggtagtgaagaacaacacatgcatgaagtacttcataatactgttgatggctctatctctccatccaatagggagcaggacaagctgcaagttcatattgatactaacactgacgtagacattcctagttctgacaaggaccattctactgatattgttttagcaggttgccaagccccttgcgatgcctcaggtaaggataagctgtccacctgtgatgcctcaggtaaggatatggctgcccctacagacgatgatctcaattgtctgcaaagtgaagatactgtcattcctgtggctgatgctaaggacgagactatgctagtcaaagctattcagaatgacgaaatgtctatgggctcttctcatggcttacctgctaccatacaatcaactgattcagatcgtcttgcagaagaaggggagagtgcagaaattactggctctaaattttcatgcgggatggaacaggagaaaatggaagagcccttggataagagtgtcactgacaatcaaaccagcagtcagataaatgatggttcaaacaacatggattcacaaaaagtggatagttctttgcaagcagccgatggtggtgatcttttggtaagtagaggaaccagtgttgaaaccaccactgctattaatactgatgcgtcagatgaaagtatcagtgtgtccactcagtccgtcaaagaggctagcacagtagaaattggtgcatctactaatgacatagctcctgcttgtgaattaagaaaggattttgagtctcatgtatctggttgtgtgtcaaagccagtaggattgtcggaactcaggttagaagagctgagccaaacaaagtctgtttcgcagtctattgtagcaaatgctgaagaaacaagtaccaggtctgacattgaaactcctgcaatggatgcatcagaaagtaaatcacctgaaagcgatgtgcatgagttgagtgaaagggtggagttcatgggaccaacgccaagtgcaaatgagaagagtaatgaacttcatagtcaagaactagtgaagatgatttcagctgcagaaacagcatcaacagaaggtcatcgcgaaaaagacacgtgtgaagtagatcataagattgattgcactatattttcaccaattggggatcaggacacacgaaacagaattgatggtgacacagattgtggtgtgccctcttgtcaaagaaatgcagcttttgactctgaaaatgaagtctctgctgagattaatttaacaggcagccaagcaccttgtgatgcccccaataaggccactcctgctcccacagaagatgatcacaatggtcaggaaagcgaagatactgtgattggtgctgagcaaggcactgttgaagttgaagctatgcagattgatggtatctccaaaagctattccagtgattcccatgccactttacaatcaagtgactcaaatcagctagtgaacagtgactcaaaatttgaatcatcaaagaaacatgacaaaacagatgaaacttccaatgaaagtagaggtgacaatccaacccacagttgtacaaacgatgattcccatgataagaatttagtaggatgttctccttcagaagacttaaatgaggacaattctgcccagttagctgatggtgatgatttagtgggaagtaaggatactactgctgcacacgccagtggcttaaaggagcttacctctggcaattatgttgcctcatcttctagccatgttgttcaagatgtaacatccatctcgaaaatggagtctgtgcaggctggtagtgaggaaatctatcatggctactctgatgaaaccatccattctgctagaatcaaaccagtggttggtactgaaattacggaaaatgcttctgttgcttctgcaccagttattaccatccaaccagatattgaaactgaagctggtgttactgcgtctttgactgttttggaagggtctatagcagaggaagttgatacacaagtagaaagtggccatgatctggtcactagtacagcccctctttcaccagctcctttacccggtgagagtcatgcgtgcactgatgtatcatgtcctgtggctgtggaggtatcagagacaaagctagagtcagcaaaccacacagctagccagttaggtgcagcttgtacagaaacaccaaatgccttgttgaacactctgatccctgcgttacctgaatcggaggaaacaaaactttctggaagtgatacagatggaaagaccattatggcagagcttgcatcttccagtgatgaacatgataaggtgcatgaagtaggtaatgaaactggtgatgataataaacttccatctagtgtggcagaagatgcagtgcaaggtgaaattgatggcagtgctgacatggacagtcaaataattgctggtagttccgaagcagaaatcaacaattctactgtggctactatagctgacagccaaataccttttgatccctcagataaggacactcttgcagaagatggcaatggtctgcaacgtgaaggtactactgtggatgtgactggttctaaggaagatgatatggaagctgaagagaagcagatggatgatagtcatttgcccgctgctttacaatcaactgagtcaagccagcccacagaacatgctgcccccacacaagatgatggcaatggtctgcaatgtgaaggtactactgttgatgtgtctggttctaaggaagatattatggaagttgaggagaagctgattgatgatatttccggaagcccttctagtcatttgcctgttgctttaaaatcaactgagtcaaatcagcctgcagaacatgctgtccccgcagaagatgatggcgatggtctgcaaagcgaaggtaccgctgttgatgtggttgattccaagaaagatgatatggaagttgaagaaaagcagattgatatctctagaggctcatctagctttctgcctggcgctttagaatcagctgaattaaatcaacctgcagaacatactgcccccacagaagatcatggcaattgtctccaaagtgaaggtactgctgttgatgtgccttgttccaaggaagataatatggaagttgaagaccagtttgacggtatttctagaggcccatctagcttttctcctgacactctagaatcagctgagttaaatcaagctgcagaacatgctgcccccacagaagatgatggcaatggtccgcaaagtgaaggcacttctgttgatgtggctggttctaaggaggacaatatagaagtcgaagagaagattgatgatatctctagaggctcgtctagtcatttgcctgatgttttacagtcgactccaaatcagcgtgcagagcaagagtgtttagataatagtgatgacgtgaacacatctgttgtttcctcccatgccccattaagtggccccaaatttacatgtgtgaaagaacttgaaaaggcagatgaaaccttggaaacgagtgatgcccaagtagcagatgaagtctgtttacagacaaatgatggtgctcacaatatggcttcaggaagttgttccactttagaagacaaaaacgaggacagttctgcccaaatagctgattgtgaagatttattgctaaggaaaggaactactgttgatgaccttgatggctgtgtcgaaggtcacagtggcttgtccacccattccaatgatgaagtgcgcaacctggtagaaattgtcaagggtatgaatgatactactgctggcagtgaagtgcatgtggatcctgaaagtcatgtatctgatgaagtgtcaatgccagttgcaccatcagagctcaaggtagaattgaagaaccaatcagaacctgcctgtcagtttggggcagtgatcgtcgaggaatcaaatgtcagcttgggcattcagactcctgcattagctgaatcagaagaaatgacatcaggaggtttcatgcacggtaaagaagtttgtgcttcagaacaaacgaatataggtgcggctgcagaacctgcatctacaaaagatgatcatgatatgcatgaagttgataaagagattgttcattgtacaatatcttcccccataggggatcaggaaaatctgcaaggtaacattgatggcaagatggacgttggcctggcggcttgccagacagagtcagattttgtgagtggaaatgaccattctagggagactgatttagcaggcagccaggcaccttatgatgcctcggataaggaagatactgctgctgatttgattggtcctaagcaagccactctcgagatcgaaaaaatgcagattgatggtattcctgaaggtccttctagcgtgcctgctgttttgcagttaactgactcaaatcagccagcagaacaagagagattagagaatagtgactctaaatttgcatcaacaaaggaccagggcagagtggatggaacttccaatttgagtggaggtgataatgcaaagtgtagtcttaccaatgatgattctcaaactgtgaatctagtaggatattcaccatcagaagactcgaatgatgatgattctgtccaagcagctgatagtgatggcgttctgggaaataaagaaggtactgatgatgttatctctgctgcatgtaccgatgatgtatccatgctgaagactgaatcaatagatcgtcatggttctgacgaagttgatcattccactgccccgtctgctgccatcaaacaagagagtggtactgaagttacgtgtgacgcttctgttcctgtttctgaaagctctatatcaaaggaaatcggtacatcgcctgagtgtgatgatgatcaagtggctacagcagcacctcatccaccaacgccattatctgatgctactgatgtatctgctgatgtgcaaatcccagcaggaatatcggaggcaaagctagagcagccgaacgaaacgactagcccgtcgggtgctgctactgaagaaaataatactgtcgtgagcactcagattccaacattagctgaatcagaagatagaacacccgccgatactgctattcaaggtactgaggttgacagcgctgagccagcatctgtaagtgatgacgaaaacaaggttacagcagctgatgatagtgcactcccgtctactgggccagaggatacagcggacgataaaattgatagcagcgctgatgctagtgagaagtag

SEQ ID NO: 12915 - DNA, 2739 bp, Oryza sativa
  Clone ID: TFbOSC400299j.C1.o7.fg
atgccttcgacgagcaaatgcaaccgcatcagccgcgtcgccgatgaggaggaggaggaggagatcgttgccgtctcctccgacgccgacgaatcggagtcagagtcggaggtggggagtggagcggaggaggaggatgacgactacgtgggggagagtagtgactcggccggcggcagcggcagtggcagcggcgacggcgacggcgacgaggaaggaggtaggagcgacattggcgatggcgagggcgagggcggcgggcggcgagttcggagcgcgtgtcgcggcgtgagagcgaacgaccgggagaggaaatcgcagaatgtggatgccctcgtcaggggaaatctagttgtaagaaggcagccacttattccacgtattctttcggtttctgatgcggcagcaatagctcgaaagccattcaaacctccctgtcaaaatggatacagtgaaaataatgagcaacttgctcggcgcctttcagctcgtaaaagatttgtcccatggggttcggtgcagccatttgcagttacaaatattcttccacaatcacctgctgtttctagtgatgattccgtagaaaatgaggaatcccttccaccaggcatagagccattgattttgtggcaacccgaggggcgtgacaaggaaaacagcaatttttctgcaatcaaggttgatcacttgcttgtacgttacctccgaccccatcaaagggaaggagttcagtttatgtttgattgtgtatctgggttgttaaatgatgatggaatatctggttgcattttagctgatgacatgggattggggaagactttacagtcgataactttactatacacccttctttgccaaggatttgatgctaagccaatggttaaaagggctgtcgtcgtaacccccacaagtttagttagcaactgggaatctgagataattaaatggttaaaaggcagagtgcagttgcttgctctttgtgaaagcacacgcgctgatgttctttctggaattgaaagtttcttaaaacctttgagccgtcttcaggtactcatcgtatcttatgagacattccgcatgcattcttcaaaatttgaaaggccgggaagctgtgacctcctcatatgtgacgaggcccacaggctgaaaaatgatcagaccctaaccaataaagccttggctgcccttccttgtaaacggcgtatcctgttatcaggcaccccaatgcagaatgatctggaggagttcttttcaatggtaaatttcacaaacccaggagttctgggggatgctacatatttccgcagatattatgaagcaccaatcatttgcggaagagagcccacagcaagtgcagaagaaaagaacttgggatctgagagatctgcagagctcagtgcaaaagtaaatctgtttatattgagacggacgaatgccctgttatccaatcacttgccaccaaagatcgttgaagtagtgtgctgcaagttgactgctttgcaaactgcgctgtacaaccacttcatacattcaaaaaatgttaaacgcttgatatctgaaggaacaaagcaatccaaagttttggcttatattactgctcttaagaagctatgcaaccatccaaagctgatctatgacaccataaaaagtaataattcagggggctctggttttgacgactgcctgcgcttttttcctcctgaactgttttcgggaaggtcaggttttgtgacattggatctgtttgcacaattatgtcgggaaaggagatacccgtatattaggcttgatggagcaacatccattaataaaaggcaaaagttggtgaaccaattcaatgatccatccagagatgagtttgtctttctacttagtagcaaggcaggtggctgtgggcttaatttggttggtggaaatcgattgattctctttgatcccgattggaaccctgccaatgataagcaggtatatcagcgtcagatgtcgaaagaaggtctccaaaaagttattcagcaggaacaagcagatggcaaaatgcaggggagttctctttcaacagaagatctgcgtgatctttttaccttccatgaacaaatcaggtctgaaatacatgaaaatttgaagtgcaatcgctgtaacaaggatggatgtatggttctcgatggtagcaaatttgattcagcagccactgagcatgaggcttctaactcaggagagaacagttacattgatattggtggatttggagcgatctctggatgtgtgcagaaaatgaatagttcgaatcaacagattggaagtccttctgaagaagatttaggaagttggggccatcattctgatccatcaactgtacctgatactatactccagtgttcttctggtgatgaggtttcttttgttttcacaaatcagatcgatgggaaacttgttccagttgaatctatggcgcgagctgcaactcatcgaacacatgaagtgactgttaatgcagaaaaagaagtgggaaaaatcaattcttctaatgtacctggaaccgaacggcaatctctacttggaaaaaatctgaagatgatgggattcaatttaaagaattcgtctatgaaattcccaactaagtccagaagaatgctgccaaactgtttgcaagggatgaacaaaaccagcacatcttcagatcatcaacaaactaaaaagcttcatgttatttctgatgcgtctgatgatgattttgtatga

SEQ ID NO: 12916 - DNA, 3825 bp, Oryza sativa
  Clone ID: TFbOSC400376j.C1.o26.fg
atgggcggcgacgaggaggaggttgccggtgacgtgcgccgcaagttggggggctacctccgcgccgtcgtctccgtttcatccgatgtgggcgtggaggcgctcgcgccgctttccccgtgctcgctcttcgcctgcgggggcgtctccctcgcgccgatccccgacggcggtggcgcgacgccgcggtccaaggggagggcgtgcggcggagggggcgtcgtgcggcagctgagggcgctggtgtcgagccggtgcgtggaggtggaggggagggtgctgagggcggtggcgaggagggggagggagggaggaggaggggatggggaggtggaggcgagggcggtggtgctgttcgacgtgtacctccccgtctccgtctggtcggggtggcagttcccgcggtcccgcgcggccgcggccgccgcggtcttcaaacacgtcagttgcaattgggatgccaggaatgctttgcttgcttttaactggacctctcctgacaatccacactgtgatgaccagtatatttggacctgcaccgattgccacgtccttggttgtgaggtacatcagataccatctgtattgaataatgataagtcgtttgacctgcatgaaatcttcaaaactctacctagtgttatggtggagaagaggatgcagataacaagaataacaccagatgaggcagcatcgggagtgggtatttggtctgtccctgatgatgtcttgtataaggtgctggttcgactgaaacccagagatttgattagagttgcagctgcttgtcatcatctaaggaatctttctgcttctatcatgccttgcatgaaacttaagctttttcctcatcaagaggcagctgttgaatggatgctaaggagggagcagaacttgcaggtcctagaacatcctctatacaagggtttgtgcaccatggatggtttcccttattacataaatgttacctctggtgaaatatccactggtagtgctccaactgtacatgatttttgtggaggtatgttttgtgatgaacctgggttagggaagacagtgactgcactgtctcttattctgaagacacatgggactctggcagtccctccaccagggatgaatgttatgtggtgcatgcataaaccagataaaaaatatggatactacgagcttagtgctagcaactcttctaatggaaacatctttttgtcgggatcaaaaaagttgcgaaaggacgtgattagagaagatacatgttcaagtgagtcactgaataatggtggttcagttgttagtacaaggtcatcaagaaagagaggcaggttagtaaaccctgatttgaatatgatcgctgcacatccgagtgggaagtcgccaatgtcagcaccaactggtgctcattcaactccagctactcatgtgctaaagattaccaaaaacttgaaacatgttaggaaaaacctcatggaggcatatagcgatggttcagttggcaataaaaggaagagagatgccacctctgagttaagtgaaacctgggttcaatgcgatgcttgcagaaagtggcggagattattggacggaactgcacttgattccagtacagcatggttttgcagcatgaaccctgattctgcacgtcagaagtgcagcatcccagaggaatcttgggatttaaagcgaaagataacttatttgcccggatttcacaagaaaggtacaccaccaggaaacgagcaaaatgcatctttttttacaaacatattgaaagagcatgctgctttgatcgattcagaaaccatgaaggctttgttgtggttggcgaaactttctcccaagaaacatatcgagatggaagcagttggtttgacacggccagttctagatgcacgtgctaacataggaaagggtgcccgcccgtattacaagatttttcaagcatttggccttgtgaggaaggttgagaaaggcataactcgatggtattatccatctatgcttgatgatttggcatttgattcggctgcacttggaattgcccttgaaaagccgctggatttgatacagcggcatgtttcctcggacacacttaatgtttatgtatggggagatcacaagaaaccatctgctcacaaccttgcatgggactatgacattgtcataaccacatttagtagattaagtgcagaatggggtccaaagaagagaagtgttttaaagcagatccattggtttagggtaatattagatgaaggacacacattaggttccagtctcgccctcacaaacaaattgcagatggctgtttcattggttgcttctaatagatggattctaactggtacccctacgccaaacacaccaactagtcaagttgctcaccttcatcccatgcttaagtttcttcatgaggaagtttacggtcaaaactaccagtcatgggacactggaattcataggccttttgaggcacaaatggaagacggacgcagtcgtctcctgcagctacttcagaggactatgattagtgcaaggaaacaagacctgaaaaacattcctccttgcataaaaaagataactttcctggacttcagtgaggggcatgcgaaaagttacaatgaactggctgttactatccgcagaaatatattgatggctgattggaatgacccttctcacgtggaatcacttctgaaccccaagcaatggaaattccgtactacaactattaagaatgtgcgcttgtcttgttgtgttgcggggcatatcaaagtagcagaggctggtcaagatatacaggaaacaatggatgcattaatgcagctgggccttgatccttcttcgggggagtatcagtccataagatatgctcttttaaatggtgccagctgtttcaggtgcagagattggtgccgcttgcctgttgtcacgccctgtcggcatctgttgtgccttgattgtgtagctcttgatagtgagaaatgcacgttacctggctgtggcaaccattatgagatgcagactcctgaaactcgtgcacggccagaaaatccaaacccaaaatggccagtgcccaaagacctaattgagttgcagccttcatataagcaggatgactgggatccagactggcagtcgacaacaagcagcaaagttgcttatttggttaataagttgagaagtttgaaggcagaaaacataaaacatgggtactctaggaacatggccaatggtgcttgcctttctagtcaatcttcttgtcaagaccataataatgtggagggcaggttaccacacacaatgcctgacaaagtaataatattctctcagtttctggagcatatccatgtgattgagcagcagctgacgattgggggcataacatatgctggaatgtacagtcccatgccattaggcagtaagagaagttcactgacgaagttcaaagatgatccagcatgcatggccttagtcatggatggaactgcagcactgggccttgatttgagttttgtctcttatgtttttctgatggaaccaatatgggataggagtatggaggagcaagttattagtcgtgcacatcgtatgggtgctactcgtcccatatttgttgagactttggccatgcgtggtaccatcgaagagcaaatgttaaaacttttacaggattccaatgcttgcagacaaatggtgaataaaggaacaagcagcactgataatgaaggtgctcggcctcaccggagcctgcatgattttgcggaaagcagttatctggcgcaactcagctttgtgaaaggatctgacgcggcggaaaaattatag

SEQ ID NO: 12917 - DNA, 2634 bp, Oryza sativa
  Clone ID: TFbOSC410323j.C1.o1.fg
atggctgcctcggtggaggcggcggcggcggcggtggtggccccgcccgcctccgtgggcggtgacgaggtcgtcgtcggcggcggcggcggcggggcgtcggagcaggccaggacgctcatcggcgcgctcaacctgctctcccgcaacctcccgctgccgcccgccgtcctgcacgccgtctcgtccatctaccacggcggcgacgcgtgggagggggaaggggaggaggggggtgaagaggaggtggcggcggcggcggcggctgtcggggatggatgcggcgagagcggggagggggaggaggaccgcgcggatgcttctcccggtgcggatgagggttgtagtttcaaagcaccatattgtcactgcgatgattggggagtcaccttgattcaagagcttgaagatgctgtattgaagaatcaaggaccgtatatgtcatactcagagttgactgctttaaaagaagaccgcttcaacacttccattcagcataggctgactgaacttgaaggattaccatctactaggggtgaagatttgcaaatgaagtgtttgcttgaattgtacgggcttaagttattagacttgcagaagaaagtaaggactgatatcagtgcagaatactggctacacaaaaaatgtgcacaccctgataggcaattgtttgactgggggatgatgcgtatacggtatccttttaccatgtatggaattggagatagtttttcaatggatgctgatgatatcaaccgcaaaaagagattctcagaggactccctttttggtatttgggaacaacagaggatctcaagacttgaagaggaggaaaagaaccaggcagagatcaggaagaggaaatttttttcagaaattcttaatgctgctagggagtatcagctacaagtaccggcttcttacaaacgaaaaaaacagcgcaatgatggagttctggcatggcatgttcgtgcacgtcaacgtataaatcgcatggaaaagagtagattacaagttttgaaggctggtgaccaagaagcttatttgcgtatggttgaggagagcaagaacgagcgcctgaaactgctccttggaaaaacaaatgagcttcttgaaggaatagggaaagctgtgcagagacaaaaagatgctgagcatgttagtcgccctgatggatctgaactgccaaaagggtcagaatctgatgattgttctcaaatatcaggcctcaaggttgaatcccctgatgaagagtccccatcagatgttgatgcagaccatcatagttctgctgatcatagtaaatttaatgctggccataggcttgattctaccgtccactctattgaagagaaggtaacggaacaaccatcagctcttgaaggtggggagttaagaccatatcaattagagggcctgcaatggatgctttctttattcaacaataatttgaatggtattctggctgatgaaatgggtttggggaaaacaattcagaccatagctttgatcgcctatctattggagaagaaggaggttacaggaccacacttaataatagcaccaaaggccgtgttaccaaattggtctaatgaattcaaaacttgggctcctagcattgggacaattctgtatgatggtcgtccagatgataggaaggctctaagggaaaagaattttggacaacggcagtttaatgttttgctcacgcactatgacttgatactgaaagatctgaagttcctgaagaagaattttgaggaatggtttaatgcaccatttgcatgtgaagtcagccttaatgatgaggaacagctgctaattatacatcgtttgcatcaagtgctgcgtccatttttgctgaggaggaagaaagatgaagtggaaaaatatcttcctgtgaaaacacaagtaatactcaagtgtgacatgtctgcttggcaaaaagcatactatgaacaagtcactagcaatggaagggttagtctaggatctggactcaaatcaaaggctttgcaaaatctgtcgatgcaacttagaaaatgttgcaatcatccctatctattcgttgagcattataacatgtatcaacggcaggaaattgttagatcatcagggaagtttgaattgcttgaccggctacttccaaaattgcagagagctggtcacagggttctgcttttctctcagatgacaaaactgcttgatatcttagaagtatatttgcaaatgtaccagttcaagtacatgaggcttgatggatctacgaagactgaagagcgagggagattattggcagattttaacaagaaggactcagaatatttcttgtttcttctcagcacccgagctggaggccttgggttgaacttgcagactgcagacactgttattatttttgacagtgactggaatcctcaaatggatcagcaggctgaagaccgtgcccaccgtattggacaaaagaatgaagtgcgtgtattcgttcttgttagtgttggctcaattgaagaagagatcttggaccgtgcaaaacagaagatgggtattgatgcaaaagttatccaggctgggctgttcaacacaacctccacaggctgggctgttcaacacaacctccacaggttagattaa

SEQ ID NO: 12918 - DNA, 192 bp, Oryza sativa
  Clone ID: TFbOSC422293j.C1.o3.gm
atgaaaagagcaacggagaacaaatatttggcgaacttgaagacagatattgttgagaaggcgttgaaatatgatagaaaagagaaaatgaaggagaaagaaggtatcaagtggctatggacattgcatctcaagaaattaggaggtgcactatgtgatgaaatgggcatgggaaagacccggcagccatag

SEQ ID NO: 12919 - DNA, 4338 bp, Oryza sativa
  Clone ID: TFbOSC400007j.C1.o4.fg
atggatcgcgccgcgcgcctcgcccgccgcggcggcggcgtgaccgtggctgaataccgcatggtgcggggccgccgccgcggaggcgacgcggggccggtggtggtcatcgatgtcgaagacgacggggaggacgctgctgatgactccgccggcggtgggggtggagcggcggcggcggtgaagaggagggtggtggttccgggggccgtggcgacgcggacgcgatcgcggaggatggcgatggcgcagcaggcgcccgtcacgccgccggctgcggcggaggaggcgccgagcaggaggaggaagaggaagggggcggcgagtgcggaggcgggtggcggagggccgtcgaagcgccgcgtgcgatcctcggggtcagcgggcgggcgtggtgcgcgcaagcgcaaggaggcggaggcggatgaggaggaagcggaagcagaggctgaggaggaagcggaagcagaggcggggactcccgctcgcggagaatcgatggaggtgtcacaggttgacgggggtggcagcagcgggcgagccgatgacgcttcgcacaatggtaatggcgagtctcgcgtgtgtaacgcggatggcattgatcaggcaagcgaggagcgtccaagtgtcgctggtggggatctaattgaggaggagcactacgggaatggggaagccagcgtcgctggtggggatcgaattgaggagcactgcggtaatgtggaagccagtgtcgccaattcgaatcgtgatggcggtgagatcatcgctggggagggcacagaggatcgtgggaacacggagttatcagtggtggatccagtgaatgaagagttggcttccgatgaggatgattacgacgatgaaatgttggaggaaaagcttgtcggagatgtcattcgtgcttacagcaatggcgctgatttggatacaaatggagtggactgggaagccgaggatgagatggaatttgctgatttggatacaaatgtagtggactgggaagctgaggatgagatggaatttgatgatgataatgataatgatgctgatgacgacggtgataattttgggggtgatgcggatgaaggtgacaaatctgtacaaatgcatgacttttctaaggtggaaacacaagatttggtgagccacaatgttaatgttagtgaagtgaggcctcatgaggatgaggaggctatcaaggatgagatggagtcaaagggaaaaggatctctcagttttaatgaagggagctcctatattgaaattcttgactctgacgaggaagtcaaagtggtcaatgacacagggaatgccttgagaaggaagccattagtaccagcgaagctaccgattgtgccatcttgtgttgcatggagaactcggtcatcatggggtatgaaggaggagaggatttcttacaatacatatttcgaggtattgtctgatgagccaaaagaggatgatgatgacactgaagtggaattggatgatgaggaggacgatgaaaacgatgacgattgcaatagtgctagctgtgatgaagaagatgaagaggaagaagaggaaagagaggaggaagaggaagaagctcaaaggagaaagcaaaagaaagggattgactcatctgatgatgagatgattgatgatgctgtagattgtggcattgattgggaggaggattacccagaggttgattttactcggccacttacctttcagaaagatggcagtgaggcccctgtgggcagcgaggcttttacggagcaacagaagagatcgcgatttacatgggagcttgagaggaggaaaaaactgaagcttggcatgatgacgaatcatcgtttgtatgaacgagacctggaatcagattccaactcatcagattctagtcagaatcgaaaaaatggatgtcaagggagtggtgatcacagaactgggaggaaaaggaagaatccattatcaaaatctggtaagaaatccagccgcatgttaaagaggcagtctcttatgaagcttctgatggacaagatgtgtagcaatgatgatgggaagtctactccttttgaccagaagccccagattgagtatagtttcaaggatttgcatccgttggttttttcatttggggacgatgatcctagtccaactgataggtcagagcaagatgctgcacttgatatgctatgggctgatttagacttcactttagagtcagagaacattgggacttattatgatgatgagggccaagaggacagtctgctagatcatgcacttgctcctattacaccttgttctagagggaagcatgaatttattattgatgagcaaataggaatcagatgcaaatactgctccttggtaaatctggaaatcagatttattttaccattgctggcctccaattttgcagagaaacctgcatggcgaaacagctcttgtttgaagactgcgttgatgtgtcctgatctttatgaacaaacagggactggtgatggacaatctcaagatttccatataaatggaactgtgtgggatctcattcctggcgtcattactgatatgtatcagcatcaacgtgaggcatttgagtttatgtggacaaatctagtgggtgatattaggcttaatgaaataaagcatggggctaagcctgatgttgttggaggatgtgtgatctgtcatgccccagggacaggaaagactcgtttggctattgtgtttatccagacatacatgaaggtgttcccagactgccgaccggtgattattgcacctcgtgggatgctgtttgcttgggaacaagagttcaagaaatggaatgtcaacgttccttttcatataatgaacactactgattactctgggaaggaagacagagatatatgtagattaataaagaaagagcatcggactgaaaagttgactaggcttgtaaaactgttttcatggaacaggggtcatggtgttcttggaattagttatggtctatatatgaaactaacatctgaaaaggttggctgcactggagaaaacaaagtgagaactattcttcttgagaaccctggtttgcttgttctcgatgaagggcacacacctaggaatgagcgcagtgttatttggaagacactaggaaaagttaaaaccgagaagcgtataattctatctggaactcctttccaaaataattttcttgagctttacaatattctctgtttggtgaggcctaggtttggtgaaatgtttttgactaaaacaagagtgggtcgaaggcactgtgtctcaaagaagcaacgggataaattttctgataaatatgagaaaggagtttgggcttccttaactagtaatgtaactgatgataatgcagaaaaggtaagatcaatactgaaaccatttgttcatatccataatgggactattcttcgaactcttccggggctcagagagtgtgtgatagttctgaaacctctaccgcttcaaaagagtatcattagaaaggtagaaaatgttggatctggtaacaattttgaacatgagtatgttatttctttagcctccacacatccttcacttgtaaacgcaattaacatgacggaagaagaagcttcccttattgataaacctatgcttgaaagattaaggtctaatccttatgaaggagtaaaaacaaggtttgtaatggaagttgttcgtttgtgtgaagcattgaaagaaaaggtattgatttttagtcaatttattcagccattagaattgataaaggaacatcttcgtaagattttcaaatggagagaaggaaaagagattctccaaatggatgggaagatcctcccgagatatcgtcaaaattcaattgaggttttcaataatccggatagtgacgcgagggtgttacttgcatctacaagagcttgttgtgaagggattagcctaacaggggcttctagagttgttcttctagatgttgtctggaatccagctgttggaaggcaagctatcagcagagcatttaggataggacagaagaaatttgtatatacatacaatttaataacttatggaacaggtgaaggtgacaaatatgataggcaagcagaaaaggaccacttgtccaagttggtcttctctacagaagacgagttcagtaatgttaggaacatgctttcaaaagctgaaatggagcactgttctaagttgatatccgaggataaggttctggaggaaatgacttcccatgaccagctgaaaggcatgtttttaaagattcattatccaccaactgagtcaaacattgtttttacttacaaccagattgctcctgagttaagttaa

SEQ ID NO: 12920 - DNA, 2373 bp, Oryza sativa
  Clone ID: TFbOSC400679j.C1.o1.fg
atgggtggcaacagtgtgacgatggcagaggagctcaagggagctgcggtccccatgtctctcgacgggaggcaaggcggtgggagcatttctgcaggggtttgcgtcgatggcatgggcgcctgcctttcagcttgcggtattcaggttttgaagttttggtgcataagattggtgatattttattcttttattgggagtaagtgttgctctgaggtgcaatttgccttctgctacatattgtttttgcaggctcttgaagccccaaggggggagcctcgaaggacgaaaactcactgggaccatcttcttggagaaatggcttggctggcaaaggagtttgatgctgagagaaaatggaagctgtccatggctaaaaggattgctcaaagagctaataagggtgtagttgaccaagcaacaaaggacgagagaaaacagaaggttttttataagaaccaactggagcttgaggaaaggaaaaaaaaggccctagacaagcaacttgatttcctcttaggacagactgaaagatattcaacaatgctggcagaaaatcttgttgatgtgcgccttcaaaatcaagaaaatgactctttacagactaatcaaagatcccagcaggaactagcacaagagaacataaatgcatcaagtccgactgatgttgacaatgtggaaatcgatgatgattacaacagttccttgggtgaagagccaaaagatgatgaacacacaatcgatgaggatgaagctcaaattacggaggctgagcgcaacgaggaattggctgctttgcaggcagaagctgatctaccactggatgatattctcaagttgtacactaaaaataaagttcaagctttctcagttagcagggaaagcagtccagatggcagagacgtttttagtgactcagattcaaaggatttgattaaagatcctttgaaccaggctaatggatgcaacgatgaatctgatcatacttcaagtgatgaaggcatttcttctgaggaagcagatgattaccagtcttactctgagtttgtgaaaaagaacactgtgaaatgcaatggcaatatctcatctgttgatgcaaagttaactgaactatcggtccgatccttggtctccaccgaaatgaccgaaggtacatggactctgggagagctaggcccaagcggtggcgcggaggtagggtggatgcaggctgtaggtggtggtgcgacaatcagtcgggacctgggtggtgcggagtttgggtgctggccatggtgcaatgagcagcaggggccacggagaggctgcgcgcgggcggcggtgcaacgagcagctgagcgtcgagcggacgacgaagattatgttgctaatgatgaaggaaaggatgatgaagctactttgtctgaagaggaagagttggcgaagaaagaagactgtgatcctctagatgaggttaagttactgcagaaagagagtgagatcccacttgaagaacttcttgcaagataccaaaaggatggctatgcagatgatgacacaacagaattggaaaattcacctgcactatcagttgaggatgtcaatgccaacatgcctgtggatgatgagtctgcagacaccgtggaggtaaacagggatctttctgcagataccatgaaactgaccagagatcagtctgcagagaccgtaaaagtgaataatgaccagtctgcagagattgtggagggcaacaatgacacatttgaagatcatgaatctgcaggcatgctgggacctgagcatgtcagtggtagtgttctacaactagaaacatcagagcctattgtacaggaaaatactgctaaagagggtgatgtaactgatactaaagcgatggccaatggagataatagtgatgtgattgctgatgctgcagctgctgcaagatcagcacaaccgactggtaacacgttctcaacaacaaatgtgcggacaaaattccctttccttcttaagcattctctacgagaatatcagcacattggactggactggcttgttgctatgtatgaaaagaggctgaatggaattctagcagatgaaatgggtttggggaagacaattatgaccatctccttgctagcacaccttgcatgtgagaagggaatatggggtccacatcttattgtagtgccaactagtgttatgctaaattgggagactgaatttctcaaatggtgtcctgcgtttaaaatactgacatattttggaagtgcaaaagagagaaaacagaaacgtcaaggttggatgaaaccaaattacttccattcacatcaagagttcaaggactggttctgcaatccaatttcaggcatggtagagggccaagacaag

SEQ ID NO: 12921 - DNA, 3021 bp, Oryza sativa
  Clone ID: TFbOSC400288j.C1.o5.fg
atggggaaggagaggggaagggaggagcaggtggcgacggtgcgcgcggtgctcggcgatgggacgccggagatggacatcatccgcgcgctccacatggccggcgacgaccccaccagggccatcaacatcctcctcgactttccccacgggccgccgccgccgccgccgccgtcaccgtcgccgtcgccttcgcctccggcgggtaaacccaccaaaccccaccccgaatcgaccccgccaaccaaaacccctgcccgttcgaagccggcggcggcggcggcagagaaacctaggcccagtgtcgcgcccgaatccaccaatggcggcggcggcggcgaacattggtggttggtggggagcgtggagatggcggggctgtccacgtgcaagggccggcgcgttgcctccggggatgccgtcactttctcgttccccaactccccggtcgccgccgccgccgggggcaagagccgttccggccgccccgccctcgtttcctgctcctccgagatcatgcgcttctccaccccgcgccatggggaggtcggtcgaatccccaatgaatgggcgaggtgcctgctcccccttctcaaggaggggaagataaaaatcgatggcgtatgcaaatccgctcccgaagtacttagcatcatggacactgtcctcttgtccgtaagtgtctacatcaacagctcaatgtttcatggccaaaagcaatcgacacccaaggctgctcgggctgctaccgaggattccacgtttcatccgctgcctgcacttttcaagttaactggtctttcgccctttaagaaggcagcatttactccagaagatctctattccagaaagcgtccgcttgaaacaaagagcagtgcacctgccacaaagttgactactgagaagttgagattatcgtctgatggaaacgaagatgatcatgctgaaagaattgtttcagattcagaattggatgatataattggaatctcagacagttctgctttggaggaaagggacccccctgatgctctgcagtgtgatttacgcccttatcagaagcaggcattttattggatgatgcagcttgagaaaggcagttcttctcaggatgcagctacaacgctgcacccttgttgggaggcatataaactcgaggacaagtatggcttggttatattgtttgagccgtttctctattacaatgattttttgaaattaacattaggacgtttatactgcattcatttcaggagggagcttgttttatacttgaatgtattttcaggcgatgccaccactgaatttcctagtacactgcaacttgcaagaggagggattctggcagatgcaatgggactggggaagactattatgacaatagctcttcttcttgccgactctagcaaaggatgcatcactactcagcattctactcacatatgtgaagaagctagtggactgggtgaattgccagttcagcctcatgatgatgtgaagaagctagctatccctttctcttttagtaagcttaggaaacctaaaaccccgcttattgcaggcggcaatctaattgtctgcccaatgacactacttggtcagtggaaggcagaaattgaagctcatgctacaccaggttctgtaagtatatatgttcattatgggcaaaacagaccaaaagaagcaaaccttattggtcagagtgatattgtcctgactacatatggtgttctgtcatcggaattttcaaacgagaattcaacagaaagtgggggtctgtactctatacattggtttagagttgtgctggatgaagcacacatgataaaatctcccaaaagtttaatatccctcgctgctgctgctcttacggctgatcggcgttggtgtcttactggtacacctattcagaacaacttggaggatatatacagccttttccggtttttgagggttgaaccgtggaggaactggtctttaccaatccttattttacccccagcaaatatcgaagtcaaatactgtgatttgtcagagactgagaaggatttctatgatgctctgtttcgacgatctaagagcttcaatgttggcagtcgtggagatacacaggagtttgctgacctaaacaaacttgcaaagcgtttcttgcatggtggtaatggtgctgtgaatggtgactcttctcttccctccagagcttacattgaggaagttgtccaggaactgcagaaaggtgaaggggagtgtcccatatgcctggaagcctttgaggatgctgtattgactccctgtgctcaccgtttatgccgagaatgtctcttgtctagttggcggagtgcatcagcaggcctttgtcctgtctgtagaaagtctatgagcaagcaggatcttattactgctccaactgacaatcgttttcaaattgatgtcgagaagaactgggttgagtcttccaagatttctttccttctacaggagctagaagttcttcgcacttctggtgcaaagagcatcatttttagccagtggactgcatttctggatctcttacaaattccactttccagggcaacagaaaattttgttgttccaaatcatggatactatgaaaattcgtgtatcagtaccagacataatttctcatttgctagactggatggaaccttgaatcttcagcagagagagaaagtaatcaaggagttttctgaggacaaaagcattttggttctgcttatgtccctgaaagctggtggtgttggaataaacctaactgctgcatctaatgcatttgtcatggatccttggtggaatcctgctgttgaagaacaagctatcatgcggatccatcgaattggtcaaacaaagagtgtttccatcaaaagattcatcgtcaagggcactgtcgaggaacgaatggaggctgtgcaggctcgtaagcagcgaatgatttctggagctttgacagatcaggaagtacgcagcgcacgtatagaagaactgaagatgcttttctcctga

SEQ ID NO: 12922 - DNA, 2466 bp, Oryza sativa
  unsure (1)..(2466): unsure at all n locations
  Clone ID: TFbOSC400606j.C1.o2.fg
atggcctccacctcccgccgcggcggcggcgaggacaacnacgacgagccctacctcctgggcttcatcgtcgccaacgccgtcggcctccagtactaccagggcggccgagccatcacccgccgcgagagcgtcggcctcgtccgggagccccacaacccccacgacgccaacgccatccgcgtcgacaacgcccggggcgagaagatcggccacatcggccgccgcgccgccgccgccctcgccccgctcctcgacgccggccacgtcgccgccgcccacggcatcgtccccaagcccgcctccaagaggctctacagcctcccctgccaggtccacctcttcgcccgcccgccccacgccgccctcgtcgccgccgccctcgccgcctccgggatcgacctcatccacgtcgaccaccccgagttcgccctctccgagtccgccatcgtgcaggagcagcagaccaagaggtctcgcggggatgtcgataggctgttctctcatgtggggaagggagggagagctcggattgcgcccatggaggcgccgcgggatgtggtggtgtccgaactgttcgagcaccagaaggcggcgctggggtggctggtgcaccgtgaggagtcatgcgaccttccaccattctgggaggaagataatgatgggggatttaagaatgttcttacaaatcagaagacgaatgagagaccgccgccgttgaagggtgggattttcgctgatgatatggggctagggaagactctcacgctgttgtcgctgatcggaaggagtaaagctcgcaatgtaggtgggaagaaggctagaggggcgaaaaggaggaaggttgaggaggcggtggaggaggagtcaagaacaacgcttgtggtgtgcccgccatcggtgttctcatcttgggtgacacaactggaggagcacacgaaaaccggtagcttgaaggtgtatttgtaccatggagagcggacaaaagagaagaaagagctgttgaaatatgacattgtgattaccacttatagcaccttggggcaagaacttgagcaggagggctcaccggtaaaggaaattgaatggttccgtgtgattctggatgaggcccatgtgatcaagaactctgcagcacgccaaaccaaggcggtgattgctttgaacgcggagaggcggtgggtggtcacagggacgcccattcagaacagctcatttgatctttacccgctcatggcatttttgagattccaaccattctcaatcaagagctactggcagagcttgatccagctccccttagagagaaagaataacggaattgggttggcacgattgcagagcctcctaggtgctatttccctgcgcagaaccaaagagacagagagtggtagcaaaagcttggtcagcattccgcccaaaactgttttagcttgttatattgagctttctgcagaggaacgtgagtactatgaccagatggaattggaagggaaaaacaaactgcgggagtttggtgacagggattcgattttgcgtaattactcaactgtgctttatttcattctgaggctccgccagctctgcaatgacatagcactatgcccattagacctgaaatcatggcttcctggcagtggcagctcccttgaagatgtgtctaaaaacccagagctgttgaagaagctggcctcattggttgacgatggagatgacttcgaatgtccgatttgtctcgctccaccagccaaaaccgtcataacgagctgcacgcacatatactgccagacttgcatcatgaaaatcctcaagagctctagttcccgctgtccaatatgccggcgctcgctatgcaaagaagacctctttattgcgccagagattaaacatcccgatgaggattcctcagtcaatcttgatagacctctttcttccaaggtgcaagccttgctgaaactactgaggcgttcacagagcgaagaccctttgtcaaagtctgttattttctctcagttcaggaagatgctgatcttgcttgaagggccacttaaagcagcaggctttaacatactacgactcgacggctctatgacggcgaagaagaggtcagaggttatccgccaattcggatgcgttggccctgattctccgaccgtgctgctggccagcctgaaggctgcgggagccggcgtgaacctgaccgcggcatcaacggtgtacctcttcgacccttggtggaaccctggggtggaggagcaggccatggacagggtgcaccggatcgggcagaccaaggaggtgaaagtggtgaggctgatcgtgaaggatagcatcgaggagaggatgctggagctgcaggagaggaagaagaagctgattagcggcgcatttggtaggaagaaaggaggcaaggagcacaaggagatccgtgttgaagagctccagatgatgatgggaatgaaatga

SEQ ID NO: 12923 - DNA, 2571 bp, Oryza sativa
  Clone ID: TFbOSC401643j.C1.o6.fg
atgtcgctccacagcctcaaagaaaccctccagtcttcctccttttcacagccccaatccgagtcccaaccccgatcacctcctcctctcctcgccaggaggcccccaaaaacgtccctctcgcagcagctcctccgccttgatgcctcctcctcctcttcctccttttccgtctcgccgccaccgccccctcgcacttccccgacctcggatgcggcggcggatgatgcgccgccgctgccagaggaggaggacgaggtcccctgcatccgcccccgcgcttcccttccgccagcggcctccctcgactcccgcgggccctacgaaccgcttgctctctcgccgcccggagagcgccccgtcgtccaggtaccctcctcgataaattgcaggctacttgtgcatcagagggatggtgtaagattcttatacaatctgtatagaaacaaccatggcggtgtgcttggagatgacatgggtttgggaaagactatccaaacaattgctttcttatcagctgttattggaaaagataatgaccacggtgatcaattagtggaaggaagaaagattgcccctatactcatcctctgccccacatcagtaattcgaaactgggaaaatgaatttgcagagtgggcaagatgttctgttgctgtctatcatggcccaaatcgtgacctggttcttcaaaaggttgaaactcaaagactagagatagttattaccagttttgacacttttaggattcatggcaagattttgtgtggcatctcgtgggaccttgtggttgttgatgaggcacaccggctgaagaatgaaaaatcaaagttatatacagcttgcttggaaattactactcgaaagcggtttggtctcacaggaaccataatgcaaaataaaataatggaattatttaatctgtttgactggattgtacctggttgcttgggggatcgagaacactttcgagtatattatgacgagcctttaaaacatggccagaggttcagtgctcctgagagatttgtacaagttgctgataagcgcaagaagcaccttgtttcagttcttagcaaatttctgttgagaagaacaaaggaagagaccattgggcatctcatgcttggaaaggaggataatattgttttctgcagaatgagtgacgttcaaaagcgcgtttacagaagaatgctgcaacagcctgacgtgcaaatccttataaacaaggatctcccatgtagctgtggaagtcctttgactcaggtggaatgctgcaagagaactgaaccacatggcattatctggtcttatcttcacagagacaatccagagggttgttctctgtgccccttctgtcttgttcttccttgccttgggaagcttcagcagatcagtaaccatctggagctgataaagccaaacctgaaagacgaaattgagaagcagaagaaagatgctgagcttgcagctgctgtctttgacacagatattgaattagttggtggaggtgctaaaagtgaaaacttcatgggtctcagtgatgcagaacattgtggaaagatgcgtgcgttggaaagactattgtcattatggactctgcagggtgacaaaattcttcttttcagctattcagtcaggatgcttgacatactagagaaatttcttatacggaagggttactgcttttctcgctttgatggaacgactcccatgaatgcacgccaattactaattgatgagttcaatagatgcccaagcaaacaggttttccttatatctacacgggcaggaaatttaggtgtcaacctggtcagtgctaatcgtgtggtgatttttgacccaagttggaaccctgcgcaagacttgcaagcgcaagacaggtcatttcgatttggacagaggcggcatgtcactgtatttcgcctacttggtgctggttcccttgaagagcttatttattctcgacaaatatataagcaacagctttccaatattgcggtctctggaaaaatagaaaaacgttactttgaaggagtgcaggatgacaaaaaatttcaaggtgagctctttgggatatgcaatctgtttcgcgacttgtctgataagcttttcaccagtgagatcattgaaatgcatggagaacatgggaagggtaatacagctgaaacaataggaattcgagaaatagttgatacaaatatatttggtacgcaagatcaaatgaaatcctcaatgacagcaatacataacgagaacaagaatttgtaccattgtggaatagtttatgctcaccgaaatgaagatgttgtaaacacgaggacaaatgaagcaagcaactgtgcagaagataaaactgtcccaaggcacttagaggagctgcaaagtaagaagaatgaaacaatgcatacaattaaggcaaaatcttactcactggtgcagaaaaagaaggaattcagccgaattgcatctttcatgggtatgaacgaccttgagtttagtaagtggttgctgtctgtctcgcctttgcaacgacatgaagtattggaccgctacaggaatgcaaagtaa

SEQ ID NO: 12924 - DNA, 6991 bp, Oryza sativa
  Clone ID: TFbOSC18580j.C1.o1.fg
tgagaggaggcatgaaaagaagactgacgatggagaaaccaactcatctaggagtttaagtctctctgataacaacgatgaaaagaaaaaggacaaattctcaagtggtgatgagaaagaagaccacgaaaagcagctgaaacaaatacggctggatatggaggctttgcgtgacgataaaactcagatggaggtcattttggatgagaagatagatgaagtgcgcaagatctctagcaaagttaatgatcttgaggtgcagcttagaagggagaaagatgaatgccataggatgacctcaaagatgaagaagtttattaaagctcatgctcggtttttgaaggcacaagaagaagtgaaaaggtcacaagctcgtttcgagaggcttggtgatttgcttgcttcagatattttgaagcgtggtgctaatgaagaggggtccagtgtcaatgaagacctaaacgaaaggagtcctaatactgcagcaactaaaaagagatcaatcccatactcaacaagtgaagaagcgaaagctgtgaagaagagaagagagcgagactctgatacaatgactaggtcagataaatataggtcagatgttacagattttgataaaacaagtaaggggactgaggcaaccaagtctttatatttgaagaagaaattatgggaagatgaaaaaagcaaatattttgttaacttgcaggtcaaaggttctcccgtcagacatgttttgccctccactggcatggctgctcatgctattgatgatctcaacgaagctattgaactggaggacagacatgaatccatagacgcattactagaaaatgatgctgatgacaaaactagatcacctgctattcccctgcagccaccaccagtggtacagaatgcttatgagcagagcggcttcgaacatatatcatttgatatcccctttggtttatctatctattgtgcaaagtttcctttaacacaactagctggttccacgcaagcgacaaggttcgctgctgcacggcaaattggagaaattgccaagtcccacccccaggagctaaatgtcttactcaaaaaggatatctgcattatcattatattaagaaggaaaagggtttctccatatttacgtagtaagaattgggacacaagggtcgcagcagcccatgcgattggtgccatagcagagaacgtcaaacacacatcggtgaaagacttgttcgcatctgcagaagcagaaaaacatgcttctgggttgtctggaattggtgatgttgggtcaacgttgcggcatgctgatactactgcaacatctgagcttgcttttggaagcttcgatataaacagggtgttggaatttggatctcctttattggcatcaggtggacaggaatatgacattgcaaatgataacggcaaaaatccagcagagcgtttagctcgccaaaagcaaaatctccggcgtcgtttaggtctggatgtatgtgagcagttcatggatttcaatgatgttatcaaagacgaggaccttcttgcccaaaagaattattggggtgcaaatatgcaaaacaatggattctattcatttaatactggtcagaatattcagcacttggttgcatctatggttcccagtgcaattgcactggagcattctgttgggatggctttgtcttcaatctgtgatgatctaatcaccccacttacattttttcaggatacagttgatgcaatcacagatgaggacaatctggagtacagtgagaatgggagatggccttttcaacagtttgtagatcaacttattcatgacatgtttgaccctatttgggaagttcgccatggcaccattatggctttgagggaaattttgacgcatcaaggtgcttgtgctggagtatattttcctgatctgaactcacctttcgctgaccttgatgataaaaacaatttggactccctgaaaagagcacatggtattgatcttaatgaagacattgattcgggacagctcgagccagttttgaaaagacaaaagaaagaggagtctaatccagaggttatggacattcagttggataaggagccaagtaacggtgattattccaaaacagaggcaagtctgagtactgagcctactgtatctagtggtgaaccaaatcttgctcatgcaaaggttgaatcacccttccaggttgatggttcagctaacccatctaaggtggatccatattgtacaccacctcacgaaacactcaactccatgcccaaactgagttctacccatctccctgaaaattcaaaatttataaagctgatgaaactagcgaactactcagcggtaaaaaattgggaatttcttcaagactgtgcaattcgtttcctttgtgtactttcattggaccgctttggtgattatgtatctgatcaagtggttgctcctgttcgtgaaacttgtgctcaagctcttggtgcagttctgaagtacatgcatccgactctagtatgccatacactgaatattttgctgcaaatgcagcgcaggcaggagtgggaagttcgtcatgggagtctccttggaattaagtatttagttgctgttcgtcaggaaatgcttaaagacttgcttaattatgttcttcatgcctgtaaagctggtctggaggatccagatgatgatgtccgggctgtggctgcagaggctctgatcccagctgctgcttctttagttagactaaatgatcaaatgctacattcaattgtgatgttgctttgggatatattgcttgaccttgatgatctaagcccttctacaagcagtgtgatgaatttgttagctgagatatattctcaaccagagatggttccaaagatgcttggcacaacagccataggtggagacaacgaatttgatctaaacagtgtaactctggttgccggtgaagaaaaaatgggttctaatgataatccttatgtcttagccgctctgacaccccgattgtggccttttatgagacatagtattacatcagtccggcgttctgctgtacgaacattggagaggcttctcgaggttgggaacaccaggaattcagctaaactatggcttgcatctatattaggtgatgcgctgcaagttgtcttccagaatcttcttttggagtcaaatgatgagattattcgatcttctgaaagggcttggaaacttttacttcagtgccctacggaggaccttgagtctgctgcaagttcatattttagtaattgggtgcaacttgccactactccatatggcacagcattggattctgcaaaaatgtttttgccagttgcacttccacgaggaagtcgttcaagagctgctgcaaagatcaaatctgcaaggttagaacatgaaaatacgagaatgatatcttttggttctaccggagagaacacttcacaggaaaagcattctgaagcttccttgagtgtttcaaaaataattgtggggtctgattcggacaaatctgttactcatacgcgagtgctgacgtcaatggcccttggtctgtttgcctctaagttgccagaggggtcgtggcaagttgttcttggtccactagcaagcgatctcatgtctctctcaggagtccagagacaggtggcttctatggttattgtttcttggtttaaagacctcagaaaaagtgatcctgctgcggtgggtacattgctagctttcttatcctccctgaaagggtggatgttggacttactggcttgctctgacccttcatttcctacaaaagattctccgcttccatatgctgagcttgcaagaacatacaggaagatgcgcaatgaagccaataatttgttccagtcaatagaatcttgtgctcttcttaaagagtatacaagcaacttaaactttgaagctgacatgctgagtgttgatgatgctattaacttcacttcaaagcttttgttaccatctgaacctgattttagtttggacagtgataaaattgtcttgaacaatatagagtcagcaaaacaaggtctattgtctacgtcaggctacttgaaatgtgttcagaataatttgcatgtgacagtttcctctttagtggcctctgctgtagtctggatggcagggctgcctagtaagttgaacccagtcattttgcctttaatggctgctgtaaaaagggaacaggaggaaatacttcaggacaaagctgcagatgcacttgctgagctcatttttagttgtgttggccgcaaacctggcccaaacgacaaactaacaaagaacctctgcacgttaacatgcactgatgcaagtgagacacctcaagctgcagttataaactcaattcaggttattgaggaccaaaacttgctgtcgattggtaagcgttttagcaatcacaaatccaggggccagatgacttccggtggtgaatcgaagtcggagggttttataagccggcgtggatcggagttggcttttaagcatctttgtgagaaatttggagcatccttatttgaaaagcttcccaagttatgggattgccttacggagtttcttaaacccgtcaagactggagatgatcttatgaaagaagatccaagtattgcgcagttaggaagatcttgtgaggacaaggaaccgcagtcccttataaataatatccaggttgttcgttcggttacacctcatttggctgagcccttgaggcctcaattgctaagtctccttccctgtattcttggttgtgtgcgccatcctcatgtcgctgtcaggttagctgctgcaaggtgcatcacatcaatggcaaaatcattgactgctaatgtaatggtaattgtgatagaaaatgtcataccgatgttgtcagattcatcttctgtctgtgcaaggcaaggagctgggatgcttttgagccttcttgttcagggtttggctgtggagttggttccttatgctcctttccttgttgttcctcttctaaggtgtatgagtgatcctgatggttctgttagacagactgtaactcacagttttgctgctctggttcctttgttgccattagcaaaaggttctttgttaccggatggactgagtgaacgcttatctagcagtgcagaagatgcgcagtttctagagcagctcctcgacaactcccaaattgatgattacaagctcagcattgatctcagtgttgaactgcgaaggtaccagcaagaaggaattaactggctagcattccttagacggttcaagttacatggaattttatgtgatgacatgggtcttggcaaaacactccaggcgtctgctattgtagcagctgatattgctgagtcacgtgcacggaatgatgagcaagatccgaaatctttgattatctgcccttctacattagtagcacactgggaatatgaaatagagaagtacatagacagctctatcatgaaacctcttcagtacatcggttcatcacaagataggattatcctccgttctcagtttgataagttcaacgtaatcataacgtcatatgatattatacgcaaggatattgattttcttgagaatgtcttttggaactattgtgtgctggatgaggggcacataataaagaactcaagatctaaaataacatctgctgtgaaacaattgaaagcacaacaccgtcttatcctcagcggtactccaattcagaataatgtattggagctctggtctctatttgactttcttatgcctggatttcttgggacagaaaaacagttccaagctacatatggaaaaccattgctagcagcaaaagatccaaaatgttcagcaaaggatgctgaagctggcattcttgctatggaggcactgcataaacaggtcatgccgtttctacttagaagaacaaaggatgaagttttatctgatcttcctgagaagattatccaggatagatattgcaatctcagtctattgcagctcaaactttatgacaaattctccaactccaatgccaaacaagagatttccactatagtaaaagaaaatgaattagatcaatccacttctcaaccaaaggcaactcgtcatgtgtttcaggcactgcaatatctattaaaactttgtagccatcctttacttgtaactggggaaagcccacctgattatcttgtggaccttctaaaggaaatcggtatgggaactggtgatgagcttcatgacctacaccattcccctaaacttgttgctctccaagagatacttcaggagtgtggtatagggtcagaaatatcaagccctgatgcttctgcagctattgggcaacacagagttttgatttttgctcaacacaaggctttgcttgacattattgagaaggacctgtttcaatcccatatgagaagcgttacatatttacggttggacggctctgttgaaccagagaagcgatttgaaattgtgaaggcattcaactcagatccaaccattgatgtgctcctattaacaactcatgtcggtgggcttggattgaatttgacatctgctgacacattggtctttatggaacatgattggaacccaatgaaggatcttcaggcaatggacagagcacaccgtctgggtcaaaggaaagtggtaaacgtgcaccgtctcatcatgcgcggtaccctggaagagaaggtgatgagtcttcaaaggttcaaggtgtcggtggccaatgcggtcatcaatgctgagaacgccagcctgaagacaatgaacactgaccaactgcttgatctgtttgcttcgacgcctgcttccagaaaagcgtctgtactcccaagcagttcgggtggtgatcagagtaaagattccaaggggaaatctggtgggaagggtttgaagtccattctgaatggtctggacgagctatgggatcagtctcagtatgcagacgagtacgatctcaaccagttcttggcgaagctcaacggctga

SEQ ID NO: 12925 - DNA, 7449 bp, Oryza sativa
  Clone ID: TFbOSC400740j.C1.o2.fg
atgctgggccctcctcgccgcgggccggcgtacaagacgaagctgtgcgcgctgtggcagcgcggcaactgcaaccgcgacacctgcagcttcgcccacggccacggcgacatccgccgcccgccgtcctcccgcggcgccttcacgcaccacccggactctgcagatatgttgactcaactgctgccagaggatagcatgacctttttcataaattcttcacttggtatttcgacgatttgtgttgacgataatgcttgtgctgtaccagaaggtgaacttggagaagagattatagagccggtgatttcagaggcaggattgataggaggttttcacctcggaggaggcattcccctggaagagagtccaggggtcatcgtcccctttatgatagaaggccatcttctcgagaaagagattctagctattcacgatctcctagcaggaagagaatgtgagaggaggcatgaaaagaagactgacgatggagaaaccaactcatctaggagtttaagtctctctgataacaacgatgaaaagaaaaaggacaaattctcaagtggtgatgagaaagaagaccacgaaaagcagctgaaacaaatacggctggatatggaggctttgcgtgacgataaaactcagatggaggtcattttggatgagaagatagatgaagtgcgcaagatctctagcaaagttaatgatcttgaggtgcagcttagaagggagaaagatgaatgccataggatgacctcaaagatgaagaagtttattaaagctcatgctcggtttttgaaggcacaagaagaagtgaaaaggtcacaagctcgtttcgagaggcttggtgatttgcttgcttcagatattttgaagcgtggtgctaatgaagaggggtccagtgtcaatgaagacctaaacgaaaggagtcctaatactgcagcaactaaaaagagatcaatcccatactcaacaagtgaagaagcgaaagctgtgaagaagagaagagagcgagactctgatacaatgactaggtcagataaatataggtcagatgttacagattttgataaaacaagtaaggggactgaggcaaccaagtctttatatttgaagaagaaattatgggaagatgaaaaaagcaaatattttgttaacttgcaggtcaaaggttctcccgtcagacatgttttgccctccactggcatggctgctcatgctattgatgatctcaacgaagctattgaactggaggacagacatgaatccatagacgcattactagaaaatgatgctgatgacaaaactagatcacctgctattcccctgcagccaccaccagtggtacagaatgcttatgagcagagcggcttcgaacatatatcatttgatatcccctttggtttatctatctattgtgcaaagtttcctttaacacaactagctggttccacgcaagcgacaaggttcgctgctgcacggcaaattggagaaattgccaagtcccacccccaggagctaaatgtcttactcaaaaaggatatctgcattatcattatattaagaaggaaaagggtttctccatatttacgtagtaagaattgggacacaagggtcgcagcagcccatgcgattggtgccatagcagagaacgtcaaacacacatcggtgaaagacttgttcgcatctgcagaagcagaaaaacatgcttctgggttgtctggaattggtgatgttgggtcaacgttgcggcatgctgatactactgcaacatctgagcttgcttttggaagcttcgatataaacagggtgttggaatttggatctcctttattggcatcaggtggacaggaatatgacattgcaaatgataacggcaaaaatccagcagagcgtttagctcgccaaaagcaaaatctccggcgtcgtttaggtctggatgtatgtgagcagttcatggatttcaatgatgttatcaaagacgaggaccttcttgcccaaaagaattattggggtgcaaatatgcaaaacaatggattctattcatttaatactggtcagaatattcagcacttggttgcatctatggttcccagtgcaattgcactggagcattctgttgggatggctttgtcttcaatctgtgatgatctaatcaccccacttacattttttcaggatacagttgatgcaatcacagatgaggacaatctggagtacagtgagaatgggagatggccttttcaacagtttgtagatcaacttattcatgacatgtttgaccctatttgggaagttcgccatggcaccattatggctttgagggaaattttgacgcatcaaggtgcttgtgctggagtatattttcctgatctgaactcacctttcgctgaccttgatgataaaaacaatttggactccctgaaaagagcacatggtattgatcttaatgaagacattgattcgggacagctcgagccagttttgaaaagacaaaagaaagaggagtctaatccagaggttatggacattcagttggataaggagccaagtaacggtgattattccaaaacagaggcaagtctgagtactgagcctactgtatctagtggtgaaccaaatcttgctcatgcaaaggttgaatcacccttccaggttgatggttcagctaacccatctaaggtggatccatattgtacaccacctcacgaaacactcaactccatgcccaaactgagttctacccatctccctgaaaattcaaaatttataaagctgatgaaactagcgaactactcagcggtaaaaaattgggaatttcttcaagactgtgcaattcgtttcctttgtgtactttcattggaccgctttggtgattatgtatctgatcaagtggttgctcctgttcgtgaaacttgtgctcaagctcttggtgcagttctgaagtacatgcatccgactctagtatgccatacactgaatattttgctgcaaatgcagcgcaggcaggagtgggaagttcgtcatgggagtctccttggaattaagtatttagttgctgttcgtcaggaaatgcttaaagacttgcttaattatgttcttcatgcctgtaaagctggtctggaggatccagatgatgatgtccgggctgtggctgcagaggctctgatcccagctgctgcttctttagttagactaaatgatcaaatgctacattcaattgtgatgttgctttgggatatattgcttgaccttgatgatctaagcccttctacaagcagtgtgatgaatttgttagctgagatatattctcaaccagagatggttccaaagatgcttggcacaacagccataggtggagacaacgaatttgatctaaacagtgtaactctggttgccggtgaagaaaaaatgggttctaatgataatccttatgtcttagccgctctgacaccccgattgtggccttttatgagacatagtattacatcagtccggcgttctgctgtacgaacattggagaggcttctcgaggttgggaacaccaggaattcagctaaactatggcttgcatctatattaggtgatgcgctgcaagttgtcttccagaatcttcttttggagtcaaatgatgagattattcgatcttctgaaagggcttggaaacttttacttcagtgccctacggaggaccttgagtctgctgcaagttcatattttagtaattgggtgcaacttgccactactccatatggcacagcattggattctgcaaaaatgtttttgccagttgcacttccacgaggaagtcgttcaagagctgctgcaaagatcaaatctgcaaggttagaacatgaaaatacgagaatgatatcttttggttctaccggagagaacacttcacaggaaaagcattctgaagcttccttgagtgtttcaaaaataattgtggggtctgattcggacaaatctgttactcatacgcgagtgctgacgtcaatggcccttggtctgtttgcctctaagttgccagaggggtcgtggcaagttgttcttggtccactagcaagcgatctcatgtctctctcaggagtccagagacaggtggcttctatggttattgtttcttggtttaaagacctcagaaaaagtgatcctgctgcggtgggtacattgctagctttcttatcctccctgaaagggtggatgttggacttactggcttgctctgacccttcatttcctacaaaagattctccgcttccatatgctgagcttgcaagaacatacaggaagatgcgcaatgaagccaataatttgttccagtcaatagaatcttgtgctcttcttaaagagtatacaagcaacttaaactttgaagctgacatgctgagtgttgatgatgctattaacttcacttcaaagcttttgttaccatctgaacctgattttagtttggacagtgataaaattgtcttgaacaatatagagtcagcaaaacaaggtctattgtctacgtcaggctacttgaaatgtgttcagaataatttgcatgtgacagtttcctctttagtggcctctgctgtagtctggatggcagggctgcctagtaagttgaacccagtcattttgcctttaatggctgctgtaaaaagggaacaggaggaaatacttcaggacaaagctgcagatgcacttgctgagctcatttttagttgtgttggccgcaaacctggcccaaacgacaaactaacaaagaacctctgcacgttaacatgcactgatgcaagtgagacacctcaagctgcagttataaactcaattcaggttattgaggaccaaaacttgctgtcgattggtaagcgttttagcaatcacaaatccaggggccagatgacttccggtggtgaatcgaagtcggagggttttataagccggcgtggatcggagttggcttttaagcatctttgtgagaaatttggagcatccttatttgaaaagcttcccaagttatgggattgccttacggagtttcttaaacccgtcaagactggagatgatcttatgaaagaagatccaagtattgcgcagttaggaagatcttgtgaggacaaggaaccgcagtcccttataaataatatccaggttgttcgttcggttacacctcatttggctgagcccttgaggcctcaattgctaagtctccttccctgtattcttggttgtgtgcgccatcctcatgtcgctgtcaggttagctgctgcaaggtgcatcacatcaatggcaaaatcattgactgctaatgtaatggtaattgtgatagaaaatgtcataccgatgttgtcagattcatcttctgtctgtgcaaggcaaggagctgggatgcttttgagccttcttgttcagggtttggctgtggagttggttccttatgctcctttccttgttgttcctcttctaaggtgtatgagtgatcctgatggttctgttagacagactgtaactcacagttttgctgctctggttcctttgttgccattagcaaaaggttctttgttaccggatggactgagtgaacgcttatctagcagtgcagaagatgcgcagtttctagagcagctcctcgacaactcccaaattgatgattacaagctcagcattgatctcagtgttgaactgcgaaggtaccagcaagaaggaattaactggctagcattccttagacggttcaagttacatggaattttatgtgatgacatgggtcttggcaaaacactccaggcgtctgctattgtagcagctgatattgctgagtcacgtgcacggaatgatgagcaagatccgaaatctttgattatctgcccttctacattagtagcacactgggaatatgaaatagagaagtacatagacagctctatcatgaaacctcttcagtacatcggttcatcacaagataggattatcctccgttctcagtttgataagttcaacgtaatcataacgtcatatgatattatacgcaaggatattgattttcttgagaatgtcttttggaactattgtgtgctggatgaggggcacataataaagaactcaagatctaaaataacatctgctgtgaaacaattgaaagcacaacaccgtcttatcctcagcggtactccaattcagaataatgtattggagctctggtctctatttgactttcttatgcctggatttcttgggacagaaaaacagttccaagctacatatggaaaaccattgctagcagcaaaagatccaaaatgttcagcaaaggatgctgaagctggcattcttgctatggaggcactgcataaacaggtcatgccgtttctacttagaagaacaaaggatgaagttttatctgatcttcctgagaagattatccaggatagatattgcaatctcagtctattgcagctcaaactttatgacaaattctccaactccaatgccaaacaagagatttccactatagtaaaagaaaatgaattagatcaatccacttctcaaccaaaggcaactcgtcatgtgtttcaggcactgcaatatctattaaaactttgtagccatcctttacttgtaactggggaaagcccacctgattatcttgtggaccttctaaaggaaatcggtatgggaactggtgatgagcttcatgacctacaccattcccctaaacttgttgctctccaagagatacttcaggagtgtggtatagggtcagaaatatcaagccctgatgcttctgcagctattgggcaacacagagttttgatttttgctcaacacaaggctttgcttgacattattgagaaggacctgtttcaatcccatatgagaagcgttacatatttacggttggacggctctgttgaaccagagaagcgatttgaaattgtgaaggcattcaactcagatccaaccattgatgtgctcctattaacaactcatgtcggtgggcttggattgaatttgacatctgctgacacattggtctttatggaacatgattggaacccaatgaaggatcttcaggcaatggacagagcacaccgtctgggtcaaaggaaagtggtaaacgtgcaccgtctcatcatgcgcggtaccctggaagagaaggtgatgagtcttcaaaggttcaaggtgtcggtggccaatgcggtcatcaatgctgagaacgccagcctgaagacaatgaacactgaccaactgcttgatctgtttgcttcgacgcctgcttccagaaaagcgtctgtactcccaagcagttcgggtggtgatcagagtaaagattccaaggggaaatctggtgggaagggtttgaagtccattctgaatggtctggacgagctatgggatcagtctcagtatgcagacgagtacgatctcaaccagttcttggcgaagctcaacggctga

SEQ ID NO: 12926 - DNA, 4029 bp, Oryza sativa
  Clone ID: TFbOSC401858j.C1.o30.fg
atggcgatggcgcgatccatcctcctcctcctcctcctcgccgccgccgcctccgcctccgccgacgcgcccttcctcgtcgcgcacaagaaggtttcgctctcccgccccaagcctggcgtcgagcgcctcgccgtctccctcgacctctacaaccagggatccgcaactgcctatgatgtgagcattaatgatgatacttggccaaaggaggcatttgagcttgtctctggagagatgtcaaagacattggaaaggcttgaccctggtgtcactgcttcgcatgcatttgtcttggagaccaaagtacagggcaggtttcaaggttcacctgcggttattacctatcgtgttcccacaaaggctgcgcttcaggaggcctattcaacccccatccttgcacttgatgttcttgctgagaggcctccagaaaagaagtttgaatgggctaaggtgactagctccatggaggacgatgacgatgaccaacgcttgcttcacagccttggtgtcacgtccgcagacatccacgatattgaaaggagaatcatatcacaggcaacaactgatcctgccgactcatctggaccaaccatcaatggaggtcatcagcctgatgatgctctcgccaaactgcatcacaaactgcgctctgtgcaaattgaaattgatgctgtagcctccaccatcaaaggagctaagcttaagcaaccatccggaaataaaccacatgagcataaaggcaaggaccagccagatcatcatggagcaggacacctccagcaagcccttgctgccgaccgtcttacaagcctcaggaaagctaaagcacagatacagaaagagatactacagtcacatccttctccatctgcctccaatcgaaaagataaaatgctggccatgctggtccaagacgagccgaggcacaaaaagccacccgtagggcctaaaaacatcgtgaaacgcccgatgaaaactgtcacctatgatgatgacaacaacttcgatgcagtgcttgatggagcctctgcgggatttatggaaactgaaagggaagaactgatcaggaagggtttgttgacaccattccataagttgaagggcttcgagaaacgtgtggaactacccgaaccttctcatagacaagatgattctgcaggacaaactgaagaagccatggaagcttccaggattgctagagttgctcagtcgctaaagcagattgcacagaaccgcccagcaaccaaattgcttgattcagagtctttacctaagctagatgcacctgctgccccatttcagagacttggaaaacccctaaagcgtcctgtctctcccagttcagatgagcaggaaaagaagagaccaagaaataagaccaaaagaccactgcctggcaagaaatggaggaaagcaaactcaattaaggaatcatcattggatgacaacgatgttggagaggcagctgtgtcagtttcagatgatgatgaagatcaagttacagaaggctctgatgagttaactgatgttacccttgaaggaggtttgagaattcctggcacactttacacgcaactatttgactaccagaaagtgggagtgcagtggctatgggagttgcattgtcaaagggctggtggaataattggagatgaaatgggcctgggaaagactgtgcaggtcttgtcatttcttggttccttgcataacagtgggctctacaagcctagcattgttgtttgtcctgtaacccttttgcaacagtggcgaagggaggccagtagatggtatccaaagttcaaggttgagatcttacatgactctgcaaacagttcatctaaaaagagcaagaggtctagtgattctgacagtgaagcttcctgggatagtgatcaggaagaagcggttacatgttcaaaacctgcaaagaagtgggatgacttgatttcacgtgttgtgagttcaggatcaggtttgcttctgaccacatatgagcagttaaggatcctaggggagaagttgcttgatatagaatggggatatgctgtattggatgagggtcaccgcattaggaatcctaatgctgagattactcttgtgtgcaagcaattgcagaccgtgcacaggataattatgacaggtgcacctattcaaaacaaactttcggagctttggtctctctttgattttgtgttccctggaaaactaggtgtcctgcctgtgtttgaggctgagttttctgttccaattactgttggtgggtacgctaatgcaacaccattgcaagtgtccacggcgtatcgatgtgctgttgtcctacgtgacctggtcatgccgtaccttcttagaagaatgaaagctgatgtcaatgcacagcttcccaagaaaacagagcatgttcttttctgtagtctaactactgagcaacgtgctacttatcgtgcatttcttgctagttcggaggtggaacaaatctttgatggtaacagaaattccctttatgggatagatgttctaaggaagatatgcaatcatcctgatctacttgagagagaacatgctgctcagaatcctgactatgggaatcctgaaagaagtggaaagatgaaagtggttgagcaagttcttaaagtatggaaagaacaaggtcatcgtgttcttcttttcactcagacacaacaaatgcttgacattatggagaacttcttgacagcttgcgaataccaataccgaagaatggatggacttacacctgcaaagcaaagaatggcacttattgatgaattcaataacacagatgaaatttttattttcattctgaccacgaaagttggtggactgggtacgaatttgactggtgcaaaccggattattatatatgatcctgactggaatccttcaactgacatgcaggctagggaacgtgcatggcgaattgggcaaactagagatgtgacagtttatagactgatcacgcgtgggacaatagaggagaaagtctaccatcgtcagatatacaagcatttcctcacaaacaaagtactgaaagaccctcagcagaggcggttttttaaagccagagacatgaaggatttgtttacgctgcaagatgatgacaataatggctcaactgaaacatcaaatattttcagccaattgtctgaggatgtgaatatcggagttccgagtgacaagcaacaagaccagctatatgcagcctctgctacaccgacaacctctgggactgaaccgagctcatccaggcatggacagggtaaagaagaccattgccctgaccaagcagatgaagaatgcaacattttgaagagcctttttgatgctcaaggcattcatagtgcgatcaatcatgatgccataatgaacgctaatgatgaccagaagctgcgcctagaagcagaagctacacaggtggcacaaagggcagctgaagctttacgccaatcacggatgctcagaagtcatgaaagtttttctgttcctacatggactggaagagctggtgctgcgggggcaccatcctctgtccgcaggaagtttgggtcaacactcaatacccagttggttaattcttctcagccatcagaaacttcaaatggcaggggccaaagtcttcaggtgggtgctctaaatggcaaagcactgtcctccgctgagcttctggccaggatacgtggaacccgagagggagcagcttcagatgcactagaacatcaactcaacctgggatcagcttccaatcacacatcgagttcatcagggaatggccgtgcatcaagctcttctactaggagcatgatcgtacagcctgaagtcctaatccgccaattgtgcaccttcatacagcagcatggtggttccgccagctcaacaagtataactgaacacttcaagaaccggatactgtccaaggatatgctgctgtttaagaatctgctgaaggaaatagctacgttgcaaagaggtgcaaatggtgcaacgtgggtgctgaaacctgactaccagtaa

SEQ ID NO: 12927 - DNA, 5004 bp, Oryza sativa
  Clone ID: TFbOSC8410j.C1.o2.fg
atggcgtcccctccgcccttcgacatctgcggcgacctggacgacgaccccacccctcctgcgccgacgccgctcgccgctccgacacccaacggcctcaacgatcgcctcctccgcctcacccgcacgcaccaacggggcccctcccaaaacccaaaccctaaccctaaccctaaccctaaaccccctccgccgccgcctcctcaagagcccgaacccgccaaggtcaagctggccggccgccgccgcctctgcaagctctctaccgccggcgatgagtccgccggagacgacgacagcatccgcgacatactggacgatctcaccacccgcctcgactccctgtcagtcgacaggcccaccgcaaggcccagaccccacgtgtccccacttccctgcgccctccatgccgaccccgacccctctcagtctcagcttaatgatgggaccaaaccctcttcatcctttgtggactgtgatgacgacgacgatgatgcgggaggtgcctacggtggttttggtgttaaagaggaggtcaccaggaaggtgttcaaggcctcttcttcttttgggggccgcggcaacgatgataagatgaaagccaaaggagcttatgcctttgatacggtgtcaaggaaaaccacaaccgaatccaaggcctcaaaattttttggggactatgacgatgaagacgacatcgaccaagatgcagagaatgggaaggaaaaccatgctgatgatgttggttgggagaagacagaggacttcaagatggagcccactgggacaggtgtaacgcgcaagccctacaatctcccaggaaggatattcaacatgctttacccccaccagcgtgagggtctcaggtggctttgggttctgcattgtaggggaactggagggatccttggagatgacatgggccttggcaagaccatgcaggtttctgcattcctggctggattgttccattcccgtttaatcaagagagtgttagttgtagctccaaagacgcttctgactcattggaccaaggaactttcagttgtgagcctcaaagataagatcagagactactctggtcccaatgcaaatgctcgcaactatgagcttaaatatgccttcaaggagggtggaatccttttaacaacatatgacattgttcgaaacaatttcaagatgataaaaggcaacttcaccaatgattttgatgacgaggaagaaacattatggaactatgttattcttgatgaggggcatattatcaagaatccaaagactcagagggctcaaagtctatttgaaataccctgtgcacatcgtattgtcatcagtggaacacccatacaaaataacttgaaggttcaaagcaaggaattaagagaacggataaagccatactttttgcgacgcatgaagaatgaagtgtttcttgatagcggcacgggagaagataaaaagcttgctaagaagaatgagctaattatctggctgaaattaacatcttgccagaggcaattatatgaagcttttcttaacagtgaactagttcattcatcaatgcaagggtcacccttggccgcaatcacgatattgaagaaaatatgtgatcatccgctgttgttgactaagaaagctgctgagggtgttttggaaggcatggatgcgatgttaaataatcaagaaatgggaatggttgagaaaatggccatgaaccttgcagatatggctcatgatgatgatgacgttgaattgcaagttggtcaggatgtctcgtgcaagttatcttttatgatgtccttgctccaaaatcttgttagcgagggacacaacgtcttaatcttctcgcaaactcgtaaaatgctaaacattattcaggaggctataatattagaaggctataagtttttgcgcattgatggtaccaccaagatttctgagagggaaaggattgtgaaggacttccaagagggtcctggagctccaatatttttgctgaccacacaagttggtgggcttggacttacactcaccaaggcagctcgtgtcatagtagttgatcctgcttggaatccaagtacggacaatcaaagtgttgatcgtgcttatcgaattgggcagatgaaagatgtcatcgtataccgccttatgacatctggaaccatcgaagaaaagatatacaaattgcaggtcttcaagggggctctgtttaggacagctacagagcacaaagaacaaactcgttatttcagcaagagggatattcaagagcttttcagtctgcctgagcaaggttttgatgtttcgctgacacaaaagcaattgcaagaagagcatggacaacaacttgtgatggacgactccttgaggaagcatatacaattcctggagcaacaaggcatagcgggcgtgagccatcacagccttctgttttctaagacagcaatcttacctacactgaatgataatgatggtttggacagcagtcgtcgagctatgccaatggccaagcactactacaagggagcctcatctgactatgttgccaatggtgctgcctatgcgatgaagccaaaagagttcattgctcgaacatactccccgaacagcacaagcacagaaagtcctgaggaaatcaaggccaaaatcaaccggctttcgcaaacccttgcaaacacggtgcttgtggcgaagctaccagatcgtggagacaagataaggaggcagataaatgagctggacgaaaagctgaccgtgatcgagtcttctccggagccattggagaggaagggtccaacggaagcccgaactttaaaggattgggaaagtttgaaagcgaaggaagaagaggcgggcgggcgggcgcggggtgaaggcaggaagggatctgaattaaactcaactccgttccgtttaaactcaactagtagtacccttgttgtctttaaagttccttccactttcaccaccggccgcggagccctcgccgccgccgccgccaacggccgattcgttccaatggccccgacttcccaacctcaacctcaacaggaggtggaggtggaggtagatgaggatgaggagctagtcaacatggtggtggaagccggcgtcggcgccatcaagatgaagatgaagatcccccgccgcgtattggggtcgctctacccgcaccagcgcgacggcctcgcctggctctgggcgctgcactgcaccgccaccggagggatcctcgccgatgacatgggactcggcaagaccatccaggagggtggcattctactaacatcctaccacatcgtccggaataattacatgttactaagaggcaatggcaacggtaacaatgttgacaacaacgaagaagaaccactgtgggactatgttattcttgacgagggccacattgtcaagaatacaaagacgcaaagggcacagagcttgtttcaaataccttctgctcatcgcattgtactcactggaacacctattcaaaataaattaaagatgtcctggttcgaacttaggtacgagaagccaattctttgtggaaatgacaagaatgctactgatcaagagaagcaaatggcttcaaatgcagcaaaaaggcgattgtatgaagccttcctgaataaagatccagttcgttcacaaactggagcattgaagggttcatccttggaagctagcacgattttgaggaaaatatgcgatcaccctctacttttgactaaaagagatactgatgatttcctggaagaaatgggtgccatgctgaataaccgagatatgtgcatggtggaaaggattcttgaagataacctttatgctgacaaaagactacagattgtccaaggcgcctcctgcaagatagcttttatccttcccttactgaggaaccttgttgaagagggccactatgttttgatattttcacagacacgtgtaatgcttaaccttattcaggatgctgtatctatcgagggccataagttcctgcgtattgatggtaccaccaagatatctgagaggaagaagattctgaaggactttcaagaggggcttgacagtccaatattgttgttgacctcacatgttggtggacttggcaatacactcaccaaggcagatcgggttatagtagttgatcctgcttggaatccaagcatagataaccaaagtgtcgaccgtgcttatcgaattgggcagactaaagatgtgattgtatatcgtttggtaacttgtgggaccattgaggagaagatttacaagcaacagatcttcaagggaggtctttttaggacagctacagaatgcaaagaacaaccgcaattttataaccaggatctttaccttcagaatgaacaagagtactctagtttgccgccacatgggtttgacgcctctctcacccaacacaaaatgcaagtggagaatggtcagcagcttgtcatggatgagtccttgaagaagcacatccagttcttggaacaacaaggtatagctggcgtgaaccgtcatggcgtcctgttctgtaaaactgagaccactgcaactttgggtgacgacggtgcaataaacaggaaggtgagagacattatggtgaggcgctgctatgctccttgggagcacatttgtagagatgtcgagaaaaagagcttgatcgatcaagtgaaggagatgagcaagaagatggatggtttgggagatacaatgggacggattgttgctttggaggaggagtatgcagccgagctcattggaatgctccatgaaaacaggtgggagagaagccatctggagaagataaggatgcagatcgacgatctgcatgaggaacacatggcaaagtttgatgaaatgctggaaaggatcaagaggatggagctggctgatgagggtgagttgatagccaagtttggtgaaatggtggagaggatgaggcagagatgcgacatggatagattgagcctgccgcttctgtcttctacccttgtagcgtag

SEQ ID NO: 12928 - DNA, 4317 bp, Oryza sativa
  Clone ID: TFbOSC102263j.C1.o2.fg
atgccccgccggaaggggaaggggaagggggtcgaggacgaggtcgaggtgtacgagccggcgtcccccccggagcgcgtgctcatcatcctcgacagcagcgaggacgatctcgacctgcaggaggtgcgccgctcgctgatgatcacgggccgggggcgcgcgcgggcggcggagcgcgtgggggaggaggctccgcggggttctgggcggcgcgcggcgccggtggttgctagccggcggagacggagacggtcgcggtcgcggtcgcggagcccccgcgccgcccgcccgcgcgcggagtcctcgcggcggcctacggcccgccgtgcccgtgcccgtgcacgtagcccctcgctagagatcatcgacgtcgacagcgggagcgacaggggcgtggtgcgcgtcaaggaggagccgcgttccggaagcgactcggactacaatggtgcgagaggtcgtgcgcgtgcgcgggcgcgggcgccggtcgccgccaccgccgcgaagaagaagaagaggaaacgaggaaaggaagctccaagcagagcccaggagagccgggaggttgtccgcgtcaaggaggagccgaattccgacggtaatggtgcgggaggtcgtgcgcgtgcgcgctcgccggtcgccgccgccgcgaagcagaggaagcgaggaggaagagaagccccaagcagagcccaggagagccgtgtgcccgttcaaatcaaggaggagccgtattccgggagcgattccgacggcaatgtggccggtggccgtgcggtcgtgccggccgccgacgcgaagcaggggaaacggggaaagaaaaccccaagcagaggcaaagggcggcgggtggttgttcgcgagacttccacacccgctgctccgtccaatggtgctccctccgtcggcaggggaaaaggtagagggcctgggagaggtcgccagagaagcaagggcgctgttcgtggtcgcgctactccggtgaaccgggtgagcacgggtgttggttcgagaactcggtcacgcttggcagagcaggggagagcttttgcacaagaggaagaagaacaagtggaggaacgagaggaggaggaggaagaagaagagcaggggagagcttttgcacaagtgaaggaagaacaagtggaggaacaagaggaggacgaagaagaaggtgaggaggagatggagatggaggtggaggtggaggttcgttcagatgacaacgatcatggcaatggtggaatcaggggagaaggtggaggtacggacgatgttgcggagatagaggaggaggaattgggtacggatgaagatgaaaccagtgatgatagcgatgagaacttcagcgatgaggaaggggatgaagaggaattggaggaggaggaggaggaggaggaagaagaagatgatgatgatgatgacgaggaggaggaggaaccgggtgatgcacctgatcaaccgggtgaggccggtgaggaatctcctccccgatcaagaatcatggcaatgccgctgatgggaaagaggatgtttgagggatttagttttctacaacaggtggacacctcgactggcagggatatcagagctcgcacacgatcaaatttcaaacgcaagaaactcctggacaagaaactgctcaagcgtgggacgttcgcgaagccttattgtatcgatgtgtctagctcggggtcggaggaggatgtgccacagccggagcagtcggcgtacggtggggattgtgcggatgacgatggcggcagcgatggcaatgaggagcatagagctgtgaagaggaggaaattgaacaggaggcaaagtgcccatagtgatagcgaggaggatacaacatttgtatgtgatgtcaaggaaggatcaggttctaggagggtacaagaaggagcacctcgtaggcaggttaagaaggagggttccaacaagaaaaaggatggctccactccacaatgcgtcagaaacaatggaccaaaagttgggagacaaacaaatgggctcaatggacagggtggtgtatccttcaagagaaatgtaaagattgctcagaggaggaagcgcaggcaagcaacggcagaccaagaaaagtatggtcatttgctcgaccccatgtttaatgaaatagagagcaaccaatatgagcctgttcctgaagagcaaattgacaggagattgcccctggtattcgcatttggggatgacgataagctggaagagaaatccaaacatgacaagttacaggatgaagatgaactgtggaaagaatttgattttgctttggaatccataaatgtttgttctcacaactgcgaggagggtgaaaaggaagatgagcaagaaatccctgcggacaaagcagcttcatgcatccaagggaagcatgagctcattattgatgagcaaataggacttcgatgcaagcactgcaactttgttgatcttgaaatcagattcgtacttccctccatggtaaagtcctgtactgaaagggacatgagaaaagatcacgagttagacttgttttttgatgatatcctaacatcagcgggatatgaaggaccacgtgattttggtggtaaaaagactggcctggtttgggatctagttcctggggtccgggaggacatgttcccgcaccagcaagaaggttttgagttcatgtggagaaaactagcaggggggacttcaattgaacagctgaggaacaatgcaaacactattgaaggtggctgtgtgatttctcatgcaccagggacagggaagaccagactagcaatcacatttgttcaatcctactttgcgttttttcccgagtgctgtccagtgataattgctcccagagggatgcttgctacatgggaacaggagttcagaaaatggaaggtgaaggtcccttttcatgtattgaactccaaggagattaactggaaagaagacaggaccatcaaacagctggctatcatggatgaaaatttggcccaaagtttggctagaaacaaattggatcacaaatttaggcgaaagttgaagttggcatcatggcgtaaagggagcagtataattggtgtgagctatacgcttttcaggaaactagcgaaccagagcagcatggatgggaacatggtgaggaatctgctccttgagatgcccgacttgttggtccttgatgaagggcacacaccaaggaacaagaaaagtctcatatggaaggttcttgaagaagttcgcaccaaaaagcgaataattctatctggtactccatttcagaatagctttcttgagctctctaatgtcctgtacctgattagaccaaagtttgcaagacacttcgcttctaaaagtttcaagaaaataggccttgaggattactggacatccttgacactgaataacataacagagaaaaagatagatgaaatccggcaaatactcgatccaattgtgcacatccataacggtgacattcttcaaaagtctcttccaggattgagagaatcagttgtgattctgaatcctcttcctcatcaaaaggaaatcatcacagcaatggagaacacagtgacaatggggactcttgatgcagaatacaagatctcccttgcatctatacacccgttcctcgtcacatgtgcaaaactgtcggaaaaagaaacatcttctgtggatgtctctttgctgaagagcttacggccaaacccgtgcgtaggagtcaaaacaaaatttgttttggaaattgtccgtttgtgtgaagccatgaaagagcgagtacttgttttcagtcaatatcttgaaccactatctctgatcatggaccaacttagtaaaatgttcaattggacagaaggtgaggagatcctactgatgagtggaaatgtccttgttcaaaatcgagaagctttgatggaggccttcaatgacatgaaaagcaatgccaaggtaatgcttgcatcaacgaaggcatgctgtgaaggcattacacttatcggggcatcacgtgtggttctccttgatgttgtatggaacccttcagttggaaggcaggcgattggccgagcttatagaattggtcaagagaagattgtgtatacatacaatctaatcacagaagggacaaaggagaaggacaaatatgataggcaagctaagaaggatcatatgtccaaactgctattttcaaaagaaccccatgctgcaggattcaacttgtctcaagaagtgatattcaatgacaagatattggaagcaatgacatcacatagggagctcaaagacatgtttgtgaagattctccattctcactaa

SEQ ID NO: 12929 - DNA, 2847 bp, Oryza sativa
  Clone ID: TFbOSC400255j.C1.o28.fg
atggactatgagcccgtgttaaaatgcctgaagaagttgcctggagttgctgtgcaagatataccttacaaaacaaggaatgttatcaagaatctccctaagttctttgccgaaagctgcgcttctgataaagaagttgacgggcttctcatgaagttgccacaacacttacgagatgcactcctaccctttcaacttgaaggtgtgaagtttgggcttcgaaggcatgggcgctgccttattgcagatgagatggggcttggtaagactctccagcatttctccctgctttctaaaatattgcaatgcacaaatgttgaaattatctcaaactatttattccaactacttcagtcaccttgtgtatcaatattgcatttgatttcactaatgatagctgctatgatatatgacatattttgtgtacatcatctaaacggttttaaaattccagagatctatctcacagtttgttttctcctaggagacaatagaccttttgacatctatcatcagataaatatgctatggccccatttgcttggcagcaataaatttgactttgcgaacaaatattgcttgctacatactgttcaaggctgcaatgggagaacttaccaggatttttcaaagggtgctcggttgacagagttaaatgttttgctcagtcagactctcatgattaggcgcttgaaggagcatttgttgaatgaactacctcccaaacgtcgacagattatttggttgaagctgaatgcatcagatatcaagacagctatatcttgtatcaaaggggtgaacactagtgatgagattcctacaattgcctcgccagacaatagcaatgactctgaggaggtgaacatggaagaagggttcaagattagtaagattggtctgtctgctccttataaacattgtgctcatttccttgtatttccttttcatttgcccacagctgatggttgcaagaaatctccaaggaatctcactacacaagaaattggtattgtgaaaatacctgggttcagcgagtggttcttaaatcatttcatcatgaaagaaccagctgataatggtagtctggactctcagtctaattgccagaaaacaataattttcgcccatcatttaaaggtcctagatggagttcaggtgtttgtcacagagcagaggatcaagtatgtccgcattgacggaagcacatctcctagggaaaggaaagatgctgtcgattctttccgtttaaatccagaggtaatggttgcaattattggaattactgctggcggtgttggtttagatttctcatctgctcagaatgttgttttcgtggagctcccaaagtcagcttcagagttgcttcagaacacattagatgagtcacattggcttcatttgaaccagagtctgttccgtgtctcatcattgatgaatggaaagaaagatgctataagagagattgaggtgcttccatggtccgtaacaattgacaaaattttccttctttctaaggttgatcaagtttaccaccttgaggaaagcagtaaatctgagggaaaatcacagcttggatttcttcctttggagaatcataatgctgattgtgggcatggaccaggagagaatgtagaaagtgatgatatgtccattgagaattttcctggcctcaacgatatgaattttgagtcagatttcttcagtattaggacaattcctcttcactttgaggatgatagccttcatacggtaatgcaaaattgtccatctccaacagcacatgaagagatagcttttgatagttcttctatctctcaagcttcagttatttgcccttcaatgtcaagcgctaaatcagtaaaggttagccagcacacaggccgaattcatttgtacatatgtgttccagggcatgattcaagacccagaccactttttgaaaacttcctgccagaagaagtagagtcacctttatgttctgataataccatgaaaacaagtaatcgtctcttgaagagggatcctgcattttgcaatacgttcaaagcgttcgtgaaggaatggttggcgcttagaccaattgagcagaagagactactgggaaagcccttacagcttcccttgagccttgagttgtgctacctgaaagataccaacaaccacagcacaaaagggttgcttaaaggaggaagtaagaggcgtgtaacaccatggtgtgatattagtaatcctttgccagaaaatgctgaatggagaaaggtggttttgcataatggtacaagtagagagagagagtacactcaaggctggactgttcacgatgaacctctctgcaaattatgtcaaggaccttgcaatggaaggcttgcaaagtcacctgaatattttgaagacctgttctgtggtctgccttgcttcgaggtgttcagatcgagaactagtggcaggtttgcacggcaggcactatttgaaattgaacatggtatatgctccaagtgtaaacttgactgtcacgagcttgtcaagaatatcagaccattatgcaagaaaaagagagaagaatacattaggaatgttgctccaaatattgcaagtagattgaaattgctagataagcttgtacatgagccaaatgagggtaatgcttggcacgcagatcatatagtgcctgtatataaaggaggaggtcacctgtgcacagcaaaaggagcgaaaagattaacaaagaaagctaaagagcttctgaaaaacaccgtcaataatcagcagaaggatgaagcaagtgaagcagcagaagaagatgataagtcgttgcttgtcgttgtccctggtagtgcctactcctga

SEQ ID NO: 12930 - DNA, 1392 bp, Oryza sativa
  Clone ID: TFbOSC414036j.C1.o1.gm
atgcagtgcgacggcggcgcctacatgcggtgtgccgacgcccaccgttgtaaatccgctccaattgactctaccaacccacccgtgctctctcctgccgtgctcgtcgacagcaatcagaactcggaagccgaccgggaagtcgccgcgccgccatcgtgctcgccgccggtcgccgtctcggaggaggtaaagatcccgccgccgccctccctcccctccgcgtggtcggcgccgtgctccactaccccggccggcgcagatgatattgtgcacttcttctctccatatggaacagtagttgaccatcagatcactcagaaggatgaaaataaactttctgaaggatcaggcttctggtgtgccaagacaaggcatgattctctagcgcaggtgctaaaggaaggtggtgttctgcttattacgtatgatctggtgaggttgtataatgaagaactaaacggcatgagcagtaaaagctcaaagatgagaagagcttgtccttcatgggactatgtgattcttgatgagggtcacgtgctgaagaacccaaatacgaaaaatgctgctgcgctgaaaagcttatctcgtgggcaaacagttgtcctcacaggaacaccggagttccgcaaaatggtgcgaccttattttcttaggcgcaccaaggaaagtattgaaagccttttacctaataaagctgatcttgtcatctggctgaagctaacgccatatcaggtttgtattgctgtagaagctggcgatgatgtagaatttgtgccagtagaaattgggggcaccacccgccagtctcgcgctggcgcgctgccgcgtgcggggagagggaaaaaaatcggcgactcgcccagtcctccaccaccatggccgctcgccttcacttcagcctcggcccccgcctccgcgggtctgccactctcccgcacgggctcggtcgcgcctctccgccacggcttcggttccgccgtcgtcaccgcgccgccggccgaggacgaggacttcgccacagctgctgacctccagttcgagccgccgctcaaggtcgtgaagtaccccgacccaatcctacgggctcgcaacaagcgcatcaataccttcgatgacaacctccgcagcctcactgacgagatgttcgacgttatgtacaagactgatggaattggtctctctgcaccacaagttggggtgaatgtacaacttatgagaccagacaatgtcaaaattgatgctcaggatgttacaggggcaaagattaaagttaaattgtcaggtctgtctgcaagagttttccaacatgaatttgatcatttacaggggattcttttctttgacaggatgtctcttgatgttcttgagagcgtgcgtgagggactgaag

SEQ ID NO: 12931 - DNA, 2004 bp, Oryza sativa
  Clone ID: TFbOSC10297j.C1.o4.fg
atggcgggtctcggcggcggatggggcggcgggtacgacgacgacgacgactgggggctgagcgcggagcagctcgaccagctcgagcgggacgcctaccgcaagctcgccgagcgcaaggcctcctcctccgccgcctccaccgccacctcgccgctcccctccgcggcctactcgccggtcaagaacagccaccaccacccggcatccagggtttcccaggagtcttgcttcggcaaggtagaatcactttctccttctcggcttagtcaaccaaatgcatcgggaaatgcagttaataatagtcagggcaatatgtctaaggtatcagtacatcttttccttcattctactggtgtgatcgcagcgaagttccagtaccaccagaaacttgtggatgcagttcacaagatccccaaagccagctggaacgggaaggagagggtatggatgttcccacactcatcattatcagtagcagaggaagttcttagtacagtacctggaatagctgttgaggtccaaaaactggatccgctggttaagcgcgcactaactgcttctttatatgccggagatcttcgagatttgtatggcaagattccaactgatgttgagtcaaagcttatgccgtttcagcgtgaaggtgtcaggtttgctttacagcatggtgccaggaccctgatagcagatgaaatgggtcttggcaagacattacaggcaattgctgttgcttcttgccttcatgatgcctggccagttcttgtaatctctccatcatccttgcgattacattgggcttctgtggtgctaccacaaactggaggatcaaataaagcaggatacagattggtatattcaaatactaaaggggattttaatctggatggggtgttcaatgtgatatcttatgatgttgttcccaagataaaggacatgcttctggacttggattttaagattgttatagctgatgaatcacactttctgaagaatgcccaagcaaagagaacaatgcattcacttcctgttctgcagaaagctaaatatgtggttttgctaagtggcacccctgcgttatctcgccctatcgagctgtttactcagctccaggcattgtatccaactgtatacaagaatgttaatgagtatggtaatagatattgcaaaggtggcttttttgggctttatcaaggtgctagcaatcatgaggagcttcataatttgatgaaagcaactgtcatgatccgcaggttgaagaaagatgtcctttcacagttgcctgttaaacgcagacaacagttggagactgtgaagatcaaaatccagtcctgtgactcccaggagacgatggactctctcaaatttgctcaaaagaatcttattaacaagatctacaatgattcagctgaagccaaaattccagcagtgctagattacctgggtactataattgaggccgagtgcaaatttttaatatttgcacatcatcaatccatgcttgaagctattcaccaacatctcttgaaaaagaaagttaagtgcataagaattgatggtcaaacacctgtacctgtaagacagactctagtcacagatttccagaataaggatgacatcaaggcagcagtgttatccataaaagctggaggtgttgggttaactttgacagcagcaagtacagtaatctttgctgagttatcatggactccaggtgaccttattcaagccgaagaccgtgcccatcgtattggtcaggtttcttcggtgaacatatattaccttcttgcaaatgacactgtggatgacattatatgggacgttgttcaaggcaaacttgagaatttgggacagatgctggatgggcaggagaaaacgctggatgtgtcccagagcgacactaggcccagcccttccaagcagaagacgctcgacgcctacctcaagcgatgcagcaattccacagaagctgatcagcccaagctcaagaaccctaggttctga

SEQ ID NO: 12932 - DNA, 4299 bp, Oryza sativa
  Clone ID: TFbOSC401803j.C1.o22.fg
atggatgagaatagaaaattatctgatgacatgtccaagaaaatggaacctattcactctaatggagaggcaggggaagataaaactataattattgaacctgaaagtgatgcaaataaacttgaagtggaaactgacgcaagacatggtatctgtgaggcgcacaaggcgcatgaatatggaacaatggaaaatgatttgcatgaggaagcatccaccaccgatgatgattcagagaatgactcatatgaataccttcttcgggaatcggataatgagcaaacttcagagtctgatgctggtgagggagacaatgaggcacctctcactgatgaagaagttgaaacattaattaccgaattccttgacgctgagagcaaggctgctcaagcgcaagaatcacttgaaaaggagtcactggaaaagattgaatctgaagtaaggttggagctatcggagagtctccaaggaaatgagttagagtcagccgtttctactgagatgaagcaatacaagaaggaatgggaatctgaacttgatgatttggagactcacattgctgttctcttggagcaacttgatgctgctggtgtcgaacttcccagcctctacaagtctatagaaagccaagttccaaatgtttgtgaaactgaagcatggaagaacagggctcactgggctggttatcaagtgcctgaggaagctaataaatcaatcagaaaagctgatgaatacctccaatcttgtagacctgtaaggagaaaacatgggaggttgctggaggaaggtgctagtggctttcttgctggaaagattcctgttggggatgatggatctgcacaatgccatgagaaaagttggaatgcattcaatgaacttaccaaatctaaggaatatgctgaaagttctttcggaagtagtaactgggcatcagtttatctggccagtaccccacaagaagcggctgctttaggtctccaatttccaggagttgatgaggtagaggagatagctgaagttgagggtgctgttagtgacataaaaggtgtcgatgaaatagagctttctgaagtacagagaagaaaatacagaaaggtaccagaagaggatgatgcaaagatgacaaaacgtctgcagcgccatttgaaagaaagaaggacaagacatttgcataaggagaacattggtttggcgtcatcatcaaatggatgcttttctgttgagctagcgaagcgcacacgtgaagatgatgttgagtttgacaataagaggtcaaaaactgtaattattgaaagtgatgatgacatgcagactgatagcaagccagattcagcaccaagtgaaaatgcggatgagattattgatcttgatatcttcccatcacaaagccctaaacttggtgataaagttcggcctaaacctttcaagtgcactatttgcactgaaatgttgaatgtccctgaagtgcaccgccacccagtattggatgttataatttgtggatcttgcagatttctagtgatagagaagaatcgtctcgaggatcctgtgtctggtggttattgcacctggtgtgtaaaaagtgaacagcttcaaagttgcagctcttgtaaactgcttttctgcagaaattgcttgtcaaagaattttggtgaagaaggcttatcggaagctagagtagctggttggcaatgttgctgctgcctacccagtcaactggaacatttaatttctgactgtgacaaggccctaggtggtgttgagtcttctgatcctgagaatgactttgcagagctttctgtattagagagcaatggtccttttagcaagcataaaatgaaaaagaggataagaagaatcatggatgacgaagaacttggagaggaaacaaagcttaaaattgcaatggagaaggctaggcaagaacatctgaagtccatgcaagagcagtctgccagcaagttaaagagcaacaatatcggaatttccttggaagcaccatctgaggtttctgaatatgttggggatggacatatagtaaaccttgcccgcgaggaagatgaagcacctgttagaattccaagcagcatatctgctaaactgaaacctcatcagtatcgcatcaccatcacactggtcatgatttctgtacagttgtacctatactgttacaggaagctaaaatatatcatgatatttcaggtatcaggaataagatttatgtgggaaaatgtgatccaatctgtcaagaaggtcaaatctggggataaaggttttggttgcattttggctcacaacatgggccttgggaaaacttttcaggttattacattcctgtatactgttatgagatgcatccagttgggactgcgcacggcgcttatagttacccccgttaatgttttgcataactggaagaaagagttcatcaaatggtgtccagcagaacttaagccacttcgtgtgtatatgttggaggatgttccaaggtgcagggcaaacattcagtatttactaaaaaagtggcgaataaaaggtggcgtgcttctgattggttattcatcatttagaaacctttcccttggaaggagtgcgagggacaaaactgttgcaaacgagatcaccaatgctttgcagatgtgggttttgatacagtccatttacatatgtcacaatcagtgtgggccagatattcttgtatgtgatgaagcacatataattaagaacaggagagctgacactacacaagctttgaaacaaatggttgattttgttagggaaggttatcttggaagtagccatgagttccgtaacaggttccagaaccccattgaaaatgggcagcacacgaattctacatcagatgatgtcaagatcatgaaccaacggtcacatattctgtatgaacaactgaagggatttgtccagcgaatggacatgaacgtggtgaagaatgatctaccagaaaagaaggtttttgttgttactgttaaactctctcaactacaaaggaagctgtacagaagattcttggacgtgaatggtttctcaagcagtgctgcttcagaaaaatcttttcagcggagtggcttctttgccaagtaccaaacgttagcgctgatatggaaccatcctggtcttctccagatggctaaacagaaaggaaatttgcgccaagaagatgtcgagtcctttctgatggatgagagctctagtgatgataatattgaaaattacttgccaaatggagagaagctgagaagcagaaatgatcagctatccaagaaaagttctgatgttgtaaatgaggaaagtaactggtgggagaatcttttagatgaaaatgcttataaggaagcagattatagtggcaaaatggttttactccttgatatcctgtcatcatgttctgaattgggtgacaaggcattagtgttcagccagagcttgagcactctggatttggtggaattttatctatctaagttgcaagttaatggaaaagagggcaaatattggaaacaaggcaaggattggtacaggattgatgggagcactccatcttctgagcgacaaaatcttgtggagaggtatggccagaccaagcctgtgtatgcttaccgcctaatggctcatgcaacaatggaagagaaaatatataaacggcaggtgacaaaagaagggcttgcagcaagggtggtggatagacagcaagtgtctagaacaatctctaaagaagagatgttgcatcttttcgagtttggtgatgaggaactactggagcagagcggttctaccatgaatggtcacagtaaagttgggactgagaagccacctactcccaactccagtgaaaccactgaacatttacctttggacaggctcatggtgaacctacttcatgaccactcccggtggatcgcaagttaccatgaacatgaaacccttctgcaagaaaatgaagaagaaaggcttaccaaggaggagcaagatatggcatggttaagctacaacaagttgctagaagttgccccgaggaaagctacacatgacgccgagagaaaaccaagtactgttccaacagagagcagccttatacaaccacctaaagctacttcaagaagccggcaaccccagcagcctaagatcacttcaaacaaccaaaagaagtgtaacaacctgagccacttgcttactctgagaagccaaggcaccaagcctggatgcagcacgagttgcaaagaatgtggccaggatattagttgggagacgctaaacagagacggtagatcaaggtga

SEQ ID NO: 12933 - DNA, 3399 bp, Oryza sativa
  Clone ID: TFbOSC20491j.C1.o1.fg
atgcacggcgactggccggagtcgccgtcccaggaggtgctctacgccgacgagatcgccgccgtccgcgcggttcttggcgcgggcctccccgaggcccgcgtcgtcgccgcaatctcccgctgcggaggcaacgccgagcgcgccatcaacgcgctcctcgatgacgccaccgccggcgtcgaggacaaacccgagcccaagaagggtaaaggtgccaagacggctgctcctccggtgaaggcggaacgcgacgctggtggcgccgccccgaagccgccgccgcctccggtgaaggttgaggtcctcgacgacgagcccctggggagccaagaatcgaacggctgctccgcgagggtcaagaaggagcgggaggacgagctgctcgtcaaagcgccgcctccgatgccggatcgggtcaaggaggaagacggcgtcgcggccaagcgaggcgcggcgacggcgaacgccgccggcataagcctggtgccgaggccgaagaagaggtctcgcgtgcacgacgaggcggacaccatcgacctcacggcgacccacccggtgccgtacctgaacccgaggccgatccgggcggtgccgccaccggaggccatggagatgctcgagtcgcggcgtgtgcgtgccaggccgcctccgccgtcgagtgatctgaggatggtggtggcgccgcctgatgccgagttcggcgagttccccgaggagcgcgactggttcctcgtcggcaggtcgtacgtcaccggcctgtccaccaaccgcgggaggcggaggctggacgccggcgagctcgtccatttctcgttcccctcattggagaggacctatggtgggatcaaggtgtcgaacaagaaggcggctgctttggcggagatcgtgcgcttctccaccaatcgagctggagagattgggaagctatctacagaatggaccaagtgcctcgtgccactggtaagctcatccaaggtgaagattcaggggaagattgtgtttcccacggtggaattgagattgatgcaggagattttgttgtatgttagcttctacatccaccgttctgtattcaccgcaagcggcaacaactcatcatgggacctgcttgctcctgcaaatgttgattattccactaaccctctttacaggctgttcagattgctcaagctaagggcattcaccaaggctgatatcactcctgaggagcttgctgcaggaaagagaccgcggaatctaaggggtgatgacaatgatgaagatgaacccatggctatagttggattggaaaaccgacgcacagctggccaaacatttcctgagcaaggcactgatgagcaagctatttcagaggctgcattaaacaaaattgttggcactgctgaaacatatgacttggaggaagcagagcccccaagcactcttgtctccgttctaaaaccataccagaaggaagctctgttctggatgtctcaattggagaagggtattgatggtgatcaagccaaaaaaacccttcatccctgttggagtgcctacaaaatcgtcgacaagagagctcctgcagtgtatgtcaatgttttcactggcgaggcaacaacccagtttcaaagtgtaactcagtcagcaagaggagggatactagcggatgcaatgggtcttggtaaaactgtcatgactattgctctaatactatcaaacccaaggggggagttagaacaagataagaggggtactagagatcgtgacaccaaggcacaaacttcgagatcctctgtaagaggaggcacacttataatctgtccaatggcattgctaggccagtggaaggatgaattggaggcacattcaacaccaggagctctttctgtgtttgtctactatggtggcgacagaaccactgacctgagattcatggctcagcatagtgttgtcttgacaacctatggtgttcttcaatcagctcacaagaatgatggcagcagtatctttcacaggatagattggtatagagttgtgctcgatgaagcacatacgatcaaatctcccagaaccaaagcagcacgagcagcttatgaattaacttctcattgcagatggtgccttacgggtacaccattgcagaataatttggaggaccttttcagtcttctttgcttcctacatgtagaaccatggggtgacgcaagttggtggaataagctgattcaaagaccttatgagaatggtgatgagaggggattgaaacttgtcagagctattctgaggccactcatgctgaggagaacgaaggaaacaaaagacaaaatgggaaatcccatactagtcctcccaccagctaatattgagattgtggagtgcgaacaatctgaagatgaacgcgatttctatgaagcgcttttcaggagatcaaaggttcaatttgataaatttgtagcacaaggcagtgttcttaacaactacgctaatattcttgagttactccttcggctaaggcagtgctgcgaccacccttttctagtgatcagtcgagctgatactcagaagtatactgacctcgatgagctagcacagaggttccttgatggggtgcaacgtgattccgcgagacgcagtgcgccaccttcacaggcgtatgtagaagaggttgttgaagaaatccgccagggcgcaactactgagtgtccaatctgccttgaatcagcttctgatgatccagtgctcacaccatgcgcgcaccggatgtgccgtgagtgcctgctctctagctggaggacgccttctggaggaccatgcccactttgccgaagccccattaccaaatctgagctgatcacattgcctagtcagtgtcgattccaggttgaccctgagaataactggaaggactcatgtaaggtgataaaactcatcaagatcctggagggccttcaggagaagagggagaagagcattgtgttcagtcagttcacttccttcttcgatcttcttgaggttcccttcaatcagaaagggatcaaattcttgaggtttgatgggaagctcagccagaaacacagagaaaaggttctgaaggagttcagtgaaagcaaggacaagctggtgctacttatgtcactcaaggctggaggtgttggacttaatttgactgctgcctccaatgtgttcctaatggacccatggtggaatcctgcagtggaagaacaagctatcatgcgaattcaccgtatcgggcaaaagagagcggtccaagtaaggcgcttcatcgtcaaggatacggtcgaggagcggatgcagaaggtgcaagcgtgcaagcagaggatgatctctggggcgctgaccgacgatgaagtccgctccgctcgtatcgagcaactgaagatgctgtttacatga

SEQ ID NO: 12934 - DNA, 537 bp, Oryza sativa
  Clone ID: TFbOSC900422j.C1.o8.fg
atggagagcgaggaggcacggaaggtgtgcttctccaagcgccgtgcggacctcttcaagatggcgagcgagctgtccgttcatttcaacgccgacgtggcggctgtcgtcttctcccccgccggcaacagggcctactccatcggcgacccgtcggtcatggaccgcttcctgtcgtcgttgccggcgccggcgccgccggcggagaccgagccagagccagaggtggattggtcggtgatggaggagctgagcaggctgtgtggccagctgcaggccatggtggacgcgcacaaggcgcgcctggagaaggcggaggagaagcttcgcgagagcggcgcggcggcgtggatgatggatctggaggcggaggtgggtcgcatggcgccggaggatgtgctggccctggtgactaagctggcggtgctgcgggacggcgtggcggagcgcgcccacgagatgctgcgcgaggcgctgctcgctgtcgctgccccgaccccgaccacccccaccaccccgccgcccgcgggcttctga

SEQ ID NO: 12935 - DNA, 1221 bp, Oryza sativa
  Clone ID: TFbOSC400773j.C1.o106.fg
atggccgggaggaaggagaccgtgataaaaatggcgaaggagctctccgtgctctgcgacgtccccgtcgcgctcgtctgcgccgtcggcggcgcggtggaggtgtgggagtcggaggagggcgtcctcgaccggtaccgcgccctcccgcccgaggtccgcgccacgcgcgcgcacacgcaccggggctacctcgagcgggagctccgcgcgaggagagccaagctggccaaggtccgggaggaaggcgcgttcaagtcgtgggggcgcgacgcgctcagcggcatcatcacggcggaggaggcgccggcgctgctcgagtccatcgacgctgcgatcgccgccgcgaccgcgaggcaggaggcgcttgctctactggacggcggcgggctccatctgcagcacgtcccggcgagcgcttccgacgccgtcgcgcctgtcgtcggcggccacggcgtccaggtccagtacatcggcggcagcggcggcggcggcgggagccagcaggagatgacgccggcagccgacggagatggcgcccgcaacgccgaccagtacgacgacatcctcccgtgggatggcaacaccttcgaggcgcacaacgcccacgtgatgctgcccgcgtgcggcttccaatgcaccggcgactaccgcgtggacatggacggctacgtgtggggagccccggatgatgccaacgcctaccatggctggcccgatgaggcaatgtggtgcaccgacgagtcgtgctcgtgcaacgccgccaccgccaccgccgtgccagccatgtatcatccccccaccctggacaccgtccacgggagcttcctcgccgcgccagctcaaccactcgccttcagcaccggcgccgacttcatcaacgcgccgaacgactttctcaccgtgggcgtcggcggcagcttcatcaacgtcggcgactactcggcgcagagcttggccgacgagttccaccacctcagcgacgccaccaaccagctcgatcagacgcactacccaccattcggtggaacgggcggcgccgagcccggcgacacgcagtcccatagctggggggactactacttggcgcagagctccgccaatgagtgccagctgctcggcgtcgacggcggcgacatccatctcgatcagacgcattgcctcggtggtgcgggcggcgccgagcccggcgacacgaagtcccacaattggggtggctga

SEQ ID NO: 12936 - DNA, 542 bp, Oryza sativa
  Clone ID: TFbOSC102221j.C1.o1.np
atggctcgcaagaagatgaagcttctgcggatcgtcattgatgtgaagcggcgggtgacatttaggaagcatctgaagggcttgatgaagaaggttagtgagttcgcaacactgttcctcatggtgtacggtgaggttgaggtgcaagcaacgaaggtttggccgtcggtgtgggaggcgaccagagttctcgagcacttcaaggccatgccgcagctgggcagatacaagaagatgatagacctagagggcatcctcaacaagcagatcgacaagctcaaggagaagttgcacaagctgggacgcgaagctgatgaaagcgagaccaagctactcctcattgaagccatcaatggccgccacccaagcctcgatggtctcaccatcgagcagattatcagcctcggaaggatggcaaattcacgcctcaagattgtcaacgaccgcctcaagaagctccgtgccagcaacacgtacaccagcgtgataccatggtcgccgccgccgccgccgccccgccgcccagcgtcgccgccgccgcc

SEQ ID NO: 12937 - DNA, 501 bp, Oryza sativa
  Clone ID: TFbOSC401885j.C1.o19.np
atggctcgcaagaagatgaagcttctgcggatcgtcattgatgtgaagcggcgggtgacatttaggaagcatctgaagggcttgatgaagaaggttagtgagttcgcaacactgttcctcatggtgtacggtgaggttgaggtgcaagcaacgaaggtttggccgtcggtgtgggaggcgaccagagttctcgagcacttcaaggccatgccgcagctgggcagatacaagaagatgatagacctagagggcatcctcaacaagcagatcgacaagctcaaggagaagttgcacaagctgggacgcgaagctgatgaaagcgagaccaagctactcctcattgaagccatcaatggccgccacccaagcctcgatggtctcaccatcgagcagattatcagcctcggaaggatggcaaattcacgcctcaagattgtcaacgaccgcctcaagaagctccgtgagccatcatccttggccatggtgttgtgcttccctctt

SEQ ID NO: 12938 - DNA, 53 bp, Oryza sativa
  Clone ID: TFbOSC102221j.C1.o3.gm
atggagggagcacttgccatgttcgctgagataatattttgtcccaacaaact

SEQ ID NO: 12939 - DNA, 630 bp, Oryza sativa
  Clone ID: TFbOSC401885j.C1.o22.fg
atggctcgcaagaaggtgaagcttcaggggatcgtcattgatgtgaagcagcgggtgacattcatgaagagtctcaagggcttgacgaagaaggttagtgagttcgcaacactattcctcatggtgtacggtgaggttgaggtgcaagcaacgaaggtttggccgtcggtgtgggaggcgaccagagttctcgagcacttcaaggccatgccgcatctggtcagatacaagaagatgacagacctagaggacatcctcaacgagcaggtcaacaagctcaaagagcagttgcacaaggtgggacgtgatgctgatgaaagcgagaccaagctactcctcattgaagccatcaatggccaccgcccgagcctcgagggtctcaccatcgagcaaattaccagcctcggatggatggcaaatgcacacctcaagattgtcaacgaccgcctcaagaagctccgtgaggaaggcctcatacctgcatccgtgtcattgtcgagcacggaagtaccaatccagagggagggatggctggtggatgttgcaaggggcattggctcaatagggtacaatcggttcggaggtagcagtggaagcggcactgctggatccaatggtgacatggcttag

SEQ ID NO: 12940 - DNA, 566 bp, Oryza sativa
  Clone ID: TFbOSC6754j.C1.o1.fg
atggctcgcaagaaggtgaagcttcaggggatcgtcattgatgtgaagcagcgggtgacattcatgaagagtctcaagggcttgacgaagaaggttagtgagttcgcaacactattcctcatggtgtacggtgaggttgaggtgcaagcaacgaaggtttggccgtcggtgtgggaggcgaccagagttctcgagcacttcaaggccatgccgcatctggtcagatacaagaagatgacagacctagaggacatcctcaacgagcaggtcaacaagctcaaagagcagttgcacaaggtgggacgtgatgctgatgaaagcgagaccaagctactcctcattgaagccatcaatggccaccgcccgagcctcgagggtctcaccatcgagcaaattaccagcctcggatggatggcaaatgcacacctcaagattgtcaacgaccgcctcaagaagctccgtgaggaaggcctcatacctgcatccgtgtcattgtcgagcacggaagtaccaatccagagggagggattgctggtggatgttgcaaggggcattggctcaatggg

SEQ ID NO: 12941 - DNA, 630 bp, Oryza sativa
  Clone ID: TFbOSC401885j.C1.o21.fg
atggcttgcaagaaggtgaagcttcagcggatcgtcattgatgtgaagcagcgggtgacattcatgaagagtctcaagggcttgacgaagaaggttagtgagttcgcaacactattcctcatggtgtacggtgaggttgaggtgcaagcaacgaaggtttggccgtcggtgtgggaggcgaccagagttctcgagcacttcaaggccatgccgcatctggttagatccaagaagatgacagacctagagggcatcctcaacgagcaggtcgacaagctcaaagagcagttgcacaaggtgggacgtgatgctgatgaaagcgagaccaagctactcctcattgaagccatcaatggccaccgcccgagcctcgagggtctcaccatcgagcaaattaccagcctcggatggatggcaaatgcacacctcaagattgtcaacgaccgcctcaagaagctccgtgaggaaggcctcatacctgcatccgtgtcattgtcgagcacggaagtaccaatccagagggagggattgctggtggatgttgcaaggggcattggctcaatggggtacaatcggttcggaggtagcagcggaagcggcactgctagatccaatggtgacatggcttag

SEQ ID NO: 12942 - DNA, 334 bp, Oryza sativa
  Clone ID: TFbOSC401465j.C1.o6.gm
atggctcgcaacaaggtgaagctgcagcggatcatcaatgatgcgaagcggcgggcaacattcaagaagcggctcaagggcttgatgaagaaggcaagcgagctggcaacactatgcaatgtggacacatgcctcatggtgtatggtgagggtgaggcgcaagcaacggtggtttggccgtcggagtcggaggtgatgagagttctcgagcgcttcaagaccttgccacagctggacaaatataagaagatgaccgacctggagggcttcatccaggagcgcatcaacaagttccaagagcagttagacaaggtgaggcgtgatgccgatgaaa

SEQ ID NO: 12943 - DNA, 807 bp, Oryza sativa
  Clone ID: TFbOSC900168j.C1.o3.gm
atggctcgcaacaaggtgaagctgcagcggatcatcaatgatgcgaagcggcgggcaacattcaagaagcggctcaagggcttgatgaagaaggcaagcgagctggcaacactatgcaatgtggacacatgcctcatggtgtatggtgagggtgaggcgcaagcaacggtggtttggccgtcggagtcggaggtgatgagagttctcgagcgcttcaagaccttgccacagctggacaaatataagaagatgaccgacctggagggcttcatccaggagcgcatcaacaagttccaagagcagttagacaaggtgaggcgtgatgccgatgaaagtgagaccaagctactcctcattgaagctctcgaaggccgccgcccaggccttgaggggatcaccattgagcaacttaccagccttggctggcttgtagatgcacgcctcaacatcgtcaatgatcaactccagaagctccacgagcagggcctcctaccagcgtctatttcactgccaaccatgggggtactgccttacaccacggcgggctacactgttgcgcaagaggcaccaatccagagggggggatggctcatgggtgttgtaaggggcattggctcattgggctatagtttgttcagaggtagcggcagaagcaacactgctggacccagtggtgacatggtgcaacctttcaacattggcgcaggatcctcattggccaaccagggcggctgcagaaacaaccagcaggaggaggtcgtcacgagcgtgaggtcggggaagctcaacgttgtggccttcccttag

SEQ ID NO: 12944 - DNA, 726 bp, Oryza sativa
  Clone ID: TFbOSC30381j.C1.o2.fg
atgggtcggccgcgaggggggactagcaaggggaagcagaagatcgagatgtgctgcatcgacggcaaggagaaacggcaggtcaccttctccaagcgccgccggggcctcttcaagaaggcgtccgagatatccacgctctccggcgcgtccatcgccatcgtctccttctccaaggccggcaacgtcttcgccttcggctcgccgagcgtcgacgccgtcctccgccgccacgtcgtggccgggccttccacctccacctcccacgcccacgccggcggcgacgtcttcgcggacgacggcggcgacaaccccgaggtgctgaacgcgctgaagcgggcgacggacgaggccgcggcggaggtggcggcggaggacgcgcggcagagcggcgtcgagggaaagatcacggaggccatggcggcggggaggcggcggttctggtgggacgccgccaacgtcgaggcgctcggggaggcggagctgccggtgttcgaaagggcgctccataagctcaggggcgccgtcgcacagggaggcaacaatccaatccaggagagatgggataggatcccagctcaagggagccctggtggcagctacggttgggaggacctaagccctacaggcaagctctataatcaacccccttttgcttaccggcttccagtgatgcagtcaatagtttctgatcagcttggagtggtctgtgccatgttgctgtga

SEQ ID NO: 12945 - DNA, 1452 bp, Oryza sativa
  Clone ID: TFbOSC400964j.C1.o2.fg
atggtccgcacgcccaccataatcccgctacggcccaactacagcccgccgggcgacggtgccgcattccgccgcgagcccgcgacgtattcccgtttcccacccgccgcggctcgcaacgaatgtgatctcaccttcggtcaggaaaggaaacgagagggaatgaaaggcaagcccccgatatcaaggaaaatcatttataatcaccgagattttgtttccatgggtgaaagatttgttgctctttgctttatatttacgatgtctccatgcattgatgcaacgctattcgttcgcgtggttttggatttcgtccggcgagaggagacgagacgagacgagatgcctcgcacgaagcttgtgttgaagctcatcgagaacgagaagaagcggaaggccacgttcaagaatcgccgggacggcctcaagcagaaggtgtcgcagttcgcgacgctgtgcggcgtcgaggccttgctcatctgcgtcgcccccgccgtggcgggcggcgaggtcacgacgtggccgcccgaccgcgccgccgtgctggacctcatcgcgaggctccgggcgacgccgccggagaagatccggcagctgcacaacacccagtcccaactccgggacgatctggacaagcagcagcggttgctcctcaaagtccagaagtgcggcgccgacgacgtgctcacaccgtggcactgcagcctgtacgacctctccctcgacggcctcaatgcgctccacgacaccctgtccgagacgctggacagggcgcaccggcggatagccgcgctcggcggcggccacggccacgtccacgacgacgccgcgtcgtcctccgagttctcggtccccgcgcccgcgccgcacgccgtggcattgccggacaacgccttcgacttcccgttcgccccgtcgaacaccggccccgtcgtcggcgcccactacttctaccctctccacgacaccctgccgctgccgctgccgctgccacagcaggttcccggccagcatccgccgtgcatcgcctaccagatgccgccgccgccgtgcctcgcctatcagatgccgccgccgccgccgccgtcgctcgccgcggcgccattcgaccagtgtatgagcgccacgggcttcatggacagcaacccttacgccacccacatcatgcacggtggctcgacggctgctggcctcctcgacgatcatggccagatcttctccgccggcgcagggtacgacgacgacgacattcttgggcacggcttcggcttcgccgccggcaccgggtacgatcttgacccgcgcatggccaccgccgacgtttggccgatgaacacgctcaacaatattccaaacgatggcggcatcggcttccagctgcagaacgatctgaagtggatgcttccaggtggtagcaacgggagtaatttgcaaggcggctttcagatttag

SEQ ID NO: 12946 - DNA, 585 bp, Oryza sativa
  Clone ID: TFbOSC400481j.C1.o33.fg
atggtgcatccgctggggaggacgagtatggggcggcagcgcatcgagatccgccgcatcgacaacaaggaaaggcggcaggtcaccttcaccaagcggaggggcgggctgttcaagaaggcgtcggagctcgccctgctcaccggcgcgagcgtcgccgtcgttgtcttctcccctgccaagcacgtctacgccttcggccacccgtccgtcgacgccgttctccgctcatacgcctccgtccccggggaggccgccgcggtcgcacccgtccccgtccacggcggcagcggcggcgaggacgtcgacctcctcgggctgaggctggcggcagatgataccggggcgcaggtcgcggcggagcatgcgcggatgcgcgacgtcgcggcgaggatcgtgcaggcgaaggccgggaggcggttctggtgggaggccgacgtggacgcgctcggggaggccgagttgctggagttcttcacggcgctcaagaagctcagggacaacgtcggccgccacgccaacgccctgctcgccccccagccgccgccgcttccgctgcagcagaagcagcggcgccggcggtag

SEQ ID NO: 12947 - DNA, 723 bp, Oryza sativa
  Clone ID: TFbOSC401478j.C1.o9.fg
atggctcgcaataggatcatcctcaagaaggtcgctaaggattccactcggcgcctcacattcaagaagcggcgcaggggcttgatcaagaaggccggagagctggcctcgttgtgtggtattggcgtgtgtgtggtggtgtatggagagggcgaggtgaagccagaggtttggccttctgcccccgaggcacgagcaatcctctcccgcttcaactcggcgccgaacattgataggttcaagagggtgacgaaccaggagcagtacctccgaaagcgcatcgccaaggctcgggagcgcacgagcaaggcggacgatgtcaaccgtgagcgtgatgctaccatcatgctttatgaggccgccaccgataagcgcccagtggcagacctcaatgtccaggagctcaccaacctcggattggtgatcaatgagcgcatcaaccacctgaaggaacgcattgagcgccttggaggtgcggccctcatggcgccaccgccatcgacgcaaccgacggaggcatcatcatccttgccaccgctagtgccatacgccaatggtgctggcatggaagggaacaagaggatgaaggtgagcacgcatcagaaaggctggttcattaacatgagcaccatgacaggtgacgcagggacctctgccgacgttgaaggcaatactggtgttggcaccagcgctaggggtgacatgatgcatctttccaactag

SEQ ID NO: 12948 - DNA, 1440 bp, Oryza sativa
  Clone ID: TFbOSC400964j.C1.o68.fg
atgtctcgccggaagacatccatagccctcatcgcgaacccgcagacgcgcgctacgacctacaagaagcggaaggcggggctgatcaagaaggccggggagctcgccacgctgtgcgacatccccgtcgccgtcgtgtgcgccgggcccgacggcggcgcgccgaccgtgtgggtgtcgccggagggcggcgacgccatcgagaggtaccgcgcgctgccggcggagaagcgggcgaggcacacgcacgtggcttacctccaggaggagctcgacaaggagagggccaagctcgccaggctgcggcagaagggccgccccggcgagctcgacccgccggacgccgtgctggacgggatgtcccaggacgagctgcagcagctgctcgcgtccatcgacgccacgctgctggctacggccaagaggcgggaggcgctcgggttgctgcccggcgccgacgacgacgcggacggcggcggccggcggcgcgacgccgacgtcgccggaaccaactccgtcggcgtacacggctaccagcaccaggaggtgcatgcaccggcgacatgtgaccccttccatccgtacaacgccggcgtgacgctgatgcagccagggtacaacaacgcccagtacatgggcggccatggcgccgtggacatgagcggctaccagctgcagatgcagatgccgggcaatggcagcaacaaccacagccggctcgcgtggggaggcttccagccatgcaacgccaccttcgtccagcccgtgtacggcaacctccaatgctggtacaacaatgtcgtcgacggcaacggcgagccctgcgacgccatcgtgccatcagctggtgacccctacatggacatcgccggcaacgacgtctacggcaaccagatgcagccggcaccggcggccaacggcgggtggcacgatccgggcacgtggggctacgacggcggcgagccgtgcaaagccatcgtgccatcatttggtgacccctacatgggcattggcgtctacggcaaccaaatgcagccggcgccggcgccggcggccaacggctgctggcacaatccggccggcacatggggcaacgacggcgagccgtgcaacgccatcgtgccatcagctggtcacccctacatcgacatcgagtgcgacatcgacggcaactacatcgacacaaccgtgttcgattaccaaaccaccagcaccagcgacaacttcatggacgcgcccgtccagttcatcgccacgggcagtgacgagagcatcgtcacgaacgtggccggctgcgacgagacggagttctccattgacgatctcctccagtgctccgacgcctcccagcattcttccggcctcgaggagctgcattatctcagtgatctggccgatggcttcgactttggatgcaacttcgacgtgctattggactga

SEQ ID NO: 12949 - DNA, 650 bp, Oryza sativa
  Clone ID: TFbOSC19523j.C1.o1.hg
ccaatcgggtggggtgtcaaagacagaaaccaaaaggcagccagtcatcagagcggtcactgcggcacacgtcgtggggcgtggttggaggttcgctcaagtcgtggtcgtcctcgtcccggttggatggactagggggtgcaatgcaaatagcgtatggttacgggcggggaccaaaaaggaaagccgaggaggagagggaggggagagaagggagagggggtcggggagaaagaagagcgagcgagcagctttggctacggccaaaccctacagcgcctccaccaccactccttgccttttttggtgagtcgccctttgccgactctcagatccccttgcgttttaccacttttgccttgtccgccgcccctccaattgggataaaaaagaaaagagctgcatctctcgctgctcctcctcctcctcctccgccgtgcaggccgcagccgctcgtgtggttggttggttcatcggcgatcgaagatggtgcgggggaagacgcagatgaagcggatagagaaccccacgagccgccaggtcaccttctccaagcgccgcaacggcctgccaagaaggccttcgagctctccgtcctctgcgacgccgaggtcgcgctcatcgtcttctccccgcgcggcaagctttag

SEQ ID NO: 12950 - DNA, 423 bp, Oryza sativa
  Clone ID: TFbOSC404997j.C1.o3.fg
atggagggaggagggaggaggaggaagagggggaaggtggagctgcggcggatagaggaccggacgagccggcaggtgcgattctcgaagcggcggagcgggctgttcaagaaggcgtacgagctgtccgtgctctgcgacgcccaggtcgccctcctcgtcttctcccccgccggccgcctctacgagttcgcctcttccacctccagcattgatacaatttttggtcggtattgggaccttctggacacaacaattgatctcaatattgaagcaagggaatctcgggttgattgcaatatacaggtctggatacggagacaaatcgtccacggagggctagctcctttgttggttggagatgcagctcctccatttaggggtgttggtgtgggctcctcgcctagccctttgtatttatga

SEQ ID NO: 12951 - DNA, 570 bp, Oryza sativa
  Clone ID: TFbOSC401367j.C1.o24.fg
atggcggtgggtgaggtcctaacagaaaggcgacgtgaaacactgacaactgatctggtgttgattccaatttgtagacaagaacccaaaatatcttccattgttccagaggaggctgctgctggtgagtacttagccattatctctgcatcctatgtgacaaacagaaactggacagttttaccagtccaaacaaagcaagtttcagacttacagcaacaagaagcaaagctttgcaagcagagttacatcagagttacttgcattacatattctgagaccgatctgagctgcgggccatcgtcgatgacggagctgaccgcggcagcggcgccggctgggtcaggatcgtcggcggcggtggcggcggggagcagcgagaagatggggagggggaagatcgagataaagcggatcgagaacacgacgaaccggcaggtgaccttctgcaagcgccgcaatggcctcctgaagaaggcgtacgagctgtccgtcctctgcgacgccgaggttgccctcatcgtcttctccagccgcggccgcctctacgagtacgccaacaacaggtga

SEQ ID NO: 12952 - DNA, 495 bp, Oryza sativa
  Clone ID: TFbOSC900058j.C1.o28.fg
atggggagggggaagatagtgataaggaggatagacaactcgacgagcaggcaggtgacgttctcgaagcgtcggaacgggcttctgaagaaggcgaaggagctatccatcctctgcgatgcggaggtcggccttgtcgtcttctccagcaccggcaggctctatgagttctccagcaccaactgggcatggtgcactgctcacgctgaagaatatataccaactcctataactggagaactccagcaaactcccctcaaaggagctgaatatgcgcacaatatatgcgcacaatccgatagtacagaatcttctgaacttgaggttggcaagagctgcaagccacgcatgggccaaagggggcagattgctgcagtggccacactggtactcactcccgttactccactacttagcttctcacgttttcatgaaccacacacttcatcagcatctgagggcatcagggcaggccatcctcaagtttgcaaatga

SEQ ID NO: 12953 - DNA, 1158 bp, Oryza sativa
  Clone ID: TFbOSC422528j.C1.o3.fg
atggggagggtcaagctcaagataaagaagctggagaacagcagcggccgacatgtcacgtactcgaaacggaggtccgggatcctcaagaaagccaaggagctctccattttgtgcgacatccctctcatcctgctgatgttttcacccaacgacaagcccacgatttgcgttggcgatcacagcagcatagaggatgtcataacaaagtatgcacagcaaactcctcaggaaagggctaaaaggaagttggagagcttagaagccctaaagaagacattcaagaaactagatcatgatgtcaatattcaggactttttaggctcagggggtcagactgttgagatgctgattaagtcaattgtttggcaggaattatcgagccatcttggtgctttgcaatgtcaaatggcagatgtcgaaaagcgcctcagttattggagcgatcccgagaaggttgagaatattgaccatataagagcgatggagcaatctctcaaagaatctctgaatcgcatccggattcataaggagaactttgcaaagcagcatctgatgagcctacagtgtgcagctgctcagttccagaacgacatgaagctcccactaggactaacaggtgacccgaacacttcatcgtggttccatggcggcggcggcgcagaggcgcagcagccaatgatgctacctgaagaccccagcttgctccatcagagagacatcgggtgctcagcgagcacgtcgttgcagagctacccgggctacttcagcatgggcaagcagtccaccgacaacgccggcggcggcgagcagcaccaccacgcggcggtgcagcagcagccggagttcagccaggccgactgcctgacgtcgctgcagctcggcgcgcagttcccgtacccgtcggcgttcgacaacgccgggctgctcagcgaccggctgttcgacaacgcggcggcggcggcggcggcgatggacttcggcggccactacgacctgccgaggcccggcgacgaggccagcttccagaactgggcgtcggcggcctgcggcgccaccatgtatgatcatcagcagcagcagcagcaacagcagcagcctgcccaaattatgactgaatctctgacccccatcagctccctgcagcagcaactgtag

SEQ ID NO: 12954 - DNA, 1254 bp, Oryza sativa
  Clone ID: TFbOSC900368j.C1.o16.fg
atggacgcggtccgtccactccagccagccgatcgcgagtggccccccaacccgacaaaacctcctcgcctttcactcgctacatcgatttgccagccacgctacataaaccgtacaaaaccatatcctcccccatcgcctcgcctcgccgatcgatcgacggacgacggccggaacatagctgtagatcgagctgaatcgccggcggcggccatgggacgggtgaagctgcagatcaagaggatcgagaacatcccgaacaggcaggtgacgttctccaagcggcgaaacgggctgatcaagaaggcctacgagctgtccgtcctctgcgacatcgacatcgccctcctcatgttctccccctccggccgcctcagccacttctccggccgccgcaggatcgaggacgtgctcacaaggtacatcaatctcccagaaagtgacagaggagggtacgtaaacttcttcgacggaaaagtttcacaacgagattttaacctgaacctagcactcttcctcgtgtttgttcttaatctcggtgctcttgctgatccaggagcagtaaggcgccggttaactccaacattgaggatgtttgagccggacccggccaggtctgcatccatggaggacgtcgaggccagcgagaagttcatcgccggcatcctcagccgcgtcgaggagaggaagaggtatttgctgtgcagcatgggctcgttcgacgtgacggcgtcaacatctgccatgcagcatctgtatctaccgcagcagcatcagcacggggacatcactgataatgggtttggaagcgatgaggtggcctcgtgggtctctgaggggatgccgccgacaacctcgtcggtggcgtcgatattcgccggaacttcagattccatgatgtcttttagagatcaagcggtgtacgacacgatgagacaagatgcatgtgtggatcagacagtggtcccggagatggggatgtgccatgtggaccagcagaaccagagtgacgactggcaggcgtacacgtcggcggagttcctcaacgcgctaatcccgcccacgccgttccctctcgacgacgaggatacgatgggcccgatgttggcgtcatcaccgctattgatgcccggcatccatgaccagcagccgccggtggaggatatggcgacggcgggctgctcgcaagcgccggctaacgatggcaacgggttatacgcagctgaggacattgctccggttaacgttggttaa

SEQ ID NO: 12955 - DNA, 303 bp, Oryza sativa
  Clone ID: TFbOSC20924j.C1.o1.fg
atgcacatatacaaagagcaggaggctgaaccatccactggcctgatgatgccagaaccagcacctgctgcttcccccggctccggcagctcagagggctcaagcatcgaggacacagcggaccgtcaggtcaccttctgcaagcgctgcaacgggctactcaagaaggcgtatgagctctccatgctctgcgatgccgaggttgccctcatcgtcttctccagccgcggccgcctctacgagtactccaacaacaggtactgcattcctcttcctctcttcagttctagaaacctgaattaa

SEQ ID NO: 12956 - DNA, 459 bp, Oryza sativa
  Clone ID: TFbOSC21205j.C1.o5.gm
atgaccggcggccgcggctcctcccctccccagtggcgacgggagcggcgggcggtggatccggtgggcgggagggcgggcgaacgcacgggcgaggcccgcggctgtccctgcccggatccgacggcagcgttcctctcctgcccttccccgctcgagggcgacgacgacgaggcgggagcggcggcggcgaccacaatgacgacgatgacgacgacgaggagggagggctctcctctccctactttcgcgaggcgacgaccgggcgggtgcggcgaggcggcggcggcgagggccgacggcaaccggcccccacacgcccggatccggcggcggcggccgtccctcacggcggtgagggtcggcggcgggcgcgacgatgtcgacgacgagttgcggcggccggagtcgtcctactcctacccctacccctacccctgctgcagtgctataggctag

SEQ ID NO: 12957 - DNA, 456 bp, Oryza sativa
  Clone ID: TFbOSC21276j.C1.o6.gm
atgaccggcggccgcggctcctcccctccccagtggcgacgggagcgcgcgggcggtggatccggtgggcgggagggcgggcaacgacgggcggcccgcggctgtccctgcccggatccgacggcagcgttcctctcctgcccttccccgctcgagggcgacgacgacgaggcgggagcggcggcggcgaccacaatgacgacgatgacgacgacgaggagggagggctctcctctccctactttcgcgaggcgacgaccgggcgggtgcggcgaggcggcggcggcgagggccgacggcaaccggcccccacacgcccggatccggcggcggcggccgtccctcacggcggtgagggtcggcggcgggcgcgacgatgtcgacgacgagttgcggcggccggagtcgtcctactcctacccctacccctacccctgctgcagtgctataggctag

SEQ ID NO: 12958 - DNA, 828 bp, Oryza sativa
  Clone ID: TFbOSC101029j.C1.o5.gm
atggtgaagtgtagggcacgcacgactaggaaaaagattgagatcaagcgcggggacaagaaggtacgagatgcatgcttttccaagcgccacactaccatcttcaacaaggccaatgagctcgctatcctctgtggcgtgatggttgctgttgtttttgtctctcccaatgccaatggcgggattttctcatttggctacccatctgtcagctctgtggcaaatcgcttcctcgccaatgctccaaacaacaccagtgtgagtagctcaacccaaagcgggagggatgtggaaatccgtgaactagaacgtgaagaaagagagttgaaagagcatctacaagcttccacagatcagaataagcttctgcgggaggcaatagcagcaagggatggagggcaattgatgcttctcctgcagagtgattgtagtgagttgggaccaaaaggtctggtcagcgccctcatcatcacggcattacacatcgaggggagtagccatccatccggcactgcactgcagccactgccagtgttgggggaggagaagccgtggctcgagatctctctcccagcgccgcgccggcgctggccgtcgcacggctacacgctgccccctgcccccggtctcgcgtggcgcgtggcggcgtccgctctcccccgcgggccgtccgccgtcgcacccgcgcttcgtcacgcgaaacacaaggattctcccgtacgcgcgcggctcgtcgccggtggagtcgcggacggcaagaggcgcgacccgttcagtgcttcgcgtttccatatgccggaccggaccggcctgtggcccatatcttag

SEQ ID NO: 12959 - DNA, 828 bp, Oryza sativa; identical to SEQ ID NO: 12958
  Clone ID: TFbOSC900022j.C1.o4.gm

SEQ ID NO: 12960 - DNA, 417 bp, Oryza sativa
  Clone ID: TFbOSC900028j.C1.o26.fg
atggtgaagtgtagggcacgcacgactaggaaaaagattgagatcaagcgcggggacaagaaggtacgagatgcatgcttttccaagcgccacactaccatcttcaacaaggccaatgagctcgctatcctctgtggcgtgatggttgctgttgtttttgtctctcccaatgccaatggcgggattttctcatttggctacccatctgtcagctctgtggcaaatcgcttcctcgccaatgctccaaacaacaccagtgtgagtagctcaacccaaagcgggagggatgtggaaatccgtgaactagaacgtgaagaaagagagttgaaagagcatctacaagcttcaccctctatagctggctggctggctcggtcatcatccaaaatcgatttatggctctacttgactagataa

SEQ ID NO: 12961 - DNA, 249 bp, Oryza sativa
  Clone ID: TFbOSC422477j.C1.o6.fg
atggggagggggaaggtgcaggtgcggcggatcgagaacgaggtgagccggcaggtgaccttctccaagcggcggccggggctgctcaagaaggcccacgagatcgccgtcctctgcgacgtcgacgtcgccgccatcgtcttctccgccaagggcaacctcttccactacgcctcctcccacaccacaaatttgacaggagcactagatggtgctagggatgaaaacggagcggatacggacggataa

SEQ ID NO: 12962 - DNA, 975 bp, Oryza sativa
  Clone ID: TFbOSC400773j.C1.o108.fg
atgccgcgcgcgaagaccccgatgggcctcatcccgttcccgaagaagcgcgccgcgacgttcgcgaggaggaaggagaccgtgatgaaaatggcgaaggagctctcggtgctctgcgacgcccaagtcgcggtcgtcgtcggcaaccccggcggtggcgcggcggagaaggcggcgtgggagtcggaggagggcagggccaagctggccaaggtccgggaggaaggcgcgttcaagccgtgggacgacgcgctcgacggcatcgcggaggaggagacgcggaagctgcacaagtacctcagcgacaagatcgaggccgcgagggcgagaatggaggcgatgggtctgcagctgggcgacgtcgacgacaacggcgtgaacggcgacgacggcggcggactcgatctgcagcagcacgtcccgccgagcgcttccgacgccaaggagttcgagtccgtgcctgtcgtccatggcggccaatacatcggcagcagcagcggcggcgggggcggtgacatccagatgcagacgacgccggccgcagatggcatcagcttcgccgagcactttctcgtcgcgccgcgcgctcagcccctcgccttcagcaccgccggcgccgacttcatcaacgcaccgaacaacttcctcaccacgggcgtcagcgtcagcgactactcggtgcagagctcgggctacgggatcggaaaccagatcgacaacgccaagcaactcctctatcagatgcaaatgcaatacccagtcggtggcacgggtggcgccgagcccagcaacacgcagacgcagtccccggatttgcggagcttcagcaacgtcgtcggcgactactcgtacacggcggcgcagagctcggccaaccgcctcgatcagatgcatcacccagtcggtggccgtggcagcacgggtggcgccgccgccgatcccagcgacacgcagtccaagaatcgggggagctga

SEQ ID NO: 12963 - DNA, 239 bp, Oryza sativa
  unsure (1)..(239): unsure at all n locations
  Clone ID: TFbOSC32476j.C1.o2.gm
gtcaccttcaccaagcggcggggcnnnnnntcaagaaggcgtcggagctcgccctgctcgccggcgcgagcatcgccgtcgtcgtcttctccgagaccaaccttgcctacgccttcggtgacccatccgtcgacgccgtcctcctctcctacggccccgtccccggggaggatgctgagcccgcacccgtccacagcggcgggttaggcaaggacgtcgacctcgagatgctgaggtag

SEQ ID NO: 12964 - DNA, 717 bp, Oryza sativa
  Clone ID: TFbOSC420031j.C1.o3.fg
atgacaaagcggaagattgagatcaagcgcatcaagaatgaggaagcacgccaagtgtgtttctctaagcgtcgtcctagtgtgttcaagaaggccagcgagctctataccgtctgtggtgcagaggttgctatgcttgtcaaatctcctgctggtaaatttttctcctttggtgccccctctgtcggatttgttcttagccgcttccatgctactactacttctagaaaacactccagtatgggtgttacgatccaacatgataatagtgcaacaatcaaactacatgagttgaatcaacaacacatagagttgcaaaaccaactgcaagctcaaaatgagaaaatgaaagcgctacaagaggttgctaagaaggaaagtgggggaaaagtgatgggttggttgaatagcaaggttgaagatatatgccaagaagatttggaagagttcaagatggtgcttgagtctctaaagtacttgacgagggggataattaatcaactctttcagaattatgctatgttctctaatatgatgcgtgtgcagcattgtgtgaccgctttgcccaatcaacaattccttccgagcagtgaagatgtcaaaccgatgattcaccatgttcctagttcaagttatggatggaacacaagcatagatagcaaacctaattcaagtgatgctcatgttgttggggccaggaggtactttccgaagtga

SEQ ID NO: 12965 - DNA, 1014 bp, Oryza sativa
  Clone ID: TFbOSC413657j.C1.o13.fg
atggggagggtgaagctgccgatcaagaggatcgagaacacgacgaacaggcaggtgacgttctcgaagcggcggaacgggctgatcaagaaggcgtacgagctgtccgtgctctgcgacatcgacgtcgccctcctcatgttctccccctccggccgcctcagccacttctccggccgccgcggggtggaggacgtgattctccggtacatgaacctctcggagcacgacaggggagaagccatccagaatcgggaggagattcagcaagagatatattcttcccagcaacagctgcaaatcaccgaggaccgccttaggatgttcgagccagatcctgcggcgttcggcacatccagcgaggtcgacggatgcgagaagtatctcatggaattgctgacccgagtcgtcgaaaggaagaacaacttgttgagcagtcacatggcgccgttcgatgcaacgacagctgcgatgcagggtgcagatgggacgcagatgtacgtgagccaggcggacgggttggccacgttcggtggtgacgctgccatgtggggcccagatggaggcgcggatcctggccatccgatgttcagtgcatctgatccgttgatctacctcagggaccacgacgtgtacgacgccaactcacaggtggccgggctgcacggcggcgacccgtgcgcggccggcggcgccgcggcggcggcggccgcggtggggtgcgtcgacgacgacgtcgccggaggccacgccgccgccgccgacgcgtggaggcaggcgtacacctgcaccgagttgctctccacgctcatccccaccacgccgttccccctcatgccgcattgcctggggccggaggaccagtacctgtcgatggagcatggcatggtggcggcggcgcaggagccggtggaggcgtcgacggcgagctgctcctacgttcccagcgacgagaactccggcacgccggtcatggcgtacgacagcaacccgccgccggcgaacatcgcctga

SEQ ID NO: 12966 - DNA, 612 bp, Oryza sativa
  Clone ID: TFbOSC20977j.C1.o1.fg
gtaggccagccaagaggggaaaggaggaaagttcaggaggaagaaaaacaccaggggcaatatatagatggactctctccacagctaccaccactccatctcatctcatccttccccaaccattctcttctccttgaacacacccctctcttcctcattataatctcttctttgattagagaggaattagcaaacatgcacatatacaaagagcaggaggctgaaccatccactggcctgatgatgccagagccagcacctgttgcttcccccggctccggtggctcaggtggctcaggctcggtgggagctgagaagattgggagcaggggaaagattgagatcaagcgcatcgagaacacgacgaaccgtcaagtgaccttctgcaagcgccgcagcgggctactcaagaaggcgtatgagctctccgtgctctgcgatgccgaggtcgccctcgtcgtcttctccagccgtggccgcctctacgagtactccaacaacagaggtaaaaagtggtgtacacgagtgatgcacacattgatcattcatgattcttttgcatcatcttcttcaattggaggatgccccatcacgagtgctctgggcccctag

SEQ ID NO: 12967 - DNA, 300 bp, Oryza sativa
  Clone ID: TFbOSC401316j.C1.o12.fg
atggggaggggcaagatagtgatccggcggatcgacaactcgacgagccggcaggtgacgttctcgaagcggcgcaacgggatcttcaagaaggccaaggagctggccatcctgtgcgacgccgaggtcggcctcgtcatcttctccagcaccggccgcctctacgagtatgccagcaccagcatgaagtcagtgattgatcgatatgggcgagctaaggaggagcagcagcacgtcgcaaaccccaactcggagctgaaggagttttgtagcgtcttcatatatataacagagaactaa

SEQ ID NO: 12968 - DNA, 1224 bp, Oryza sativa
  Clone ID: TFbOSC400773j.C1.o107.fg
atggcgcgacgaaagatcccgataggcctcatcgcgcaccggcagaagcgcgccgcgacgtacgcgaagaggaaggagagcctgaggaagaaggcggaggagctctccacgctctgcggcgtccgcgtcgcgttcgtctgcgcgggccccgtcgtccccggcggcggcggcggcgcggcggggaaggaggaggtgtgggagtcggaggagggcgtcctcgcggagtaccgcgccctcccgccggaggctcgcgcgcagcacgcgcaccgggtgtacctcgaggaggaggtcggcaaggagagggccaagctcgccagggtgaggcaggacggcgcgttcccgtcgtgggacgccgcgctcgacggcatcacggcggacgaggcgcgggcgctgctcgagtccatcgacgcggcgagggcggccgcgaacgcgaggcgggaggcgctgggtctgccggacgacggcaacggcgtggacgatgacggcggactagatctgcagcagcagcaggagcacgtcccgccgggcggttctgacgccgtcgtcgtgcctgtcggccatggcgtcctccaatacaccggcagcggcggcggcaaccagatgcagacgacgccggccgcagatggcatcaactgcgccgacctgtacggcgccgttccgtgggatgacaccttccagccgcaggtgatgcgcaccggtgaccacttcgtgcccatggacggctacctgtggcaagccccgggcaatggctggcccgatctcgccacggggtgcaccaacgagtcgtgctcgtgcaacgccgccgccgccgcagccgccatgccagccatgtatccccccaccctagacaccgtccacggaagctttctcgccgcgccggctcaacccatacccatcgcattcagcaccagcaccgacttcatcgacgcgccgaacgacttcctcaccatgggcctgtgtggcggcttcaccaacgtcggcgactactcggcggcgcagcctcagagctcggccgatggaggattccagctcggtgacacgttcgccgccgagcccggcgacacgcaatcccagaattgggggagcttcatcaacgtcgtgagcgacgactcggcgcagtgcaactgcaacgccgcaatccatcttgatcagatgtattacctattcggtggcacgggcggcggcgagcccagcgacacgcagtcccggcattgggggagctga

SEQ ID NO: 12969 - DNA, 657 bp, Oryza sativa
  Clone ID: TFbOSC401113j.C1.o5.fg
atggtgaagggaaagggaagggctggcaggaaaaaggttgagatcaagcgcatcgaaaaaaaggatgcacgtgacgtttgcttctcgaagcgtcgccaaaccctatttaataaagctggtgagctttcattgctatgtaatgcaaatatagctgctgttgtgatttctcctgctggtaggggtttctcctttgcccatccctctgttgatgatgttgctgaccgcttggcctccatggccatgggcattcccaataaccattccttgggtggtgggtaccatgatagcggtgaggtgacaaacatagcgcaacagcagaaaattgaatatgtggagctccaaaagtcattggaaaagtcggaaaagaagaagagggttcaggaggcaatggagaaggagagggcaggacatcttatgcaatcactgacttctgaagttaatctcctggggcaggatgaattggaggagctgcacaacaaactctcagctctaccttacacttccattgcaaagttctaccaggtactgcaagatgcaaagggtactagaatgccattgccacagccacatattgaaatagcatgtcaatcacaatttctatttgaagagcaggctgtcacacccgcaaatgctgattttccgggatctagcacatga

SEQ ID NO: 12970 - DNA, 858 bp, Oryza sativa
  Clone ID: TFbOSC401196j.C1.o47.gm
atgcggcggatcgaggacacgacgaggcggcaggtgacgttctcgaagcggcggaaggggcttctgaagaaggcgtcggagctgtcggtgctgtgcgacgcggaggtggcgctgctcgtcttctccccgcgcggccgcttcttccacttcgcctccgctccctcgtacgccaccatcccgccctcctccttcttccctactactgcatggctacctccttgttgtcatcaaggagggccagctccttgccggcggtgggcgaccggttgcagcaacgctggggacggcggttgcagcggcgccggggacgatggtgatggggacggaagcgctaggacaccggcagtggaggggcggtgggcggttggacgaggcggcggtgctgcaggcaacgaagccaggacgccggcggtggaggtgtggttggcagagcatgggaagggcggcggcgctgcaggcgacggcgccagtacgccgacggacaccgatgatggaggcattgtgagcggaggacggggagggcggcggcgcggcgggcaacggcgccaggacgccggcggtggaggcgtggtgggcggacgatggggaggacggcggcacagcaagcgacggcgccaggacatccgcggtggtggcgtggtggtgaacgacggggaggacggcggtgcggcgggcgacggggtcaggatgtccgcggtggaggcctggtgggcggacgaagggaagggcggcggcgctgcgggcgacggcgccaagatgccggcgatggaggcatggtggggggcggagccaggacgccggcggtggagtcgtggtggccggatgacggggagggcggcacctggtcgccggcggtga

SEQ ID NO: 12971 - DNA, 921 bp, Oryza sativa
  Clone ID: TFbOSC401478j.C1.o10.fg
atggctcgcaagaagatcgtcctggaccgcatcgccaacgacgcgacgcggcgggcgacgttcaagaagcggcggcgcgggctgctgaagaaggcgagcgagctggcgacgctgtgcgacgtggacgcgtgcctggtggtgtacggggagggggacgcggagccagaggtgtggccgtcgacggaggtggccatgaacgtgctgcggcagttcagggcgctgccggagatggagcagtgcaagaagatgatgaaccaggaggacttcctccgcctccggatcggcaagctcaaggagcagctgcgcaagatggaccgcgacaaccacgagcgggagacgctcatcctcctccacgacgccctccagggacgcctcggcacctacgagtccctctccgtcgagcagctcaccagcgtcgactgcctcgccagcgccaggctcaaggtcatcaccgaccgcctcgtcgagatccgcgcccccaacgaggacggccaggtgctcgttcccccacctcctcctcccccgccggcgctccccgctcctcctccgcctccggcgccaatgcttcctctcgcgccgccgccgactcatgttactccggccatgccgctgtcttctatgccgccgccggcgttccacgggatgaaccaccaccaccaccagaaccacttcatcaaccatggcggcaacgaccagaacgcctggctcatgaacgtcgccaggaacggcggcgacctcggcgccctcgtctacagcgccttcgccagcagctcctcctccaacaccggtggcgccggcaccagcgccgccggcgccgccgccccgggccctgacatgatggatctcgccaacccggacatgccgggattcgggtgtccctgggacgacgattctgcggggccatctttccctcccatgtaa

SEQ ID NO: 12972 - DNA, 627 bp, Oryza sativa
  Clone ID: TFbOSC401721j.C1.o14.fg
atggcgatgcaggtggcggcgccgtcgcggaggaggccgagcttggggcggcagaagatcgagatccggcgcatcgagagcgaggaggcacgtcaggtgtgcttctccaagcgccgtgccggcttcttcaagaaggccagcgagctgtccattctgtgcagcgccgacgtggccgccgtcgtcttctcccccgccggcaaggcctactccttcggccacccctccgtggagtgcctcctggagcgattcctgccggactcgtcgtcgggagcggcggcgcgggtgcggcgaggagcgaataataatggtggtggtgggatggtcggggagctcaacaggcagtacggcgagctgcgcgcgatggtggaggcgcacaaggcgcggcgggagagggcggacgagaagatagagatggagcgcgcggcggggaggtggctgcccatggacgccgatgtgcgccgcatgtcgccggaggagctcatggctttcgggacgggcctcatggctgtgcaggctgccgtctccgcgcgcgccgaccagatgctgcgcgacgcgctcctcattggccgcaggccgcccaccaccaccaccgccggcttcggcttcttccacatgccacactactga

SEQ ID NO: 12973 - DNA, 627 bp, Oryza sativa
  Clone ID: TFbOSC900422j.C1.o13.fg
atggtgacggcggcagcggcgaggaggcggccgagcctggggcggcagaagatcgagatccggcgcatcgagagcgaggaggcacggcaggtgtgcttctccaagcgccgtgcgggcttcttcaagaaggccagcgagctgtccatcctgtgcagcgccgacgtggcggccgtcgtcttctcccccgccggcaaggcctactccttcggccacccgtcggtggagttcctcctggaccgcttcctctcgtcgtcgttgcccgcgacggccgggaaggaggaggggtcgtcggtctcggtggtggcggagctcaacaggcagtacggcgagctgcgcgcgatggtggacgcccacaaggcgcgccgggagagggcggagaagacgatggagaagcagcggcagcggcagcccgcggcgtggatggatccggaggcggaggtgggtcgcatggcgccggaggagctgatggccttagggacgaagctggtggccgtgcaaggtggcgtggcggcgcgcgcggaccagatgctgcgtgacgcgctgcttcttggccggaggccgaacaccaccaccaccaccaccaccagggcgccgcccggcttcttccacctgcacccgcacttctga

SEQ ID NO: 12974 - DNA, 1815 bp, Oryza sativa
  Clone ID: TFbOSC18908j.C1.o2.fg
atgccgaggagggcgaggaggaccggcgcggcgtacgtcgacgacgagagggagcgcgacatcaccttcttcaagcggcggaacgggctgttcaagtgcgccagcgacctctccatcctcaccggcgctagcgtcgccgtggtcatcgaggaccagaaccgcagcaagttccacgcggtcgggacgccgacggtgcaggccgtcgtcgacgccgccctctcaagcgacgtggaggaggcggcggctgaggcgcggccggtcgccgacgagcagctgatggagaggatcgcgccgctggagagggagctggcttggctgaagggtgaagctgccgagaaggatgagacgacgaaagcatccaaagctcggttcaagatggcccagaagaaggaggagaacgaagaggagggtgacacgaagaagaagaagctcttcttctccaaggccgacaagctcagctcagacgagatgaatgaactgttagctgagatgcttgagatcaagaaggaactcaacgtgcggctacccccgctacgtcgtcgcggtggcaagcggccaatccagggctctagcgtgccacctccaccgccgccgccgccaccaccgccgcagccggagcaacagctgcagctgccgcaatggccgaatctgtccggtcctcataaccagttgcttcctgtggcgccgccgccatttgtcgctgatcagccacctccacctccaccgccagcagcaggagggtctctctggatccctgagctgcctccacctccggtggaggggtcgccatgggctggtctgcttccgctgcgaccaccacggtttgccgggatggagccatcctttcttgaatcacagcaagctccgcctccggcacaggtcagcacacagctagcaccactacctctgatacgggaggaagctccattgctgcaggagccatttctgtttgctgatcaagcaccagtacttgctcctctgccggcgccattgcagatgcctgtggcagaaactcacttgccactgcaggctccattgctgcaggagccatttctattctctgatcatgcaccgacgcttgctcctctgccatcgccattgcagatgcctgtggctgaaactcacctgccactgcaagtgcaggctccgttcatgcaagaaccatttctgttttctgatcaggcaccagtgcttgctcctccgccgacgccattgcagatgccagtggaagctcacatgccactggaggctccatggatccaagaaccatttctcatgcctgatcaagcaccggtccatgctcctccaccaacgccattgctgatgccagtgggagctgatcacttcccactcgaggctccattgttccaagaatcacttataatggctgatcagaaatctgtgcatgctcttcctccacctccattgcagatgcctttggaagctcacctgccacctgcagcacaagagtataaccaagatctggccgtgcagcagcaaccccaagagtatgaaaactatgactacatgtttgagaacgtggggctctcacaggcacagccggtggccgctggcgccggcgacgcaggctttgcagctataggcaacgacgacaacccgttcggctaccaacagttggttgcctctcctctctatgatggacagatctacttcggctccggggttgataacatgggcgttcctcctgctggtgattttggtggtgttcctgaagctgctttgccggaagtcgagcatgcgtcttcgtccggttggggaaacaacattactggtgatgctggtgcatggttctga

SEQ ID NO: 12975 - DNA, 234 bp, Oryza sativa
  Clone ID: TFbOSC900209j.C1.o10.fg
atggttcgtgggaagaccgtcatcagcaggatcgagaacacgacgagccgccaggtgaccttctccaagaggaggagcgggctattcaagaaggccaaggagctggccatcctctgtgatgcccaggtcggcgtcctggtcttctcaagcactggccgtctctatgactactccaactccagtaattctcgcaatcttacctatgatcagttattgggggataccgtctgttaa

SEQ ID NO: 12976 - DNA, 1353 bp, Oryza sativa
  Clone ID: TFbOSC419793j.C1.o3.gm
atgacgctcatgtcagcgatgacatggctgccacgcaagatcgacgcccgcaagcacgggaacggcagttaccagcgaaccacgcaaccgaggggcggacggtcttcacctcgctcctgcgatcccgagggtggcgacggtgaacgaaggcggcgatggacggcgacgaacggcgcggctgaagatggaacaaatcggcttcacggtgacgacggtgctccgatggcttgcgtcttcgcggaggtggctgccgggcttctcctcactgctgcgatgccaacagtggatacggcgaggtccggcgaccacggagtcgacgatggatggttgctggaggcgtggcaaagaccgaaagcgtcggctctcacccttgcgaagccgagggaggcgacggcgcagggagggcacggcggccagtgggccgtgctgaggaggactatggaggcagcaagcggcgaagaggaggacggtggaggcagtggatatgaacggagaatcgtgctggccatagctcgtcagaaggtgaacctacagcggctcgccaactacacaattcgtcgggcgatgttcaagaagcggcaaaagagcctaatgaagaaggcaagcgagctctcgacgctatatggcgtggatgcatgcgttgtgatgtatgctgaaggcgaggcgcaacctatgatggtgtggccatcggtaccagaggcaaggcgtgtgatcgagcgcttcagggccttgccgcagaaggaccaatacgagaacacgactaacctggagggcttcctcaagcagcgcatcgccaatctccaagagaaggtggataaggcaaagcatgagaacgatgagctcgagacaaagctcctcctcctcaacagccttgactgctgcctccctagccttgtgggcctcacggtcaagcagattactagcctcaactcgatggtagaggaacgcctcaagaagctccgtgggaatggtctcctggcgacaccagtcccaaccagctcgaagaagaaaattatatgggatgtccggtacaacctcaaagcgaggtatgtcacggatgattctgccaagaatgggccgccgtcgcgccaatccaccgccatccccagcttcgccgccccgcaggcaagctcggccaccacactgctcctccattccatccccctagccgccctctccactatgaacccaagccgccaccaactctaccgcctccggccgctgttgggcgccactcctgaccacccctcgctgcgccacgccaccaatagcttcgtcgtctcgcaccgcaccttagccattgctcccccagacccaatcaccaccgaaaccctcccctccccatcaacgtga

SEQ ID NO: 12977 - DNA, 1143 bp, Oryza sativa
  Clone ID: TFbOSC102307j.C1.o3.fg
atggagagccaaatttgccaatttggtacctttctagaagtcaacaatcagcattcagcaactccaaaaggaaaaaccattccagttaaatgcacagactgcctcccaggagtggcttcccgctcgctcaccgtaatcccacttgaagttccacacgacgttcttctttctgcaagggaagccaaaactcaatacaatagcacatttgaacacaatctcagtgagaccaacttcgtaactggtacttacaatggagctcaccatgccaatgtgaaggatgtaccacctgacatttatgagacagaatttaggcatcaatttccaaggattgaaacttctttttcaatcattggagcacatttcctgtcaagtatggtgaggaggggtagaaggaaaggcgtgaggtacatcgaagaggatagagatcgcagcctcaccctcagcaagaggcgtgatgggctgttcaagcttgcaaatgacctctcccttctcactgatgcaagcgtcgcaatttgcctacatgacagcaataaggcacaattctttggggcaccatcggtgaaacctgttgtcgatgcttttgtatctgaggcagagccatttgccgatgaacaactgaaggccaagcttacgtcaatgcaaagtgagctggtccagctagagaatgaagaagaagagaaggacaagaagactgaagaatcaatccagcgcttcaaggaggcccaagaagagagcttaggtatgggtatggccaagcatctattctccaggctagaggatctcagccacgatgatatgcgtgaacttttagatgtactcttgccgctccagcaagaattcaagaagcggctgcctcccctacgtcgtgggcagcaaagcctgcccaaaaatttggggttgggggaatttccaaaaaagccacccgctgaagtgcaagcatgcactcccgtagagcaacctcaaaatgacaatgcagtccataccccaaccttcagcgacagtttccttttggagttgttggctgatgtcagcgatgatggcattgctactgctgaaccattgtgttctcctcctattgatgaccagtttttggctgacatcgactggcttgctgaattggacactatcgatggaaatttatag

SEQ ID NO: 12978 - DNA, 1449 bp, Oryza sativa
  Clone ID: TFbOSC400618j.C1.o20.fg
atggagagccaaatttgccaatttggtacctttctagaagtcaacaatcagcattcagcaactccaaaaggaaaaaccattccagttaaatgcacagactgcctcccaggagtggcttcccgctcgctcaccgtaatcccacttgaagttccacacgacgttcttctttctgcaagggaagccaaaactcaatacaatagcacatttgaacacaatctcagtgagaccaacttcgtaactggtacttacaatggagctcaccatgccaatgtgaaggatgtaccacctgacatttatgagacagaatttaggcatcaatttccaaggattgaaacttctttttcaatcattggagcacatttcctgtcaagtatggtgaggaggggtagaaggaaaggcgtgaggtacatcgaagaggatagagatcgcagcctcaccctcagcaagaggcgtgatgggctgttcaagcttgcaaatgacctctcccttctcactgatgcaagcgtcgcaatttgcctacatgacagcaataaggcacaattctttggggcaccatcggtgaaacctgttgtcgatgcttttgtatctgaggcagagccatttgccgatgaacaactgaaggccaagcttacgtcaatgcaaagtgagctggtccagctagagaatgaagaagaagagaaggacaagaagactgaagaatcaatccagcgcttcaaggaggcccaagaagagagcttaggtatgggtatggccaagcatctattctccaggctagaggatctcagccacgatgatatgcgtgaacttttagatgtactcttgccgctccagcaagatttcaagaagcggctgcctcccctacgtcgtggcagcaagctgcaaattggtggatcaagtgcgtgggcacatcagcagccctcgtgttctcgcttcttggcctcacaccgtccattcactccattacttcctggagggacatcaggagttccgatgatacctccgcctccagtgccgggctcaccatggtctcagatatttccgctacggccaccactgtttccttctccagagttagtgccatcccaacaattaccaccagtatcaccgccgcagaacacagtggcacctcctccaatgcatgctccattggtgcaacagccacttactaatcaatcatcggcggttcccctgctgacgcaatggcaaatgcgttttggggatcagccacccgctgaagtgcaagcatgcactcccgtagagcaacctcagaatgacaatgcagtccataccccaaccttcagcgacagtttccttttggagttgttggctgatgtcagcgatgatggcattgctactgctgaaccattgtgttctcctcctattgatgaccagtttttggctgacatcgactggcttgctgaattggacactatcgatggaaatttatag

SEQ ID NO: 12979 - DNA, 720 bp, Oryza sativa
  Clone ID: TFbOSC900043j.C1.o3.fg
atggcggcggcggaggcggcggcggaggcggcggcggcgctggaggggagcgagcccgtggacctggtcaagcacccctccggcatcatccccacgctccagtttagcttggggggttactacatgtttgaggttctgatttgcttgattgatgaaaaaggggggcgatctgagatccgcgagtccgaaaaagtcgagcatgcttatattgctgcttgtcatagtgtacctgcttccatgtgttctcacaaaaacatcgtgtcgacggtcaatttggattgcaaattagacctcaaagctatagctttgcaagcacgcaatgcagaatataatccaaagcgttttgctgcagttatcatgagaataagagaaccgaaaactacagctctgatatttgcatcgggtaaaatggtatgtactggggcaaagagcgaacaacaatcaaagcttgcagcaagaaagtatgctcgtattatccaaaagcttggctttgctgctaagtttaaggacttcaagattcagaacattgttggttcttgtgatgttaaatttccaatcaggctggagggacttgcatattctcatggtgctttctcaagttatgagcctgaactctttcctggtctgatatatcggatgaagcaaccgaagattgttcttctgatttttgtttcaggcaagattgttttgaccggagcaaaggtatgcagtgtgtggtag

SEQ ID NO: 12980 - DNA, 726 bp, Oryza sativa
  Clone ID: TFbOSC423203j.C1.o9.fg
atggcggcggcggaggcggcggcggaggcggcggcggcgctggaggggagcgagcccgtggacctggtcaagcacccctccggcatcatccccacgctccagtttagcttggggggttactacatgtttgaggttctgatttgcttgattgatgaaaaaggggggcgatctgagatccgcgagtccgaaaaagtcgagcatgcttatattgctgcttgtcatagtgtacctgcttccatgtgttctcacaaaaacatcgtgtcgacggtcaatttggattgcaaattagacctcaaagctatagctttgcaagcacgcaatgcagaatataatccaaagcgttttgctgcagttatcatgagaataagagaaccgaaaactacagctctgatatttgcatcgggtaaaatggtatggtatgtactgggggcaaagagcgaacaacaatcaaagcttgcagcaagaaagtatgctcgtattatccaaaagcttggctttgctgctaagtttaaggacttcaagattcagaacattgttggttcttgtgatgttaaatttccaatcaggctggagggacttgcatattctcatggtgctttctcaagttatgagcctgaactctttcctggtctgatatatcggatgaagcaaccgaagattgttcttctgatttttgtttcaggcaagattgttttgaccggagcaaaggtatgcagtgtgtggtag

SEQ ID NO: 12981 - DNA, 675 bp, Oryza sativa
  Clone ID: TFbOSC400049j.C1.o46.fg
atggctgccgcggcggtggatccgatggcgctggggctggggacgagcggaggaggaggaggaggcgagtcggcggtggggggtgatggggcggagccggtggatctcgtcgagcacccctccgggatcgtccccaccctccagaacattgtttcgacagtaaatctggactgcaggttggatctgaaaaaaatcgctctacaggctcgtaatgcagagtacaacccaaagcgttttgctgcagttatcatgaggataagggacccaaagacaacagccctgatatttgcttcgggaaagatggtttgcactggagcaaagagcgaagaccattcaaagcttgctgcgaggaagtatgcgcgaatcgtccaaaagcttggcttcccagcaaagttcaaggatttcaagatccagaacattgttggttcatgtgatgtcaaatttcctattcgcctggagggccttgcttattctcatggcgcattctctagttatgagccagagctcttccctgggctgatttaccggatgaagcagccaaagattgtgcttctcatttttgtctctggcaagattgttctcactggagctaagtaccgcaaagagatttacgctgcctttgagaacatgttcccggtgctcactgaatacaggaaaactcagcagcgctggtaa

SEQ ID NO: 12982 - DNA, 780 bp, Oryza sativa
  Clone ID: TFbOSC900102j.C1.o17.fg
atgcggcagcggcgacacgggagaagaggagggaaggcggcggcaggagcacgaggtgctaaagcagcctccattaaaatcgagcagacgaagccgaggcggatttcgcaagagctagcgcaagcgtcggccatggaggaggtcgtcgtcggcaaggagcgcaagcgcccgcgctgcgcgctcgtcggcgtcggcggccacgacagcgacgtggcggatgagcccggtggcgtgcgggcgagaaggacaagcacagcaagactgtcggtgccaacgtccatcgcgttctacgacatccaggaccgcctcggcgtcaaccgaccaagcaagtccatcgagtggctcatctgcgccgctctcgtcgctcgactcctccttcgtcctccccaacgccgcccagctcctcacccgcggaggccgtcgagcgggcagccttcggaggaacaggcgcgcacgaggaaggctacggtggcggtgtcacctgggaagtcgggggagaagaggcggaagacgaggtcggggtgtgcagcgcggaaggcggagcgcatcgcgaagttgagagtgtggagggaggggtggatgccgaggcgcgaggcgagcacctcggcgacgtcgggcggccagagctggatcaggaagccgtcgacgccagggagcggcgactcgtgctcgtgctccgatgcgaagccggggaagcggcggtgggcggagaaggccggggaggtggtggcgcgggaagccgatggcgcggagcggggtggtggcggacgacgacgatga

SEQ ID NO: 12983 - DNA, 1089 bp, Oryza sativa
  Clone ID: TFbOSC400226j.C1.o13.fg
atggcggctactacgacgggacgagttgttgcactcggcgcggtggccgtggtggtggcgctgacattcctcgccggcggcgcggacgccgactgctacgacttctgcttcaaggactgcatggccagggagaacaacatggtcgactactgcagctacgcctgcgacaagacgtgccagccggacaagcccacgctgtactcgtcgtcgtcgtcgtcccgcctcgccggcgacatggagtgccaactctcctgcgccttgggctcctgccaccgcctccttccggacggcaagggcgccgtggaggcctgcttcgggcagtgctacgacggctgcaagaccacggcggcggccagactgccgaggcctctccgcgccggccactacgtgctctctagtccccctgatgacgtagaccatgatccggaccaccgctacgtgttctctagcccccatgatgacgtagaccatgatccggaccaagtgttcgctagtccacctgacgacatagaccgccatgtattcgctgctcctcctgatgttctcgctgctcttcctgtggttttgctgacgtggcatcctagtcatcgaaaaaaattaaaaaaaatacatgagggcccacatctaacgcgggagctcggccacaagtccgacggtgaaaccgtccagtggctgctccagcaggcggagccggcaatcgtcactgccatggggacgggtgtcggcgctgacatccgtcgcaccctccctcccttccccaaactgcgccctctccaggttgcaccaccaccaccaccacatgtgggctgccgccgcggcgttcgccggtgccacatcgggttcgcgaccatgttcgccgcccacgtggcggcggccatgccggggctagagctaggacactcacaggacggccacattggcgtgctcttcgcccggtcgctcagccagttctaccaccaggtcggcggcgccagtgccactggtcaactgccacacccgcaccaccatcaccaacaccatcaacagcagcaggaggacggggaggatgaccgcgatgacggcgagtccgatgaggagtccgggcagtag

SEQ ID NO: 12984 - DNA, 837 bp, Oryza sativa
  Clone ID: TFbOSC100867j.C1.o5.gm
ttctacgacctccaggaccgcctcggcttcgaccagccgagcaaggccatcgagtggctcatcaacgccgcctcccccgccatcgacaccctcccgtccctcgaccccgccgccttcgccgccattccccacgccgccgccgacgccgcgcccacgcggcggcgttcgcagcagcagcagcagcagctcagcaacaagtccggatgcagtagcacgtcggagaccagcaaggggtcggacaaggaggtcaccgtggcgagcgccccggcgcaggccgcgtcgttcactgagctgctcattgctggggtggcggcgtcgtcggcggggggtggcgccattggcaacggcgccgactgcgtgggcatcgcgcaccccgggaaaggaggcgcggagggggcgtccacgtacggcttctccgccgcctcgagcttcggcgacgcgccaccgatcggcatggtgccggcgccgccgttcaacttctccgcccccggcgccgacatggcggcgcactactcgctcgcccaggaccagctggcggcgcctccgcctcctgccggaggcgactacaacctcaacttctccatgtcctcgggtttcttgggtgccaatagggggacccttcagtccaattcgccgtcgaacatgtccggccaccaccaccaccaccatcagcagcagctccagaggctggacggctccaccatttccttcctgcttggccacgccgccgcggcggcgcacccggcggcgtccgagggccagatcaccagcaccgccgcgttgcagctgtgggatggattccgccactccggcatgaaggagaagagcaagaactga

SEQ ID NO: 12985 - DNA, 485 bp, Oryza sativa
  Clone ID: TFbOSC401000j.C1.o10.np
agagcacggccaggggaggcgccggaggtgcgtgaggtgtggggaccgtcggaggatgcggcgggtgcacgccgcgagggagaggatccgctgtcagtagcagtagatgcaggtggtagcggtggcggtggaggagaggaggatctgacgcgggagctcagccacaagtctgacggcgataccgtccagtggctgctccagcaggcggagccggcaatcgtcgccgccacggggacggggaccataccggtgtcggcgctgacatccgtcgcaccatgccagggctagagctaggactctcataggacggccacatcggcgtgctcgccgcacagtcgctcagccagttctaccaccaggtcggcggcgccggtgccaccggtcaactgccgcacccgcaccaccatcaccaacaccatcagcagcagcaggaggaccgggaggatgagcgcgacgacggcgagtccgatgaggagtccgggcag

SEQ ID NO: 12986 - DNA, 757 bp, Oryza sativa
  Clone ID: TFbOSC401539j.C1.o115.gp
cggggagctcgtcgatggcggccttggcgttgcgcatgagccagtcgacggccttgctgggccggtcgtagccgaggcggtcctgcacgtcgtagaaccggatggcggtgtgcgcggcgaggcggacgcgccggtcccgcagcccgcgcgccgtgcacaccttgctgtgccggtccttgcgcccggccgcggaccgcacgatgcggcctgccccgaatgcagtggccagcgcttcgacgggcgtcgactcgccgctgctgccgccgccatcgccgccgccgcctccacctcccggcccccggctcgccggctgcctgatccggtgttgcaggaagctgccgaatccctgctgctgctggtagatctgaagctgctcatgcgcttgctgcgccctctccttctcctggagcaggtagtgcaaggtgctcgcgctggcggtagggttgctcgtccaagggtctaagcccttggacaactggttcttgtcttcctccagcttgagctccctctcacccacagttaaccggaaaggagaagagcgaaaattaaaacaagaagctaaattctattcctgcatggggtttgccaagctcagctcagctcagctcagctcgccatcctgatgagagggaaaaaagatacagtggccatgggaaccccacagctccatgggcagagcaagcacgcacacacacagtcgcagcagcttaatagctatagcggcgcccagtgcagccgcccggccggcctctctttt

SEQ ID NO: 12987 - DNA, 711 bp, Oryza sativa
  Clone ID: TFbOSC401978j.C1.o39.gm
atgacgaccaggccagacggcggcggtggcggtggcggcgctccggacaagcagctcgtcccggcctccaacgccaatggcaccgccctcgccgttcgcaagcctccctccaaggaccgccacagcaaggtcgacggccgcggccgccgcatccgcatgcccatcatctgcgccgcccgcgtcttccagctcacccgcgagctcggccacaagtccgacggccagaccatcgagtggctcctccgccaggccgagccctccatcatcgccgccaccggcaccggcaccaccccggcctccttctccacctcctccccttcctccctccgctccaactccacctccaactccaacgacctcctcctcccccgcgccgcccccttcatcctcggcaagcgcctccgtgccgccgacgaccacaccacttcgcccgcgcccgctcccgacgccaccgcccccacccaggccttctgggcgctcccggccagggctgacttcggccagctctggagcttcgccgccgcgccggagatgatggtcgccgccgccgccgcacccgccatgcctggggaggcgtccgccgccagggtcggcaactacctccccatggcgcagggcaacctcaaccttctcgcctccttctccggcggcccaggaggcgccggggccacggcggcgaccggccgacccgaggaggagagcgcccgctga

SEQ ID NO: 12988 - DNA, 1227 bp, Oryza sativa
  Clone ID: TFbOSC900102j.C1.o14.fg
atggacgtcgccggagacgccggaggtggccgccgcccaaacttccccttgcagcttcttgagaagaaggaggagcagccgtgctccagctcggctgcaggaggtggtactgggccatcatcggcgggtggcaacgggaacaatggatcgggaccgggcggtgccggaggggagatgcagctgcggaaggcggcgccgaagcggagctccaccaaggaccggcacaccaaggtggaagggagggggcggcgcatccggatgccggcgctgtgcgcggcgagggtgttccagctgacgcgggagctggggcacaagacggacggcgagaccatcgagtggctgctgcagcaggcggagccggcggtgatcgcggccaccggcaccggcaccatcccggccaacttcacctcgctcaatatctccctccgctcctccggatcgtcgctgtccgccccggcgcacctccgcgcgttacctagccccgccgccgccgcccggttcggatcccgtgcggacgcgtgggaccgggttgtcagcctcgggttcccgtccgagggccccgcctcgtcgtcctcgtcgccgtccccgcttctgttgaacttccactcgggcagcgtcggtctcgatgtgcaaccttcgccttccgccgctgccgccgccgccgacctctccaggaagcggcgctgggagcaggaaatgcagcagcagcaacagcaacaacagcagcagcagcagcagcagcagcaacagtaccagcagcagatggccgggtacacgcagagccaaatgccgggcaccgtgtggatggtgccgagcaacagcacgcaaggaggtgggccgtccggtggtggcggtggcggcggaggaggcagcggggagtccatttggacgttcccgcagatgagcagcgccgccgcggccgccgccgtgtaccgggggagcgttccgagcgggctacatttcatgaacttccctgcaccgatggcgctcctaccgggacagcagctggggctcggcccagttggaggcggcggtggcggtggaggaggcggggaggggcacatggggatccttgccgccctcaatgcttaccggacacaggcggcgacggatgccgccggtcagcaaggcggaggaggaggtggaggaggatctagccagcagcaacacggaggcggcggcggcggcggcgagcggcatcagagcataagcaccagcgactcgtag

SEQ ID NO: 12989 - DNA, 981 bp, Oryza sativa
  Clone ID: TFbOSC900234j.C1.o8.fg
atgggcgcgggctggcagtggccggccggcggtggcgggatggaggcggccgggcgcgggctggcggcagccaggtctaatcatgagcagctcaagatgacaagcaataacagcacgaatgaggagctcggcggcggcggcaggaaggcggccgacaagccgagcggcggcggcggcgccgccgccgccgtggcgagctcgcggcactggtcggcgtcgacggagtcgcggatcgtgcgcgtgtcgagggtgttcggcggcaaggaccgtcacagcaaggtgaggacggtgaaggggctccgcgaccggcgggtgcggctgtcggtgccgacggcgatccagctctacgacctgcaggaccggctggggctcagccagccgagcaaggtggtcgactggctgatcaacgccgcccaggccgagatcgacaagcttccgccgctccagttcccgccgcacgaccacgacctcgtcgccgccgccgcctcgtccatggcgccgccgccgttcgcgaacggaggcgacggccaccacggcgcctccgcgtcgtcgatgctggaggacggcgacaaggccgccggcggcggcggcatgaaggcgttcatgagcctgagcaactccctcggcctgctcaacgccgccaccatgccggcgacgttggccgctcaccaccaccaccatcatcacgccgcggcgtactacgccgccgccgaatcttggggcaacggcggcaatggtggccaccaccatgatgtcagccatggcgtctcgccttcggctcacaactcgccgttcccgtcgctgctgtccttggcaccgggctctcatcatcagttcgtcttctactcgccggaaggcggcggattcgccgtgaaagaggctgcagccgagcagtttcctgtagatagcctcgaccactcgcaagggcagctcacactgagctcagcaagaagcttccttcactctggaagccagggatga

SEQ ID NO: 12990 - DNA, 1374 bp, Oryza sativa
  Clone ID: TFbOSC401539j.C1.o92.fg
atgtcgggatttactaacaaagatggcaggcagaatttagcttcttgttttaattttcgctcttctcctttccggttaactgtgggtgagagggagctcaagctggaggaagacaagaaccagttgtccaagggcttagacccttggacgagcaaccctaccgccagcgcgagcaccttgcactacctgctccaggagaaggagagggcgcagcaagcgcatgagcagcttcagatctaccagcagcagcagggattcggcagcttcctgcaacaccggatcaggcagccggcgagccgggggccgggaggtggaggcggcggcggcgatggcggcggcagcagcggcgagtcgacgcccgtcgaagcgctggccactgcattcggggcaggccgcatcgtgcggtccgcggccgggcgcaaggaccggcacagcaaggtgtgcacggcgcgcgggctgcgggaccggcgcgtccgcctcgccgcgcacaccgccatccggttctacgacgtgcaggaccgcctcggctacgaccggcccagcaaggccgtcgactggctcatgcgcaacgccaaggccgccatcgacgagctccccgaccgcgccgaggccccgccgccgcccgccgcggcgtcgacggagcagcccgaggccaccgagcaggcgacctcgacgtcctacgggttcggcaacactaccggcggcaccatgaccagcgccgcgtcggccgctgctggctccttccttccacattcgctgggggcagatcgagtctccgacagcgtcaagtccctgttcccctcctcgtccacagccagcggcgccgcctccgccggacacgacgagtacaggggatccccgccggacctcctgtcgcgcacgacaagcaaccagcagccgcaggagctgtgcctcaccctacagtcgaaccagcaccagatcttcagccatgtctcgtcgaaccaccacggtatgatctcgagtgcaggcgttccaggttggcccgaccacagccagagaatgcaggcatggcatgccccggagaacagcacaggagacggccgcggcggcggcaatggcgacggctacatgttcgccatgccgtcgcggcaagggctggaccagagccagctcttctcgcatggggaaccccttcagtccagcggtcgcgggtgggcgtcagcccgcgcatggctagaccccctcgcagtcgcagccatccaccaccagccgtcgacaatggctgccggacaggtcggcttcggccatctcgttggcggcgccggtggcggcggcgggtttatggggtttctcgcgccggcggcgcagcggcttgagggcgaggaggagcacggaagtgaggtgatcaggtga

SEQ ID NO: 12991 - DNA, 423 bp, Oryza sativa
  Clone ID: TFbOSC2212j.C1.o2.gp
gccgccgcgacgtggtacttatcgtcgtcggcgtggtggtggtggccgtggtggtgcatcagcggcatggccgacggcaggtggtggtggtgtcccatgcagaggtggtcctgcggcgggaactgcagcggcggcagcttgtcgatctcgtggcgcgccgcgttgagcagccagtccaccaccttgctgggctggttgagccccagccggtcctgcaggtcgtacagctggatcgccgtcggcaccgacagccgcacccgccggtcgcgcagccccttcaccgtcttcaccttgctgtgccggtccttgccgccgaacacccgcgacacgcgcacgatccgcgactccgtctgcgccgaccattgccgcgacgtcgccaccgccgccgtgtgcttcctcgctagctccgccgcctcctcctcc

SEQ ID NO: 12992 - DNA, 924 bp, Oryza sativa
  Clone ID: TFbOSC401539j.C1.o32.fg
atgatactaggaagcaaccaagcggccgccgccgcggctgcggcagctgcggcggaggaggaggcggcggagctagcgaggaagcacacggcggcggtggcgacgtcgcggcaatggtcggcgcagacggagtcgcggatcgtgcgcgtgtcgcgggtgttcggcggcaaggaccggcacagcaaggtgaagacggtgaaggggctgcgcgaccggcgggtgcggctgtcggtgccgacggcgatccagctgtacgacctgcaggaccggctggggctcaaccagcccagcaaggtggtggactggctgctcaacgcggcgcgccacgagatcgacaagctgccgccgctgcagttcccgccgcaggaccacctctgcatgggacaccaccaccacctgccgtcggccatgccgctgatgcaccaccacggccaccaccaccacgccgacgacgataagtaccacgtcgcggcggcggcggccgcgctggccgcggagaaggaggcggcggcggccggcggcggaggaggaggagggggagacgacgtcgacggcgggggcggcggcggagcggcgcacatagtggggaggttccccgccggtggctaccaccggttcatggggctgaacaacccgctggggatggtcaacagcgccgccggcgccgccatgccgttccactacgccggtgagtcatggaataatggcagcgtgcaagacagcggcgccggctcgccgcaggtggccgccgccgcggctcaccacacctcgccgttcccttcactgctttccttggctccagggccgcatcatcagctggtgttctactcctccgaggccgagcagttcacagtagacaaccttggctcgcagggcttgtccctgagctcggcgagagctttccatgatcagacaggaagctaa

SEQ ID NO: 12993 - DNA, 621 bp, Oryza sativa
  Clone ID: TFbOSC400220j.C1.o52.fg
atggcctcccgcgacgccgccaccttccaggtctaccggcccatggcaatgccaacgccggcggcgctgccaccgtcgtcccagcagatcacaatgccgttcacggcggcgctcgtggacgccgtgctcccagctccccgaaaggcggcggcgacgcagggcggcaaggaccggcacagcaaggtgaacgggcgcggccggcgcgtgcgcatgccgatcgtctgcgcggcgcgcgtgttccagctcacccgcgagctggggctcaagtccgacggccagaccatcgagtggctgctccggcaggccgagccgtccatcctcgccgccaccggctccggcaccaccccggccgtcttctcctgctcgtccgccccctccaccgcctcctcctccttcctcctcggcaagcgcccgcgccaggaggaccacgaggcgccgacgttctgggaggcgctgcagcaacagccgcggcccgccgtgtcgtcgtggggtgccctcgtctcgccgtcgcaggaggcgcaggcgtacgcgtcgtcggtggcgcaggtccaccacctcaacctactctccgcgctctccggcgccgccacgagacggccagcacaggaggagtcccggtga

SEQ ID NO: 12994 - DNA, 1014 bp, Oryza sativa
  Clone ID: TFbOSC401583j.C1.o12.fg
atggaccccaaattccccccacccccaccgctaaacaaaacggagcccaccaccaccaccaccaaccagcagcatcaccacgatgagcagcagcagcagcatcgcctccagattcaagttcatcctcagcagcaggagcagcaggatggaggtggaggaggagggaaggatcagcagcagcagcagcagatgcaggtggtggttgcggcggcggcgggggagaggaggatgcaggggctagggccgaagcggagctcgaacaaggaccgccacaccaaggtggacgggcgggggcggcggatccggatgccggcgctgtgcgccgcccggatcttccagctcacgcgggagctcggccacaagtccgacggcgagaccgtccagtggctgctccagcaggcggagccggccatcgtcgccgccacggggaccgggaccatcccggcgtccgcgctcgcctccgtcgccccctccctcccttcccccaactccgccctctccaggtcgcaccaccaccaccaccacatgtgggcggcagcgccgcccacggcgtccgccgggttcgccggtgcagggttctccggcgccgactccggggtgatcggcgggatcatgcagcggatggggatccccgccgggatcgagctccagggcgggggagcgggggggttggggggtgggggtggcggcggcggtggccacatcgggttcgcgcccatgttcgccagccacgcggcggcggcggcggccatgccggggctagagctagggctctcgcaggacggccacatcggcgtgctcgccgcgcagtcgctcagccagttctaccaccaggtgtataatagccgagagctggatggactggatcatcgctgtcgagtgagtgctttatttgttattgcaggtcgttgtgtagatattcaggtctctagccactactggtatatcaacagaagttgtgaggagatgccagttaagtgtagtgttagggagaacctttaccatctcatctaa

SEQ ID NO: 12995 - DNA, 981 bp, Oryza sativa
  Clone ID: TFbOSC401091j.C1.o11.gm
atggcagatgcttctcgacttctggcgagtgagattgagatgataatgatattagttcaaggtggaatgggtatggttgcagcttcactaatgatacctccttaccctaacaacaaccttcaccatcaccaccaccattgcagctcaaaccaagaaccacacttaccattacatccaccagctttcctcatgtccgcgccgtcgtcgtcgtcgtcgccgtcgacgctggacgagtacgacgcgcgcttcttcttccccggcgccgacgcgtacaccgccggccaccggcaggatgaggagacgctggaggccgtgctgcggcagccggtgacgacgacggccgcggcggcggcggcggtggagggaggtggcggcggtggaggaggaggcgccgggggatcccccgcggcggcggcggcggcgacgcggaggcggccgttccggacggaccggcacagcaagatccgcacggcgcagggcgtgcgggaccggcggatgcggctgtccgtcggcgtcgcgcgcgacttcttcgcgctgcaggacaagctcggcttcgacaaggccagcaggacggtggagtggctgctcacccagtccaagcacgccatcaaccgcctcacccttcccgactccgccgacgcggcggcggcgcccgcgttcgccgccgctccaccgccggcggatcagcattcctcggccatggccgccgccgcagcatcggctgcgaaggagaaaggggaggcgagctcgtcgagcaccaccaatgcgtcgtcggcgcgggcgagaaacagagaccacgacggatcatcgccggtggcgcccatggacgagcgcgggcgccgcggtgtcgagctcgactggacggcggcggcggcggcgagcaccgagcagccgatggacggattggagtactacttccaatactacaatcatctggaggagataatgagctgcgacccaacgacgacaacggatgagtaa

SEQ ID NO: 12996 - DNA, 426 bp, Oryza sativa
  Clone ID: TFbOSC935j.C1.o4.fg
atggcagcagcatggcggacgagccgggtggcgtgcgtggtggcgggcgagaaggacaagcacagcaaggtggtgacgtcgcgggggctccgcgaccgctgcgtcaggctatcggtgccgatggccatcgcgttctacgacatccaggaccgcctcggcgtcgaccaaccaagcaaggccatcgagtggcacatccgcgccgccgccgccgccatcgacgcgttcctgtcgctcgactgctctctcgtcctccccaacgccgcccagctcctcacccgctggaggcggaggccgtcgagcgggcagccttcggaggagcaagcacgcacgaggaaggctacggtggcggcgtcgcctaggaagtcggggaagaagaggcggaagacgaggtcggggtgcgcggcgcggagcgcatcgcgaagttga

SEQ ID NO: 12997 - DNA, 1260 bp, Oryza sativa
  Clone ID: TFbOSC411819j.C1.o1.np
ccaagctcgccacgccgtcggcgagctcgttcgcaccgtcgtggggggaggaggacggcggcgtcaaggaaccacagtcgcgttgtggccgccaccgccagatccggcgagcccgccgccaccactgcctcctgccgccgccagatccgccgccgccgccaccgatgctccccacccgcaccacccgttctactactccggtccggctgccgccgccgcggcggcggcggcggcgcagcagcagcagcagacgttcatgggcgcgctggcgataacgccggtggtcgctgagcagccgcaggggtcgtctggtggtggggagaagaaggtggtggcgccgacgaccccggcggcggcgggggcggcggcgacgacgacgctggcgaagcggccgtcgaaggaccggcacacgaaggtggatgggagggggaggaggatacggatgccggcgctgtgcgcggcgcgggtgttccagctgacgcgggagctggggcacaagtccgacggcgagaccatcgagtggctgctgcagcaggcggagccggccatcatcgcggcgaccggcacgggcaccatcccggccaacttctcctctctcaacatctccatccgctccggcgccgcctccgcctcctccgcctccaaccccaaccgcgcctcccccttcccggcgctggctcttcacccgcaccaccagcagcacgacgtgtccgccatgctcggctaccaccaccacctcctcccgccgccgcagcagcagcaggagtcgccccaggatcccggcggcgcgggcgcgttcatgaggaagcgatacagggaggacctcttcaaggagacgacgaccgccaagatcccagcgcgcccaaggcgcgcgagcagcagccgacgacgccgcaggcggcggcggccgccgccgcggcggcggcaatgtgggccgtcgcgccgaacaccgcggcgcccggcggcgcgttctggatgcagcccatgtggtccttcgccggcggcggcggcggcgccgccacggtgcaggcgccgctccagttcatgtcgacgcgtgtcaactaccccggcagcgccggcgccggcatgtcggacaccaacctcggcatgctcgccgcgctcaatgcgtacaaccgcggcggcgccggagaccagcagccgcagcagcaaccggagatggaccagcagggccgcaacgacgacgacgacgatgacggcgacgacagcggcgacgaagacaacggcggcgcaaacaacaac

SEQ ID NO: 12998 - DNA, 1164 bp, Oryza sativa
  Clone ID: TFbOSC4514j.C1.o3.fg
atggatgtcaccggagacggcggaggaggagggcaacggcccaatttccccctgcagctcctcgggaagaaggaggagcagacgtgctcgacgtcgcagactgccggggcgggcggcggcggcgtcgtgggcgcgaatgggtcggcggcggcggcgccgccgaagcggacgtcgacgaaggaccggcacacgaaggtggacgggcgggggcggcgcatccggatgccggcgatctgcgccgcgcgggtgttccagctgacgcgggagctcgggcacaagaccgacggcgagaccatcgagtggctgctgcagcaggcggagccggcggtgatcgcggcgaccgggacgggcaccatcccggccaacttcacctccctcaacatctccctccgctcctccggctcgtcgctctccatcccttctcacctccgccttgccggcttggctggccctcgcttcggcggcggcgcgcgggcggcggacgcgtgggaccgcgtcgtcggcctcgggttcggcggtgcggccgacgccccgtcctccgccacctcctcctcctcgtcgccgcttctgctgagcttccactccggtagcgtcggccttgacgtgtcgccgccgtcggcgtcgacctccccggccgccgccgacctctcccggaagcggcggtgggagcaagaaatgcagcagcagcagcagtaccagcagcagatggccgggtacacgcagagccaaattcctgcgggcacggtgtggatggtgccgagcagcaacgcgcaggccgccggtggcggcgctccgccgggaggcggcggcgagtcgatttggacgttcccgcagtcagggagcggcggcggcggcggcgcggcgacagtgtaccgtggcgtgccaagcggactacatttcatgaacttcccggcgacaccaatggcgctgctccccggcgggcagcagctcggcctcgccggcgccggcgggggtggcgaggggcacccggggatcctcgccgcgctcaatgcctaccgcgcacaggccgcgcagccggacgccggcgcggcggcgcagaatggagcgcaaggctcaagtcagcatcgtcagcatcagcatcacggcggcggcggcggcggcggcgacgagcggcatgagagcatgagcgccagcgactcgtag

SEQ ID NO: 12999 - DNA, 678 bp, Oryza sativa
  Clone ID: TFbOSC401780j.C1.o3.gm
atgtcgcgcgcgctcaactccggctgtggtccttcttcaggtcgtgcgagccgcgaaatcacaacgtggctccatggatctctgcgagacactgtcgggaggcgccggaggcgcggaagatgtggggaccgccggaggatgcgagcgcacgccgcgagggagaggatccactatcagcagcagcagatgcaggtggtggcggcggtgacggggaataggaggatgcaggggctagggccgaagcggagctcgaacaaggaccggcacaccaaggtggatggccggggacgacggattcggatgccggcgttgtgcgccgcctggatcttccagctaacgcgggagctcgaccacaagtccaacagcgagaccgtccagtggctgctccagcaggtggagccggcaatcgtcaccgccatggggacgggtgtcggcactgacatacaggggccctccctcccttccccaaactgcgccctctccaggtcgcaccaccaccaccaccacatgtgggctgccgccgcggcaccgcccgccgcgtccgcggcgttcgccggactctcacaggacggccacatcggcgtgctctccgcccggtcgctcagccagttctaccaccaggaggacggggaggatgaccgcgatgacggcgagtccgatgaggagtccgggcagtag

SEQ ID NO: 13000 - DNA, 573 bp, Oryza sativa
  Clone ID: TFbOSC412575j.C1.o3.gm
atgcaggtggtggcggcggtgacggggaataggaggatgcaggggctagggccgaagcggagctcgaacaaggaccggcacaccaaggtggatggccggggacgacggattcggatgccggcgttgtgcgccgcctggatcttccagctaacgcgggagctcgaccacaagtccaacagcgagaccgtccagtggctgctccagcaggtggagccggcaatcgtcaccgccatggggacgggtgtcggcactgacatacaggggccctccctcccttccccaaactgcgccctctccaggtcgcaccaccaccaccaccacatgtgggctgccgccgcggcaccgcccgccgcgtccgcggcgttcgccggactctcacaggacggccacatcggcgtgctctccgcccggtcgctcagccagttctaccaccaggtcggcgacgctagtgccgccgttgttactcctgctgctccatggatggtcgccggtttatccccctccaagtgtttaggtgaaagctcaatctttttcactccacagtcagcacatgacatgctctttgaaaggtag

SEQ ID NO: 13001 - DNA, 498 bp, Oryza sativa
  Clone ID: TFbOSC21368j.C1.o2.fg
atgccggcgttgtgtgctgcccggatcttccagctaacgcgggagctcggccacaagtccgacggtgaaaccgtccagtggctgctccagcaggcggagccggcaatcgtcactgccatggggacgggtgtcggcgctgacatccgtcgcaccctccctcccttccccaaactgcgccctctccaggttgcaccaccaccaccaccacatgtgggctgccgccgcggcgttcgccggtgccacatcgggttcgcgaccatgttcgccgcccacgtggcggcggccatgccggggctagagctaggacactcacaggacggccacattggcgtgctcttcgcccggtcgctcagccagttctaccaccaggtcggcggcgccagtgccactggtcaactgccacacccgcaccaccatcaccaacaccatcaacagcagcaggaggacggggaggatgaccgcgatgacggcgagtccgatgaggagtccgggcagtag

SEQ ID NO: 13002 - DNA, 783 bp, Oryza sativa
  Clone ID: TFbOSC405018j.C1.o5.gm
atggcaattaaggaccggttcacgggaaaccctaggagacttactgtgcttaccacaagcggaagtggagctgaagatcttcctagtgggagctgtcctgttgaagttggtttcgtcgctgccgtcaaggattgcctgtggagtggagtccccccgctgcagaacgaggcaggcgttatgccttgtcatatccatggcggcgccgctctggacaagcaactcgtccccaccgcctccaaagccaatggcaccaccctcgctgtccgcaagcctccctccaaggaccgccatagcaaggtcgacggccgcggccgccgcgtccgcatgcccatcatctgcgctgcccgtgttttccagctcacccgcaagcttggcctaaagtccgacggccagactatcgagtggctcctccgcgaggctgagccatccatcattggcgccactggcaccggcaccaccctagcctcctcctccccacgccgcccccttcatcctcggcaagcgcctccatgggctgacttcggccaattctggagctttgcggccgtgcgggagatgatggccgccaccgcggcgcccgccatgcttggggaggccttcgccgccacaaagcagcaacctggaaggagccaaccaaggaggaggatgtgctccaccaccggtgaggtcacggccgccgcctccgcacctcgcggactgctcgccggcgcggccggtgcccggcggctctcggttcctgccgcgacctcaccgctcagcccggatgtcctcctctacggataa

SEQ ID NO: 13003 - DNA, 777 bp, Oryza sativa
  Clone ID: TFbOSC400621j.C1.o28.fg
atgcagcagcagctggatcagcagcagcagcagcagcagcatcagtacgaccacttcttctccggccacggccagttcaactccgagacgctggaggccgtgctctgcaggccgccgcgcggcgccgccgcggatcctgctgttccggcggcggcggcggcggcggctgttctgacggcggcaagaaacggtggcggcggccatggcagggcgaggaagcggccgttcaggacggaccggcacagcaagatccggacggcgcagggggtgcgcgaccgccggatgcggctgtcgctcgacgtcgcgcgcgacttcttcgcgctgcaggaccgcctcggcttcgacaaggccagcaagacggtggactggctgctcacccagtccaagccggccatcgaccgcctcgccgccgacccctcctcctcctcccaccgcgccgccggcgacacccgcatgtcgtcggccgagcgcggcggcgatcaccacatggtcgcggtcggcgccgccggatcagggaaaggagacgcggacaaggcgaggggccccagaggtggtagatcggcgcccatggagctcggctgcgagctcggccgcctcgtgccggcgccggtgctcggcgagtactactacgagctcgccgagatgatgagcaacaacaccggaggagaaggagacgacgacggcgactacgacgacgacggcgatttcttggacgactctgggtttctctgccactatcgatcgaagaagaaatttagcataaaggacatttcttaa

SEQ ID NO: 13004 - DNA, 963 bp, Oryza sativa
  Clone ID: TFbOSC419993j.C1.o2.fg
atgcaccccttcatggacttggagttggagccgcatgggcagcagctggcggcggcggaggaggacggggcaggcgggcaaggcgtcgacgccggggtgcccttcggcgtcgacggagcggcggcggccgcggcggcgaggaaggaccggcacagcaagataagcaccgccggcgggatgagggaccggcggatgcggctgtccctcgacgtcgcccgcaagttcttcgcgctccaggacatgctcggcttcgacaaggccagcaagacggtgcaatggctcctcaacatgtccaaggccgccatccgggagatcatgagcgacgacgcctcctccgtctgcgaggaggacggctccagcagcctctccgtcgacggcaagcagcagcagcacagcaacccggcggatcggggcggcggcgccggggaccacaagggcgccgctcacggccacagcgacgggaagaagccggccaagccgagaagggcagcggccaacccgaagccaccgcggcggctggccaatgcgcaccccgtccccgacaaggagtcgcgcgccaaggcgagggagcgggcgcgggagcggaccaaggagaagaaccggatgcggtgggtcaccctcgcctcggcaatcagcgtcgaggcggccaccgcggcggcggccgcgggggaggacaagtcgccgacgagccccagcaacaacctgaaccactcatcgtccaccaatcttgtgagcaccgaattggaggacggctcctcgtcaacgcgccacaacggcgtcggcgtcagcggcggccggatgcaagaaatctcggcggctagcgaggcgagcgacgtgatcatggcgttcgccaacggcggcgcgtacggcgacagcggcagctactacctgcagcagcagcatcagcaggatcagtgggagctcggcggcgtcgtctacgccaattcgcggcactactgctga

SEQ ID NO: 13005 - DNA, 996 bp, Oryza sativa
  Clone ID: TFbOSC401008j.C1.o9.fg
atgagcgccatccccatgaacagctggctcgtgcccaagcccgaaccggtggagttcttcggcgggatggccatggtgcgcaagccgccgccgaggaaccgggaccggcacaccaaggtggaggggcgcgggaggcggatccgcatgccggcggcgtgcgcggccaggatcttccagctcacgcgggagctagggcacaagtccgacggcgagaccatccggtggttgctgcagcagtcggagccggcaatcatcgcggccaccggaaccggcaccgtcccggcgatcgcgaccaccgtcgatggcgtgctccgcatccccacccagtcgtcgtcgtcctctggcccggcgtcctccgcggtggtcgacggtgaggagtcctcggccaagcgacgccgcaagctgcagcccacgcgcgcggtggctggcgcgtctccgctggccacggcggcgcccgcggcgtactacccggtcatcgctgaccctctcctgcaaggtagcggcggcgcggcgatttcagtcccgagcggcctcgctcccatcaccgccaccggcgctccccaaggcctcgtgcccgtcttcgccgtcccggccactggcagccccgcggtcgccggcggcaaccgcatgatcccgcaagccaccgccgtatggatggtcccgcagcccgcaggcgccgcgggcgcgggcaaccaacccacgcaattctgggccatccaatccgcgccccagctcgtgaacttcgccggcgcgcagttcccgacggcgattaacgtcgccgacttccagcagcagcaacaacagcagccggtgtcaacaaccatcgtccagaacagcaactcgggcgagcacatgcacttctccggcgccgactcccacgagcagcagcggcgcgggcggaaggaaggcaacagcggcggcgtggtggaccacccggaggaggacgaagacgacgacgacgacgagccggtctccgactccagcccggaagagtag

SEQ ID NO: 13006 - DNA, 1338 bp, Oryza sativa
  Clone ID: TFbOSC407741j.C1.o10.fg
atggagctcgccggcagcaacaacaagcgggggagggtgagggggcccaacgacgacgacgacgacgccggggagccggacgccaagcgccatcaccaccagctgctgttgccgtggccgcagcagcagcagcagcagcatccggcgtcgcggatctaccgggtgtcgcgggcctccggcgggaaggaccgccacagcaaggtgtacacggccaagggcatccgcgaccgccgcgtccgcctctccgtctccaccgccatccagttctacgacctccaggatcgtctcgggtatgaccagccgagcaaggccatcgagtggctcattaaggccgccgccgccgccatcgacaagctcccttcgcttgataccgcttccttccccaccaaccccgcctcctccgccgctgttgctgctgctgctgctcctcctcttccccatgccgaacgcgagcagcagcagcagctcaccaagtccggatgcagtagcacgtcggagaccagcaagggctccgtcctctccctctcccgctccgagagccgcgtcaaggccagggagcgcgccagggagcggagcagcgcggccgccgccgcggcatccaaggacgccggggacgacgccgccacccccaccgcgcccaccgccgcgcccgcctcctcgcaggcggcttccttcaccgagctactcaccgggatggccgcagccaacgcctcacccgctgaccacaagcagcagcaggcgtggcagccgatgaccgtcgccgcggccaccgccgactacatcggcttcgccgccgccgccgcgccgcatacgcagccgcggaaatccgccgcgggccatcactccgcgatgccgcacaccttcgcatcacccgctccccacctcgccaacatcacccccatcgccatggcgcccgcgcagcacttcaccctcacacccgccgccgccgagcaccacgcggagatgacgcactactcgttcgaccacttcatgcccgtccacgcggcagcagcggcggcggcggcggcctccaccccggccggcggcgactacaacctcaacttctccatgtcctcgggtcttgtgggtgtccacagtagggggacccttcagtccaattcgcagtctcacctctccagccatcaccaccaccatcaccagcaacagcagcagcagcagcagctgcagaggctgtctgctccgctggatgcgcccaacattccgttcctcttcagcccggccgccgcgcccaccgccgcggacacccagttcgccgccgcattgcagctctgggacgggttccggcacgccgacatcaaggagaagggcaagcactga

SEQ ID NO: 13007 - DNA, 666 bp, Oryza sativa
  Clone ID: TFbOSC418457j.C1.o6.fg
atggcggcggcgggcgagaaggacaagcacagcaaagtggtgacgtcacgggggctccccgaccgccgcgtcaggctgtcggtgccgacagccatcgcgttctacgacatccaggaccgcctcggcgtcgaccaaccaagcaaggccatcgagtggctcatccgcgccgccgctgccgccatcgacgcactcccatcgctcgactgctccttcgtcctccccaacgccgcccagctcctcacccgccggaggcggaggccgtcgagcaggcggccttcgacggagcaggcgcgcacgaggaaggctacaatggcggcgtcgcctaggaagtcgggggagaagaggcggaagacgaggtcaaggtgcgcggcacggagggcggagcgcatcgcgaagttgagggcacggagggaggggtggatgccgaggcgcgaggcgagcacctcggcggcgtcgggcggccaaagctggatcaggaagccgtcgacgccgaggagcggcggcttgtgctccggcacgggagaaggagaggaaggtggcggcaggagcatgggggagataaaagaggacgagctcaagcatggcggcgagaggagtggggcgacggcgggcggagaaggccggcaaggcggtggcgcggagcgaggtggtggcggacgacgatga

SEQ ID NO: 13008 - DNA, 636 bp, Oryza sativa
  Clone ID: TFbOSC407361j.C1.o2.fg
atgagctcccgcgacgccgccgccacgttccatgtctaccagcccgtgcagatcccgacggccacggtggcgcccgctgcggcagtgtcggcggcgccggcagaggccgtcgcccagctggtcccggcgccgagcaagaaggcggccggcgcggcgggtgggaaggaccggcacagcaaggtgaacgggcgcgggcggcgcgtgcggatgccgatcgtgtgcgcggcgcgggtgttccagctcacgcgggagctggggctcaagtccgacggccagaccatcgagtggctgctccgccaggccgagccgtccatcctcgccgccacggggaccggcaccaccccggccgccttcgtctcctcctccgcgccgtccacctcctcctcgcaccagcacaccctcctcggcaagcgccagcgccaggagtccgccgccgccgacgccgtctccgtcgccggcgccgcgtccgcgttctgggcggcgctgcccgcaccaggccggcccgacgcctggggcttctccccgctggacgcgcagccgacgtacgtgccgatggcgcaggcgcaccaccaccacctcaacctcctcgccgcgctctccggcgccgccaggcgcgccgaggaggagtcccggtga

SEQ ID NO: 13009 - DNA, 936 bp, Oryza sativa
  Clone ID: TFbOSC400800j.C1.o53.hg
atgagggtctctaccgttggtggagagggatccggtaggtccgaaggtgggatcgtcgccgatgaacggtgggggggaagggaagggaaggggcgacggcggggcgaggagtttcatcggcggtgggggaaagggaaggggcgacggcggggtgaggagattcgtcggcggcgacacactggagatggggcagtgcgagagaaagagacggggagagggatgtgcgtgtgggatgaggatctggaaggcgagaaagagagggggggaccgccacgtagaccaaaactggggtcaaaaccaccaaaggacctcggccaccccaccccgaccgacgccgaccccacctctcagaatccccccaccccaccaccaccaccaccaatgatggcttcttcctccgacctcatcctctacaacctcgtccccgcccaacccctaaaccctagcgccatccccaaccctaaccccgacctctccatcgccgccgccgagcccccctcctccgacggcgccacccctcgccgcgtcaggcccaggaagtccccctcctcctccgaccgccactccaaggtcgccggccgcggccgccgcgtccgcatcccggccatggtggccgcccgcgtcttccagctcacccgcgagctcggccaccgcaccgacggggagaccatcgagtggctactccgccaggccgagccctccatcatcgccgccaccgggacgggcgtcaccccggaggaggcgccccccgccgccgtcgccatcggctcttcctcggtcgccgccgccgccgccgccggcgggcatgggggcgcgttcgtccatgtgccttactacaccgcgctcctcatgcagccgcctaacgcggacgagccccccatggcatccgctgcctccgcctcgggcaccaccgccgccgacgagaacaataattaa

SEQ ID NO: 13010 - DNA, 1104 bp, Oryza sativa
  Clone ID: TFbOSC400348j.C1.o2.hg
gcgcatcagcaccacccgttctactacgccgccgctcagggtggcgcgaataccatgccggcgccggcgtcgttcatggggtcgctggccatagtgcccgctgctgctgctccgggtggtggtggtgggcaggtgcaggcggcggcggctccggtggcgtcgtcggagaagaaagcggtggtggcggcgggggcgggggcgaagcggccgaccaaggaccggcacaccaaggtggaggggcgcgggcggcggatacggatgccggcgctgtgcgcggcgcgggtgttccagctcacgcgggagctcggccacaagacggacggcgagaccatcgagtggctgctgcagcaggcggagccggccatcgtcgccgccaccggcacgggcaccatcccggccaacttctcctccctcgccgtctccctccgctccgccgcctcccactcctcctccccgcgcgccgcgccgttccaccacctccagcagcagcagcagcacgacgtcgccgccatgctcggcttccaccaccaccaccaccagctgctccctcctccgccaccgcaccagcacccggagccgacgccccaagatcccggcgccggcgagttcatgcgtaagcgctacagggaagccgacgacctgttcaaggacacctcacgccaagaccccgtcgatggcgccaccggcgaggccgagcagaaggcccgtgcggccgcagcagcggcggcgccgccgccaaccgccccgtcagcaatgtgggccgtggggccgaacaccaccggagccaccgccgccttctggatgcagccggcatgggcattcccccacggcgccggcgccggcgccgccggtaacacggtgcaggcgccactccagttcatgtcgcgcagcagctttcccacggcgatgaacgtcaccatggcggacaacaacaacagcagcaacaacaacctcggcatgctcgccgcgctcaacgccggcggcggcggccgctccggcgagcaccagcaccagcatgaggggcagtcgccggcggagatggatcatcagcgccgcgccaacggcggcggcggcgaggctggcggcgcggcgagctcgcagtga

SEQ ID NO: 13011 - DNA, 1722 bp, Oryza sativa
  Clone ID: TFbOSC401369j.C1.o12.fg
atggagactaggttatgggatccggcgaggtggatggacgcgcattggagcagcaacagtagcggcggggaagaaggcggcgggggatctggatccgaggcaccaccaccaccgggtcacccacggcggcgacggcggcggcgtaggaggaggaggaagcggggacaggaggaggcagatgagcagcagcagcagcagcacgaccaccaccggcttctccagctccaccaccaccagggtgtgcagcaggaccaagaaccgccgcctgttcccgtcttccacctccagccggcgtccgtgaggcagctgtcgggctcctccgccgagtatgcccttctctcgcccatgggcgacgccggcggccactcccaccaccaccaacacggcttccagcctcagctcctctccttcggtggcgtcggccaccaccaccacctgcatcagttcacggcgcagccacagccccccgccgcgtcccacactcggggtcgtggaggtggaggtgagattgtccccgcgacgacaactccacggtcgaggggcggaggcggcggcggcggcggggagatcgtggcggtgcagggcgggcacattgtgcggtcgacagggcggaaggaccggcacagcaaggtctgcacggcgcgcgggccgcgcgaccgccgcgtgcggctgtcggcgcacaccgccatccagttctacgacgtgcaggaccggctgggctacgaccgcccgagcaaggcggtggactggctcatcaagaacgccaaggacgccatcgacaagctcgacgtgctgccggcgtggcagcccactgccggcggcgcaggcgcgggcaatgccgccgcgccgccgtcctcctcgacccaccccgactccgccgagaactccgacgaccaggcgcaggccatcaccgtcgcgcacaccgccttcgacttcgccggcgggggcagcggcgggaccagcttcctcccgccgtcgctcgactcggacgccatagccgacacgatcaagtccttcttccccatgggtggcaccgcaggcggggaggcatcgtcgtccaccacggcggcgcagtcgtcggccatgggtttccagagctacacgcctgacctcctgtcccgcaccggcagccagagccaggagctccggctgtcgctgcagtccttaccagaccccatgttccaccaccagcaacatcgccatggcggcggcggcggcggcggcaatggcaccacgcagcaggcgctcttctccggcgccgccaattactcgttcggcggcggagccatgtgggccaccgagcagcaggcgcagaaccagcgcatgctgccgtggaacgtgcccgaccccggcggcggcggcggcgccgcctacctgttcaacgtgtcgcagcaagcggcgcatatgcaggcggcggctgcggcgctgggtggccaccagagccagttcttcttccagaggggaccccttcagtccagtaaccagccctccgagcgaggatggccggagaccgtcgaagccgacaaccagatgagccaccaccaaggagggctgagcccctccgtgtcggcggccatcggttttgccgctcccggcatcggcttctccggcttccgcctccccgcgaggatacagggcgacgaggagcacaacggcggcggcggcggcaatggcgacaagccgccgccgccgtcgtctgtctcctcggcttctcaccactga

SEQ ID NO: 13012 - DNA, 2658 bp, Oryza sativa
  Clone ID: TFbOSC100626j.C1.o2.fg
atggaggcgcaggcggacgccggcggcgacgacctcgccgccatgcgggagcagtgccggagcctggaggaggccatcggcttccgccgggagacgcagatgggcctcgtcgcatcgctccagcgcctcgtccccgacctcgtcccctccctcgaccgctcgctccgcatcatcgccgccttcaacgaccgccccttcgtccccaccccgaaccccgacggcggccacggtaagagccccgccgccctcaagccccaccaccgccgcgccctccctgacccggcgcgctccacccgccgcaagacctcgcccggatcctcccctgcctccgtcgccgctgcccccggcggcctcgacgccgtgcgcaccatggtcgccgtgtgcctcctggagctcgtccccttcgccgagatcgacgccgccgcgctcgcccgccgcctgcaggcggagagctcatccgccagcgaggccgagcggactgctctcgctgacctagccgccgaactcggcggctcggcggcctccgctgtagtcctcgccctccgccgcatagccgaggacaccggcggtgtgcagatcgaggaggccatgattgggggcaagtcgatgacgatggtctgggccatcgaccggaacaagctcctcaaggagctgccagaatccgctactttgccgctactccaacctcctccagccccccagatgcccccctctgagaccgatgccggcagcgcaatgataccaagaacaccgcagcagcagcagccgcagccggatatgtggccgcattcgatgcctccgatattcccacggccaaggggcatgacgatgcaggggatgcagagggtgcccggcgtgccaccagggttgatgccgctgcagcggccattcatgggaccagctggagttatcacaatgggtgggggtgtggggcctagccctaaccagcagaagcagaagagcgaggaggacgaacttaaggatcttgagttgctgctgaacaaaaagacatatagagagaagcagaacaccaagaccggggaggaacttttagatctcattcaccggcccacggcgaaggagacggctgtggcagcgaagtctcacactgttagtcctgtagtagtaaatgagctggcagtggcggacctaggatttgaacccaggggactaaatgtaaagaccattgcatacaaggagatgggggacaccaggtccaaatcatccaaaatttacagcatgtttaaaacaaaaggtggttcccagctgaaggaatattgtaccaacttaactaaagaagattgccgacgccaaagtggatcttttgttgcctgtgataaggtccatttccgccgtattattgctcctcatactgatacaaacctaggagattgttcttttctcgacacttgccgtcacacaaagacctgcaagtatgtccactacgagcttgaccaaacaccagatatacctccaatgatggctggtgctcttgcacccccaaggcaaataaggctccagagagctgaatattgttcagaagtagagcttggagaagctcaatggataaactgtgacatccgaaacttcagaatggatatcttaggacagtttggagtaattatggccgatcccccttgggatattcatatggaattgccatatggcacaatggctgatgatgaaatgaggacccttaatgtccctgctttacaaactgatggattaattttcttatgggtcactggtcgtgcaatggaacttggtcgggagtgtttggagctctggggttacaaacgtgtggaggaaattatttgggtgaagaccaatcaacttcaacgtattattcgaactggacgcactggtcattggttgaatcatagtaaagagcattgccttgttggaataaaaggaaaccctttagtcaacaggaacattgacactgatgttattgttgctgaagtccgtgaaacaagcagaaaacctgatgagatgtaccccatgctagaaagaataagcccaaggacaaggaagctggaactgtttgcaagaatgcataatgcacatgctggatggctttctctgggtaaccagttaaatggagtaaggcttgttgatgaagggttgagagcacggtacaaggctgcctatcctgattcagaggaactcctagaaggcgcgcacacgggaagcccaatgcgaccacgaggaggcgaaggtgtggcagtgtcgcttcccggtgagacccacacaacggtggggtttcccggtagaattagggctccaaatccgatgggattgtcaggtgctattgggctgcaccttgggccgtgccagctattctccaagttgagcccaaggatgacaatttcccccgcggggccgggtcccctgcggggacccgaccctacgggggcaggggccatttctgacccgtggatcgtgaagaaggcgagactagtgaagaaggaggtggagcccatcttcagcgacagcgacgccatgaagaatgcccctaagaccaccactacatgcccaaggtgccaaaatggagaagcatactacaggcagatgcagattcgatcagctgatgagccaatgtctacattttacaagtgttgcagagaagaatgccaatttgattggagggaggactga

SEQ ID NO: 13013 - DNA, 471 bp, Oryza sativa
  Clone ID: TFbOSC26017j.C1.o3.fg
atggccttctggcaggcgcgggacttcctcttctgcggcgtgtgcggcaccctcctcaaattcgactccgtccgctccgcctcctgccccctctgcggcttcaagcgcaaggccaaaggtcgtcgtcttccccatctctctccctgcaaagccctgggctgtgttcttcttgcggctgatgccttcgttctctttttttacggcgcagatatcgaagggaaggagacgcggtacacggtcacggctgaggatattagaagagagctaaaacttgatccatatgtgattcttgaaacaacactgaaggaggaagacgtaattgtcgaaagagctacagtaaataaagagtgtgaaaaatgcaaaaatcctgaacttcagtattacaccaagcagttacggtcagcagatgaggggcaaactgttttctataagtgcgcaaactgcaggcatgagttcaatgagaaccagtag

SEQ ID NO: 13014 - DNA, 360 bp, Oryza sativa
  Clone ID: TFbOSC645j.C1.o1.np
tttaattttatggaccacaggtcctgcctttttaatgaactgtgcggtttcttgaatcttgtcccaaccatttatatcagatatgaaagaagatttccatggctatttatatgtagttgacattttgcatgctgttgacaggatattagaagagagctaaaacttgatccatatgtgattcttgaaacaacactgaaggaggaagacgtaattgtcgaaagagctacagtaaataaagagtgtgaaaaatgcaaaaatcctgaacttcagtattacaccaagcagttacggtcagcagatgaggggcaaactgttttctataagtgcgcaaactgcaggcatgagttcaatgagaaccag

SEQ ID NO: 13015 - DNA, 1104 bp, Oryza sativa
  Clone ID: TFbOSC900118j.C1.o24.fg
atggagagggagctgctggagacgttcgaggccgccaagaaggcggccgacgcggcggccggggcggacgactccccggaggccgaccgctgcctcgacgcgatgcggcggctgcgcggtctccgcgtcaccaccgacgtcctcgtctccacgcaggttggaaaacgtcttcgttaccttactaagcaccctcactcagacatacaatccatggctacagatcttctggggtactggaaaaaggttgttatcgaagaaggaaagaaaaatggtaccacagaaaatgttggatcaaccaactcagccgccagagctgaaaaggctcagcccatgaaggttgataagagttctgcatcaggaagtgtgaagcctgagaaaagagaagtcaatgttaggggccagaagcctgagagcatcaaggttgagaagatcaccaataatgattccaaaaaccaacaagtcaaggtagagagggctccaaaggaagccactagaactcctgatacaaagaagccatcttctgttccaaatggccccccaaagctgacatctcttgtcaaatgcaatgatcccactagagataaaatccgggaactacttgcagatgccttctccagggttcatggagagactagcaaagatgacagggaggaagtgagaaacatcttagatgaagtggatgcacgagatccattcagagttgctgtgaccgttgaatctgcgttatttgagaggctgggacgttcaactggggctcacaaggcaaaatacaggtcaataatgttcaatcttagagctgacaacaacactgatttccgaagaagggttctccttggccaagtgaggcctgagaggcttgttgacatatctccagaagagatggctagtgacgcgaggaagcttgagaataagcagatcaaggagaaggctttgttcgattgtgagcgtggaggagccccaaaggcgactactgatcagttcaagtgtggcaggtgtggccagcggaagacgacttactaccagctgcagactcggagtgctgatgagccaatgacaacatttgtgacatgcgtgaactgcaacaaccactggaagttctgctga

SEQ ID NO: 13016 - DNA, 1122 bp, Oryza sativa
  Clone ID: TFbOSC900397j.C1.o13.fg
atggagagggagctcctggaggcgttcgaggcggcgaggaaggcggcggacgcggtcggggaggcggcggcggcggccggggccggggaaggggagtcgccggaggccgcgcgctgcgtcgacgcgctgcggaggctgcgcggggctcgcgtcaccaccgccgccctcgtctccactcagatcggcagacgtattcgctatctcaccaagcatcctcactcaagcataaaagcaacagcttcagacctgttaggacactggaaaaaggttgtcattgaagaagacaagaaaaatggggcactgcagaatggaaaatcgagttctactgtggtaaaggttgagaaggtggagcctatgaaagttgaaaaggcatcaccaagggctactgtcaataataataatatggataccagagttgtgaaccacaaaggtggaaaggttgagaagttttctaatgctgagctgagaacccaatctatcaaggttgagaaagtacaaaaggtagttcacaaagtatcttctgttgagaagccgtctcctgtccaaggtggtcctccaagactgacatccgttgttaaatgtggtgatgctagtcgagacagaattcgggcgatacttggtgatgccttctccagagtttctgaagagactagaaaggatgacagggaggaagtgaggaacatcatagaagaagtaaaagcatgtgacccattcaggattgctgtgatggtagagtgtgccttgtttcagaagctggggaattttaatggacctaataagcaaaggtacagatcattgatgttcaatctgaaggatgatcacaacacagacttccggagaagggttcttctaggacaagtgcagcctgagagaattgctgacctaaccccgacagaaatggctagcgacaccaggaagcttgagaacaagaagatcgaggagaaggctctgttcgagtgcgagcgtggaggagcaccgaaggccaccactgatcagttcaagtgtggcaggtgcggccagcgcaagactacctactaccagctccagactcggagcgccgacgagccgatgacgacgttcgtgacctgcgtgaactgcaacaatcactggaagttctgctaa

SEQ ID NO: 13017 - DNA, 939 bp, Oryza sativa
  Clone ID: TFbOSC900356j.C1.o20.fg
atgagcgactcgttctgcccggactgcaagaagcacacggaggtggcgttcgaccactcggcgggggacacagtgtgcacggagtgcggcctcgtcctggaggcgcactccgtcgacgagacctccgagtggcggacgttcgccaacgagtccagcgacaacgaccccgtccgtgtcggcggcccgaccaacccgctcctcaccgacggcggcctctccaccgtcatcgccaagcccaacggcgcccagggggagttcctctcctcctccctcggcaggtggcagaaccgcggctccaaccccgaccgctccctcatcctcgccttccgcaccatcgccaacatggccgacaggttaggtcttgtggctacaatcaaggaccgagccaatgaaatatataagaaggtggaagatctcaagtctatcaggggaagaaatcaagatgccatattagctgcctgtttgtatattgcttgtagacaagaggatcggcctagaactgtaaaagaaatatgttcggtcgctaatggagcaacaaagaaagagataggccgagcaaaggaatttatcgtgaagcaactggaagttgaaatgggtcaatctatggagatgggaaccatccatgctggagatttcctgaggcgtttctgttcaactcttgggatgaacaatcaagctgttaaagcagcccaggaagcagttcagcgttcagaggaacttgatataaggaggagtcctatttccattgcggctgctgtcatttacatgataacccaactctcagatgataagaagcctctgaaagacatatccttggctactggtgtggcagaaggtaccatcagaaattcatacaaggatctgtatccctatgcttcaaggctcatcccaaacacctatgccaaggaggaagacctgaagaatctgtgcacaccatag

SEQ ID NO: 13018 - DNA, 633 bp, Oryza sativa
  Clone ID: TFbOSC422155j.C1.o6.fg
atggcgtcccggatggggctcgcgggcaacgtgcgcgaccgcgggaagaacgtgctgaggaaggtggaggaggccaaggtttgcgccagggggcggagccgggacgcgctatacgcggcgtgcctccacaccgcgtgccgcatggagggcgcgccgcggacgctcaaggagttcatcgccgcgacgcccgacgcggcggcgacgaagaggaacctgggcaagttcatccacgcgatcaagaggctcctcgggagcaacgatgaggaggccgaggccgggcaggatcaagcgggcagcaaggcgacgaacggctgcggcggtggcggcggcgccggcgcggtggtgcgcgccagcaactacttgctccgatacgggtcggcggtcgggatgagcggccaggaggtgagcgcggcgcagcgcgcggcgagcaggctggacgagagcctcgacgtgcggcgaaacccgcagtccatcgcggccgccatcatatacatggccgtgcagcgcgccggcggcggcggcggcaggagcaagagcgtccgcgaggtgtccgccgccacgggcgtcagcgaatcgaccatcaaggacgcgtacaaggacctgtgccagcacgccgaggtgctcttcggctaa

SEQ ID NO: 13019 - DNA, 1689 bp, Oryza sativa
  Clone ID: TFbOSC400277j.C1.o29.fg
atgtcgcagccgacgcagtgcccctactgccgcgcctccggcccggcgcgctgcgtcacgacgcagccgccgctctcccgcgccgtctccgagtgctcctcctgcgcccgcctcgtcctcgagcgccacctccacacccaccccttcttccccctcctcccctcgctccacccgctccccctcgtcacccccgacctcgccgacgccgcgccgtcgccgtccccctcggccgcctccgcctccggcgacgacgacgacgacgacgaccccttcctcccggccggcttcgtctccgccttctcggccttctccctcgagcgccaccccgtcctcgcccgctccgcgtccgccttctccggccaactcgccgagctcgagcgcgcgctcgccgtcgaatccgcggcctcctccactccggaccccgcggggcctatggtctccgtcgacagcctccgcgcctacgtccagatcgtggacgtcgcctccatcctgaggctggaccgggacatagccgaccacgccttcgagctcttcaaggactgctcctccgctacgtgcctcaggaaccgcagcgtcgaggcgcttgccacggccgcactcgtgcaggccatccgcgaggcgcaggagcccaggaccttgcaggaaatctctactgctagcaatcttccccagaaagaaattggaaaatacatcaaaatacttggtgaatcactgaaactgagccaacctcttaacagcaactcaatagcagttcatatgcctcggttttgcagcctactccagctcaataaatctgctcaggaacttgcagcccatattggtgaggttgttgttaataaatgcttctgcacacggaggaatcccataagcatatcagctgcagctatctatcttgcgtgtcagcttgaagacaagcggaaaactcaggcagagatctgtaaggtaacaggccttacagaggttactctgcgtaaagtgtataaagaactgttggagaattgggatgatttgctaccccctaactatacaccagctacaccaccagagaaagctttcccaatgaccaccatttattcatcgcgctcatcgtctggtaaagatctttatcaagataagcagttagacagtgctaagctaaagagctcagaagctgcagagcctgatcacatggtcattgtaaaagaggaggaagacaagaaaattggtccatttagtcgaccgagtgcaaaaaccgagacccatgacttgaatcaagcaatttggacgccaaatgtctcttcaacaccattctcttcatcaccgaaattggatcatgacaagacggaaacaagcgtccgtgggataaaccttaacgaggcatcctgcacaatggatactgacagaccagacatgcctgtgaagtcaccctttgctgagaggtggctaaatgaatcaaaggtgatcccttctcccagtaggcagcctgcaccatggcagcttaagcaaggagcaccatcagctgggtcctcgtatcatagtatgccgtacggcctggaccttctgtcacgtggaaaaagaaatactggagatggtggtgataaggaggggagatgtttcctagttaaatttggctcctcttgccatcctggtgtatcagtatcatgtcatgttgagtgttacaccggtacaaaatattctgtgattaattag

SEQ ID NO: 13020 - DNA, 1032 bp, Oryza sativa
  Clone ID: TFbOSC422155j.C1.o2.fg
atggtgctcgaccacgccaccggcgacgccatctgcaccgggtgcgcgttcgacctcggcaacggcgccaacgcgtgccccgagccgccgcggtggcgcgccgccgctggtcatggtgacagtgatggcgaccgtagcagcagcagcagcagcgtgggaggagacgtctcgccagctgctgccgatccgttgctccagggcggcgagggcgttgcctgctctgtcggggcgccgccggtgcagccgagggtgcgcggcgccgttgtgccgccgaagcagatgcgcgccggcggtgccgtcccgccgaaggtgcggtgcggcgtccctgacacgagcaaggcgctcgccgaggggttcgacgccatcgtcggcatggcgtcccggctcgggctcgcggacaaggtcagcgaccgggcgaaggaggtgctgaggaagctggaggaggccagggcgtgccccaagggacggagccgggacgcgctctacgcggcgtgcctccacgccgcgtgccgcgtcgagggcgcgccgcggacgctcaaggagctgatcgcggcgacctccgacgcggcggcgacgaagagggacctgggcaagttcatcaacgcgatcaagaggcacctcgggatggaggagcgcgggcaggatcaggcggcggacatgaaggcgagcggcggcggcgtcggcgtggtggtgcgcgccggcgactacctgcaccgctacgggtcggcggtggggatgagcggccaggaggcgagcgcggcgcggcgcgcggcgggcaggctggacagcctcgacgtgcggcgcaacccgcagtccatcgcggccgccatcgtctacatggcggcgcaggggagcagcggtgtccggaagagcgtccgccgccacgggcgtcagcgagtcgaccatcaaggacgcgtacaaggacctgtgcccgcacgccgccctgctcttcgcctgaaacacacggcgacggcgcgacgcgacgcggcgctacttaatttgttgtgtgtattgcgtgttgttggttactga

SEQ ID NO: 13021 - DNA, 1236 bp, Oryza sativa
  Clone ID: TFbOSC410156j.C1.o3.gm
atgccaccggatctggaggaggcgaggcccggcccgccgcctccacgccgtcctgaccgcagcgctgccggatctggcggaggggcgagagagaaagagggagaagtggagagagtgagggggtggaagggcgcgctgccgcttgcgagggggagggtgccgacgccgccgccgctcgctggggggagggcgccgccgctgcccctacttgtgtcgcgctgcaaggcgaggtggtgtgtggagacccggcgtgggcgcgacgttgtgcgggcagcactccgaggcaaggcggcgagcggaggccccgcccagtgcggcgtcgccggcaacgagcagtgttactgcccggagtgccaccgcacgacggtggtggtggtggaccacgccaccggcgacaccatctgcaccgagtgcgcgctcgtcctggaggagcggtacatcgacgagacctccgagtggcgcacgttctccgacgccggcagcggcgaggaccgcgaccccaaccgcgtcggcggctgctccgaccccttcctctcgcacgcggagctcggcaccgtcgtcgcgccggccaagcggcaagcgaaggacaccgcctccccgcctcatgtgcgcgtcgactccaagtcgggccaagacagctcgctggccgtcgcgttccgcgccatctccgacatggcggaccgcctccagctcgtggccaccatcagagaccgggccaaggagctgttcaagaagatggaggaggcgaagctgtgcgccagggtgcggaaccgcgacgccgcgtacgcggcctgcctccacatcgcgtgccgcaacgagggcaacccgcggacgctgaaggagctcgcctcggtgatgcgcgattgccaggacaagaaggagatcgggaggatggagaggatcatcaggaggcacctcggggaggaggccgggacggccatggagatgggcgtcgtgcgcgccgccgactacatgagccgcttcggctcgcggctcgggatgggcaagccggaggtgcgggaggcgcagagggcggcgcagacgctggaggacaagctcgacgtgcggcgcaacccggagtccatcgccgctgcgatcatctacatggtggtgcagcgcgccggcgcccagacgtccgcgcgcgacgtgtccaaggcctccggcgtcgccgaggcaaccatcaaggaggcctgcaaggagctgagccagcatgaagagctgctcttctcctcttaa

SEQ ID NO: 13022 - DNA, 1401 bp, Oryza sativa
  Clone ID: TFbOSC6718j.C1.o1.fg
atgtattgttctcactgtcaagataactgccccgtcgtaaaggaccctgacaaaaactacacatgttgtggtttgtgtgggaaggttcttgatgatcaggtttacgatggtgagccaactttccaaaagggcgccgacgggcaggcccggttggctggtagtattctatcaagcattgagagtggtaattcagtatcccatgaaagaactataaataaaggaagagaggagattaggcagattgtcagcagcttacatgtggctggtggagatactattattagcatggctcatcgctattatacactagctgttgacaagaattttacaaggggccgtcgaacaactcatgttgctgctgcttgcctttatattgcctgccggcaaagtaaaaaggcatatcttcttattgatttctcggaccatttgcagataagtgtctttgccaagttttgctacttgcggaacatccagttatccaaaagctcatcgaccccagccttttcatacatcgttttacagaacactgggaggaaaccaagtggattgtgtggtgcagcactatatatcgctgctctctctcatggatatgattataccaaggcagatattgttgctgttgtgcatgtttgcgaggcaacactaactaagcgcttgatagagtttgaaaatacagattcgggtagcttaacgattgaagaatttttggcaaaggctgatgaacaagtgcttgttactaaaatttcaccaaagtctggagaagtactttgcaagcacaaggataaagctgagcattttgctcatggactctgtgaaaaatgctacaacaaatttatgaaactgtctggtggactggagggtggctctgatcctccagctttccaacgagctgaaaaacaaaggttggaggctgctaaaaatgctaaaggaactgctgcatctaaagaggcagcactggaatcagtttgtgaggcacgcgaatctgatgttgagaataacattacgacaccgccaaagaatataattggagataagcattcgacaattccttctgtgaaagttgctggtgattctgtagctacagaagatcctgaaggggaaggtaaaaatgataaagcagatgaaggtcctgaaagtctctctgatattgatgatgcggaggttgatgggtaccttcacaacgaggaagaaacacagtacaaaaaaattatctgggaggaaatgaataaagagtaccttgaggaacaagcagcaaaagcagcattagcagctgagctggcagctagaggagtggttgtggaagaggggaagaggaaaagaagaagacataatgaagatggcaagaacgcaacacccgctcaaacaccagcagaagcaacacagaacatgttgaagcggaag

SEQ ID NO: 13023 - DNA, 1617 bp, Oryza sativa
  Clone ID: TFbOSC900226j.C1.o16.fg
atgtattgttctcactgtcaagataactgccccgtcgtaaaggaccctgacaaaaactacacatgttgtggtttgtgtgggaaggttcttgatgatcaggtttacgatggtgagccaactttccaaaagggcgccgacgggcaggcccggttggctggtagtattctatcaagcattgagagtggtaattcagtatcccatgaaagaactataaataaaggaagagaggagattaggcagattgtcagcagcttacatgtggctggtggagatactattattagcatggctcatcgctattatacactagctgttgacaagaattttacaaggggccgtcgaacaactcatgttgctgctgcttgcctttatattgcctgccggcaaagtaaaaaggcatatcttcttattgatttctcggaccatttgcagataagtgtctttgccaagttttgctacttgcggaacatccagttatccaaaagctcatcgaccccagccttttcatacatcgttttacagaacactgggaggaaaccaagtggattgtgtggtgcagcactatatatcgctgctctctctcatggatatgattataccaaggcagatattgttgctgttgtgcatgtttgcgaggcaacactaactaagcgcttgatagagtttgaaaatacagattcgggtagcttaacgattgaagaatttttggcaaaggctgatgaacaagtgcttgttactaaaatttcaccaaagtctggagaagtactttgcaagcacaaggataaagctgagcattttgctcatggactctgtgaaaaatgctacaacaaatttatgaaactgtctggtggactggagggtggctctgatcctccagctttccaacgagctgaaaaacaaaggttggaggctgctaaaaatgctaaaggaactgctgcatctaaagaggcagcactggaatcagtttgtgaggcacgcgaatctgatgttgagaataacattacgacaccgccaaagaatataattggagataagcattcgacaattccttctgtgaaagttgctggtgattctgtagctacagaagatcctgaaggggaaggtaaaaatgataaagcagatgaaggtcctgaaagtctctctgatattgatgatgcggaggttgatgggtaccttcacaacgaggaagaaacacagtacaaaaaaattatctgggaggaaatgaataaagagtaccttgaggaacaagcagcaaaagcagcattagcagctgagctggcagctagaggagtggttgtggaagaggggaagaggaaaagaagaagacataatgaagatggcaagaacgcaacacccgctcaaacaccagcagaagcaacacagaacatgttgaagcggaagagacttggatcgaagatcaatgatgaagctgttaacaaactgtacaataccaaagatgaagatggcaaagcagataaagagatggacttcaacgatgagtatggacaggacacaggtgatggtgaaacattcgaaggtggttatgattatcctgattacaactatgatggctatggtgatggagcctacggcgattatgatggtgttgatttttaa

SEQ ID NO: 13024 - DNA, 756 bp, Oryza sativa
  Clone ID: TFbOSC401733j.C1.o22.fg
atgggagtgacctgtgtggcagacaagagatgcaaggagaagtgggagaacatcaacaagtacttcaagaaggtgaaggagagcaacaagaagcgccccgaggactccaagacatgcccctactaccaccagctcgacgcgctctaccgcaccaaggcggccaacgccgccgccgccgcctcagcctcgccggctccggcgaccaccaccgtgcttgccccggtgccgctctcccagacgccgccgcacgtcgaccacggcggcagcaacggcaatgggaatgggtgggcgagtgccaacaacggcggcggcggcagcagctccgggggcatgcaaacgaaggctagcaacaatggcacggcgacggccggcgggctgcccgccgtttcgggatcgaagcaggtgcccgtcgcgaaggagacggcggggcagaggcagccacagccgttggccatgaaccacaactacggcaacgacagaatggccgacgacatggacagcgacagcatggacgacgacgacgacgacgacgaatttgacgacgacgaaaacgacgacgacatcggcggtggcaagatgcaggtgcagtacgagacgtcgtcccatttccaacggccgcagctgcagaaccagaacgtcgtcgtcggccggccaaacgcgagcggcggcggcggcggtggcgctccgacgacaccggcgggccctccgccgcctgcggcaacaagtgggacgtcattcttggcctgcgtccagtga

SEQ ID NO: 13025 - DNA, 852 bp, Oryza sativa
  Clone ID: TFbOSC900242j.C1.o18.fg
atggatcccttccaccacctcaactcctccttctccaacccctaccacccactcctcgcctccccgccccaccacttcgcccccgacccactccccccacctcctcctccgccgccgccgccgctgctccccgccgacccgccgtcgctcgagcgggagcgcctcccgcagtggtcccacgccgagaccgccgccttcctcgccatccgcgccgacctcgaccactccttcctctccaccaagcgcaacaaggcgactctgggaggccgcctcggcgcgcctccacgccctcggacttcgccaggacccccgatcagtgcaagtccaagggaagaatactcggttgagagggcgcgcgcattggagaggaagaaggttaaggggaaggatcctgatgatgaccacgacggtggtggtgatggggatgaggatgatgaggaggaggcggatcagcaggtcgacgaggaggacgacggggcgtccggggacacgacgagggccgggtcgaagaagcggaggaggaaggcggcggcggcggcgaggaggacgggttcgacgggcggggtggagggcgaggtggaggcgatgctgcgggagttcatgcggcggcagattgagatggaggagcggtggatggaggcggcggaggcgcgcgaggccgagcgccgcgcccgcgaggaggagtggcggaccgccatggtcgcgctcggcgaggagcgcctcgcgctcgtccgacgctggcgcgagcgcgaggacgcgtggcgcgcgcgcgccgaggagcgcgaggagcgccgccaccagctcgtcgccgcactcctcgccaagctcggcgccggcgacgcgtccgcctga

SEQ ID NO: 13026 - DNA, 1233 bp, Oryza sativa
  Clone ID: TFbOSC401599j.C1.o10.fg
atggaggggaatttgccgccgagaggagcccttgtccatggccatggcggcggcgtcggcgccttcgatctggaggcgacgatgcagccgccgccgccgttccacttcgcccaggatccgcacctccaccaccaccagggcatggtccccgtccgcgggaacccgatgctggatttgggcaatgtggtcaagacctcgccgagcgacgaggaggacgtggatgacggccaccaccatggtggcggcggcggcagcggtaaggaggcctcccagtggcaccgggtgaagtggatcagtggcatggtcaagctgctggtgtccgccgtggcctacatcgacgaggacgtcgacatggactacggcacgggcagcgccgcgaggaggaagcacgccatgctgaagaggaaggggaagtggaggctcgtctccgcggcgatgaccgagaggggcttcccggtgtcgccgcagcagtgcgaggacaagttcaacgatctcaacaagaggtacaagaggatgaccgagatccttggccggggaacggcgtgccaggtcgtcgagcaccccgagcttcttgaagggatgcggctctcgggaaagctcaaagaggaggctaggaagcacctgaactcaaagcatctgcactatgaggagatgtgctcgtaccataacaggaacaaaatgtgtctgtttgatgatcccgcccttcagaagtcattgcgtttggcgcttaggagtggagaggagcatgcaaagaagaacccgtttgggtatgatgatgaggatttttctgacgatgacgacgaagatgaagaattcgatgatctggaggtcagcgctgaagatcatcaccatggaattcatggtgccaagaggctgaagcatgatcaggaggagacgcattttgggtctaatctgtcagaagttgctgttattgacatgaacaaaatgctctctgagggatctggtggtccaactgctgaaaagagtccctctacccctggtatgcgtgatattcgacttgaaaaacgccgcctgaagatcaaagctcagatgctgaaaattgagcagaagcatttcaagtggctgaggttcagcaaggagaaggacagggaattggagaagatgagactggagaatgaaaagatgaaactggagaatgagcggttggaattggagctgaagcttaaagaaatagagatgggtatcaaaccaaagaagatttttagtgattga

SEQ ID NO: 13027 - DNA, 1644 bp, Oryza sativa
  Clone ID: TFbOSC400601j.C1.o83.fg
atggggccgaggggggtggtggggtcggcggcaatgctggggctggagatgcacctcgcccacccgcagatgcacgccgccgcgtaccagcagccggacccccacggcggcggcggcggcgggttccagcagcaggtggcggcggtgaggcagcagcagcagcagtcgtactcgccctactcggcgggggcgtcgtcgagggtgatcaaggcgcccggccatgacgatgggatgggcaacggcgccggtaagggcggcgtggtgcagcagcagcagcagcccgggtcggtggggtgcccgtggacgcggatgaagtggacggacgggatggtgcggctgctgatcaacgtcgtgtacagcgtcggggacgacggcgatggcgtggcggcgggcggcgccgcgggtgggaaggcgtccgcgggggcggcggggcacgggaaggccggcgggtccgggtcccacggcgcgcacgggcaggcggcggcgcagcagaagaagggcaagtggaagtcggtgtcgcgggcgatgatggagagcggccacatggtgtcgccgcagcagtgcgaggacaagttcaacgacctcaacaagcggtacaagcgcgtcgtcgacctgctcggccgcggcaaggcgtgcaaggtcgtcgagaaccacgcgctgctcgacgccatggacgagctcacccacaaggccaaggacgaggcgcgcaagctgctcagctccaagcacctcttcttccgcgagatgtgcgcctaccacaactctggcgcggccgccgccgccgccgcgcacggcccgcacggcgccggcgccgccggcgtcgaggccaccgcctgcttccaccacccgccgcccgcgtccatggccgccgcctcgtccgccgcgcgccaggcggcggcggcggccccttcccttgggatgaaggactcctccgcgggcccggaggacgacgaggacgacagcgaggacgtccccagcagcaacgaggtcgatgacgaggacgatgacgacgacgacgacgacgacgaggtgggcccagggatgaagtcccgccggatctacggcggccaccgcgtccaccaccaccaccaccaccacaacggccaccacaagcgccgccgtggcgacgacgtgtcgtcggcgggcgcgggggacgacgacgacgaggacggcgtgaagcgcgcgaggggggcggcctcggccgcggggggaggcgacgacgaaggcccctccgcggtgcagcagctgcagagcgagctggcggctgcggtggccggcggcggcgacccgcagcaggtgcggcagtgggtacggcggcgcacggtggaggtggaggagcagcaggtggcgcacgaggtgcgcgcgtaccacctggagcggcagcggctcaagtgggagcggttccgcgccaacaaggagcgcgacatggagcgcgcccggctgcgcaacgaccgcctccgcatcgacggccgccgcatgctcctcctcctccgccagaaggacctcgacttcgacatcgccgaggcaaactcctcctccgtcgaccacctcacctcgtccgccccgccgcccctcgccgcgctccagcagcagcagcagccgctcggctccagcccctccaccgccggcggccaccccaactaa

SEQ ID NO: 13028 - DNA, 990 bp, Oryza sativa
  Clone ID: TFbOSC404645j.C1.o10.fg
atgtctggcggcggcgaggtgtcggggagggcgccgcggctgccgaggtggacgaggcaggagatactggtgctgatagaggggaagcgggtggtggaggggcgagggagggggagggggcggggcggcggcggcggcgccgccgcggagccgaccaagtgggcggcggtggcggagtactgccggcggcacgggctggagcggggccccgtgcagtgccggaagcggtggagcaacctcgccggcgactacaagaagatcagggagtgggagcgctcgctgtcgtcgccgtcgtcgtcgtcggcggcggcggggatggggaaggaggtgtcgttctgggcgatgcgcaacgacgcgcggcgggagcggcggctgccggggttcttcgaccgggaggtgtacgacatcctcgagggccgcggcggcggtaatgcggcggcggcggcggcggcggggaaggagggggaggaggagaaggcggcggtgttcgacagcggccgcgccgcggccggcggcggcggcggcggcggggatgatgggctcttctcgtcgtcggaggaagaggaggacgacgacgaggcgaccccgccggcgaccaccccggccgctgccccggccccacctccggctccggcgccggcggtgcccgtcctgacatccgagaagaagagtgatccacctaggcaagatgcctcagagcaagcggggacgtccagagccaagcaaccggaacaaattgtcgaggactcaccagctcagggcgcgcacaagaggcagcgcagcgacgacgcctcaggagaagctcctgatctgcaggggcagctgatcgaaatcctagaccggagcagccggatggttgcagcccagctggaggcgcagaacatcaactgccaactggacagggagcagaggaaggaccaagtgagcagcctacttggtgtgcttggcaaggtggctgatgccctatacagaatcgctgataagatgtag

SEQ ID NO: 13029 - DNA, 1299 bp, Oryza sativa
  Clone ID: TFbOSC9116j.C1.o2.fg
atggaaggcaacaacctaccctctggaagcttgatgcgttctaactctgggcaaatgcatgctccaaatcctggaaagcagggctttgaccatactcagatgcctggcaatttatcgatgcatgtaaaccagtctacagattctgatcacttgtcagaatttcaattcggagagcttggaaaggttgaccaccaccaccaccatcaccatcgtcaacacgccaagaacggcatgagtgatgatgaggaacatggtgtcaacgaggatgccactgatagccagagcggcaagggaaagaagggcgctgcatggcagcggatgaagtggactgattcaatggtcaagcttttaattactgcagtatcttacactggggaggatccaggagctgattcaggagctgggaagagaaactctgcaataatgcagaaaaagggcaagtggaaggcaatatcaaaggtcatgggtgagcgaggctgcagtgtatcaccgcagcaatgtgaagataaattcaatgatctcaataagagatacaaaagacttacagatatccttggccggggtacagcttgcaagattgtggagaatcatgctctgctggattgcatgagtaatctgtctgacaagatgaaagatgatgcgaggaagatactgagttcaaagcacttgttctacgaggagatgtgctcctaccataataacaatcgagtgagtttgcctgaagatcctgcccttcagcgttcactgcagcttgcccttagatgtaaagatgagcatgatctgaggaggggaacaagcggagatgccgatgaagatgatcaaagtgtagactctgattccgaggaggagaatgatgaggaaaattacacattacaaggtgataagagtgccctgcccatgcataaaagattgaggcttatgacagatcaggaggatgtgggttttggcaactcttccagctcacatggatgtagcaggaggtctgattcccatggcatatcactggatatcaacaaagcatttcctgatggaaccaacttggctttggcgcaaaaggatttggctacacaatctgcagatcttgaggaacaaaggttgcagattgaagtccaggcagtctatcttgcaaaacaacggctcaaatgggagcgcttcagtaaaaataaggatagagaactggaacagatgaggttagagaatgaaaaaatgaggcttgagaataagcgcttggagctggaggtaaggcacaaagagttagagcttgaactcaagcaaaaaggcagtggcaatcatgcatga

SEQ ID NO: 13030 - DNA, 1452 bp, Oryza sativa
  Clone ID: TFbOSC400355j.C1.o16.fg
atgtgggccccctggtcggtgggccccctgtcggtgggccccgcgtgtcagcggttatattcatgtgcatcctcgtgcactcctgtgtccatcttatatggtaccaacaagaagttgaagtgtttgggtgatcgctttggggaaatggaaggcagcaacccacctggtaatatgacacagggaccttcctatgggagtttagatttgcatggtatctccaagcaaatgcatcctccaaactcaggaaatcagggcttcaaccagcctcagataccagggaattttaccattcctatggatagggttacagagcctgataacatctctgatggagttcagttaggacaacatgggaagattgcccatcatcaccatcaccacagacaccactcaaagaaccatgggagtgatgaagaggagcacgatatgaatgaggatgctgctgatggcaaagacaagaagggctctccatggcatcggatgaagtggacagattcaatggtgaagcttttgattactgcagtatcctacacaggggaggatcctggagctgatttaggcggtgggaggaggaactattcaatgatgcaaaagaagggaaaatggaaagcaatatcaaaggtcatgggcgagagaggttgccatgtgtcgccacagcagtgtgaggataagttcaatgaccttaataagagatacaaaagactaacagatatccttggaaggggtactgcttgtaatgttgtggagaatcactcacttcttgatcacatggatatttctgagaagatgaaagaggatgcaaggaagatactgaactccaaacacttgttctatgaagagatgtgttcctaccataataataaccgtataagtctgcctgaagatcccgcacttcagcagtcactacagcttgctcttagatgtaaagaggataatgatttcatgaggcatgcaagtggagatgctgaactagatgatgatcagagtgaagattcagattatgaggagaatgaggaagaacatcgagcagttgataccaatataaggggcccctcaatgcataaaaggatgtggcatgttgtagatcatggtgatgtaggttttgtcacctcatgctcgaatgatggtagtgggaggtctgatccctatgacgtgttggatatcaacaaaccctttccagatggatgtgatttggctttggtgcaaaaagacttggctctgaaagcagcagagattcaaaaacatcgtttgcagattgaaaccaaggctgtgcaactcgcaaagcaacgtctcaagtgggagatgttcaggaagaacaaggacttggaattggaaaagttggcgttggagaatgaacaaatgatgcttcagaataagcggtttgagcttgacctaagacacaaggagctagaacttgagattaagataaagggcaatgctaatcatccatga

SEQ ID NO: 13031 - DNA, 834 bp, Oryza sativa
  Clone ID: TFbOSC400920j.C1.o34.fg
atggagcccgggtgcggggaaggaggaggaggaggaggagggagggatgagcgggtgccgcagtggggcgcgcaggagacgcgggagctgatcgcggcgcgcggggagatggagcgggagtccgccgccgcggccgccgcgcgccgcagcgccaagacgctgtgggaggcggtgtccgcgcgcctccgtgagcgcggctaccgccgcactgccgagcaatgcaagtgcaagtggaagaacctcgtcaaccgatacaagggaaaagaaacatctgatccagaaaatggtagacagtgtcctttctttgatgagttgcatgcagtcttcactgaacgagctagaactatgcaacaacaactccttgagtctgaatctggaccatctgttaaaaagaaactaaagcgaccaagtggtgacctgtcatcggaggactctgatgatgaggaagatggcagtggagatagtggcgatgagaaacccataagaagcagaaagaggaaaattgctgacaagaggcaacaatcgcaacgaatggcagaaaagtcgaggactagcatttcaagcatccatgaattgttgcaggatttcctggtgcagcagcagcgcatggatattcagtggcatgagatgatggagaggcgttcccaggagcggattgtttttgaacaagaatggcgtcagtcaatgcaaaagctagagcaggagagactgatgctggagcacacatggatggagcgagaggagcaacgaaggatgagagaagaagcacgagctgagaaaagggatgccctcctgaccacactcttgaacaaagtcttacaggaagatttatag

SEQ ID NO: 13032 - DNA, 270 bp, Oryza sativa
  Clone ID: TFbOSC900104j.C1.o3.fg
atgccattgacgttgctctgtctcgccttttcaccgtttgcttggcccccttccctcccccctccccctcaaaccccagacgccatcgctggctgtaagaacaaggcagaagcaggagcaggcaggtggcttcggcaggatacactggagctgctcacgatccgacccgagatggacacggtgttgcaggaagcgaccctcaacggggccatttgggaggaaatctccaggatctgtgatgtattttttgttggagattttgtgatgtga

SEQ ID NO: 13033 - DNA, 1062 bp, Oryza sativa
  Clone ID: TFbOSC900025j.C1.o26.fg
atgacgccgcagccccagctgcaaccaccgcagccgcagagcaaggaggccaacaccgtcgtccgggcggcgccgccgccgcaagagcagcacgacacggcggcgtccggcggcggcggcggcgcgtcgtcgtcgaggtggccgaaggcggaggtgcacgcgctgatccagctgcgcacagagctggagacgaggtaccaggactcggggcccaaggggcctctctgggaggacatctcggcggggatgcggcggctggggtacagccggagctccaagagatgcaaggagaagtgggagaacatcaacaagtacttcaagaaggtgaaggagagcaacaagaagcgccccgaggactccaagacatgcccctactaccaccagctcgacgcgctctaccgcaccaaggcggccaacgccgccgccgccgcctcagcctcgccggctccggcgaccaccaccgtgcttgccccggtgccgctctcccagacgccgccgcacgtcgaccacggcggcagcaacggcaatgggaatgggtgggcgagtgccaacaacggcggcggcggcagcagctccgggggcatgcaaacgaaggctagcaacaatggcacggcgacggccggcgggctgcccgtcgtttcggtcgccggcggcaacggcaacggcaacggcgtggcggcgacgacggataacaagggatcgaagcaggtgcccgtcgcgaaggagacggcggggcagaggcagccacagccgttggccatgaaccacaactacggcaacgacagaatggccgacgacatggacagcgacagcatggacgacgacgacgacgacgacgaatttgacgacgacgaaaacgacgacgacatcggcggtggcaagatgcaggtgcagtacgagacgtcgtcccatttccaacggccgcagctgcagaaccagaacgtcgtcgtcggccggccaaacgcgagcggcggcggcggcggtggcgctccgacgacaccggcgggccctccgccgcctgcggcaacaagtgggacgtcattcttggcctgcgtccagtga

SEQ ID NO: 13034 - DNA, 2064 bp, Oryza sativa
  unsure (1)..(2064): unsure at all n locations
  Clone ID: TFbOSC900025j.C1.o23.fg
atgccgccattctcggcagccggcggcgagggggcgccgtcgccgatcagcagccggccgccgccgccggagcaggcggcggcggcggcggcggaggagcagctcaacgggagctcactggagcacgacggggtgctgggcggcgaggagggcgaccggggcgggtcgtcggcgggcaaccggtggccgcggcaggagacgctggcgctgctcaagatccggtcggagatggacgccgccttccgggaagccgccctcaagggccccctctgggaggaagtctccagaacccaaaaagtaatagagaattcagaaggaaccagtacaacccctccagtagttgctttcaatcagaagggagagctacttgttggaacaccagccaagcgtcaagcagtgaccaacccacagaacactttctttggtacaaagcgtctgatagggcggcgctttgatgacccgcaaactcagaaagagatgaaaatggtaccatataaaattgtgaaggctctgaatggtgatgcttggctcccccccccacatggcaagcagtactcaccgagccagattggtgcctttgttttgaccaagatgaaggagacagctgaatcttaccttggaaaatctgtttccaaggctgtgattactgttccagcttatttcaatgatgctcagcgtcaggctaccaaggatgctggtcgcntcgntggtttggggggcgggggggaagaagccattggagctgtgcagctgcgtctcagctttcgctgcttgctcagctgtacaccttccctcagatctgccatttgcgtgaactgcgtggtggacagcctacagttctcatcccatcatgatgttgccatggacttgataaatagtgtcactggagttgacgaggaaggtcgttctcgtcaacgcattctttcctttgctgccaaaagatatgttagtgccatcgaaagaaatccggaagatccagatgcatactataattgggccctagtcctccaggaaagtgcagataatgtggatcctgattctagttcttcaaaagattcattactcgaggaggcttgcaaaaagtacgctgaagctacacgactctgcccaacgctatatgatgcatattacaactgggctattgctattgctgatcgagccaaaatgcgtggacgtaccaaagaggctgaagaactctggaagcaggctataatgaattatgacaaggcagtccagttaaattggaacagcccccaggccctcaacaactggggtttgggactacaggagctgagcgcaattgttccagcccgagataaacaaacaatcataaaaacagctataagcaagtttcgatctgcaatccagttgcaatttgatttccaccgggctatttacaatcttggaactgtcctgtatgggttagcagaggatacaatgaggtctgcaggtccagatgtctctccaaatgacttgtacagtcagtccgccatttatgtcgcagctgctcatgcattgaagccaaattattcagtttatcgcagtgctctacgtctggttcgatcaatgctacctttaccatatctaaaagctgggtatctaactgctcctccagcagacaacaccattgcaccacataaacattgggaaaggtcagaatttgtcttaaaccatgagggactccagcaggtcgatgcctctgaaagcccttctagcaaaccccttggacatatggggagaagcaaaaaatatattaaagtagctgttgaagatatcgtttcagtgtctgcatgctccgatctaacactgccacctggtgctggcctttgtatagaaacaattcacgggcctttgttcttggttgctgatacctgggagtctcttgatggttggttagatgctatacgcttagtgtacaccatatttgcacgaggaaaaagtgatgtattggcagtttatcgagtgaaccatgcgggcatcgaggtcgtaagcccaagtaaaacagttgtcccttcttccataaactcattatttacatcgtttcggaggactggtgctgaataa

SEQ ID NO: 13035 - DNA, 606 bp, Oryza sativa
  Clone ID: TFbOSC101622j.C1.o1.fg
atggatcccttccaccacctcaactcctccttctccaacccctaccacccactcctcgcctccccgccccaccaattagcccccgacccactccccccacctcctcctccgccgccgccgccgctgctccccgccgacccgccgtcgctcgagcgggagcgcctcccgcagtggtcccacgccgagaccgccgccttcctcgccatccgcgccgacctcgaccactccttcctctccaccaagcgcaacaaggcgctctgggaggccgcctcggcgcgcctccacgccctcggcttcgccaggacccccgatcagtgcaagtccaagtggaagaatctcgtcacccggttcaagggcaccgagggcgccgccgccgtcgccgccgcggggacggatcagatgcagggggggcagggcggtggtgcggcggcgagggggtcgtcgtcgtcgttcccgttccatgatgagttgaggaggattttcgacgccagggttgagagggcgcgcgcattggagaggaagaaggttaaggggaaggatcctgatgatgaccacgacggtggtggtgatggggatgaggatgatgaggaggaggcggatcaccac

SEQ ID NO: 13036 - DNA, 2136 bp, Oryza sativa
  Clone ID: TFbOSC101782j.C1.o4.fg
atgcagtccggctacggcggcgtctctgagttccagcagtacatcatggaccccggcgccttcgccatgtccgcgccgccgcagcccgcccaggcggccgctgccgctgctgctgccgcggcggcggcggccggtggccaggagctgggcgcgccgttcaggtaccagccgctgcaccaccacgccctgcctcagcaccaccaccaccaccacccgccgcctcagatgcctccccacttggcgcacttcggcggcgccggtgggattcccttcacgcagcagctgctccaccaggcggccgccgccggccaccacccccacctccagctcttccacgagcagcaccaccaccagaagcaccagcagcagccaccgcccccggctaggtgggccccgcagcaccaccaccaccaccacccgcaccaccatctcggcctcgacgtcgaggcggccgttccggagagctccggtgccggcgccgggagcgctgcctccggcgccgccgcccctccgggcgtccctccgttcctggccgccgccatgagcttcaagctgggggtcgacggcggcggcggcagcggcgccaccggcggaacggacgacgcgctgaacgacgggggcggcgcgggcagcggcatgatgcttcatggaggaggaggaggaggtggtggcggggatgacgaggcggccacggagagcaggctccggcggtggccgggggacgaggaaacttccatcaaagaaccgacctggcggccactcgacatcgactacatacacagcagcagcagcagcaagagggcgccgcccaaggacaaacccgccactcccgactcccctgcgccgccgcccccagcgtattacttcaagaataagcccgacgacaatgccgccgccgcatccgccgcctccgctggcgccgtcaactacaagctcttcagcgagctggaggccatctacaagcccggcagcggaggcccccagacgggctccggctccggcctcaccggggacgacaatgccatgctcgcgccgcccatggctgacctccccgacgccgccgccgccaacccgccgcacctcaacacgtccgagacgtctgccggggaggacgcgcacgccgtggtgcagccgcagccgcagacgcagcagccgtcgggggcggacgcggcgcgccgcaagcgcaagcggcggcgccaggagcagctcagcgcgtcggcctccttcttcgagcgcctggtgcagcgcctcatggagcaccaggagagcctccaccgtcagttcctcgacaccatggagcgccgggagcgggagcgcgccgcccgcgacgaggcgtggcgccgccaggaggccgacaagttcgcgcgcgaggccgccgcgcgcgcgcaggaccgcgccagcgccgctgcacgcgagtccgccatcatcgcctacctggaaaagatctccggcgagaccatcacgctcccaccccccgccgccaaccccgctccgggcgccgacgagcaggacggcgtggggaaggaggtggtggcgtacgacggcgaggggtcgctgcagctgagctcgtcgcggtggccgaagcacgaggtggaggcgctgatccgggtgcggacggggctggaggataggttccaggagccagggctgaagggccccctgtgggaggaggtgagcgcgcgcatggcggcggcgggctaccggcggaacgcgaagcggtgcaaggagaagtgggagaacatcaacaagtacttccgcaaggccaaggagagcggcaagaagcggccggcgcacgccaagacgtgcccctacttcgacgagctcgaccgcctctactcccgctccggctccggcggcggtggtgggtcgtcctcggcgggcggcaatggcggggaggaggcgaagggcagctcggagctgctggacgcggtggtgaagtacccagacgtgcggtgcgcgccgccgggtttcccgttcgacggggagcagaacgaggaagggaggacgaaggacgacggcgacgaggcgcaccatgatggcgacggcgacggcgacgaggaagacgttggcgttggcgttgggagagcgaccgatgatcatgacgaccaagtggatgagagccatgacggccattaa

SEQ ID NO: 13037 - DNA, 792 bp, Oryza sativa
  Clone ID: TFbOSC401779j.C1.o45.gm
ctggtgcccgtgccggcgccgagagcgaaggcggaggacgcctgggcggcagcaggaggagacggcagcgggacgacggcgccgtcgcggtggcccaaggaggaggtgcaggcgctcatcgacctgcgcatggagaaggaggagcagtacaacgacatgggacccaagggcccgctgtgggaggagatcgccgccggcatgcagaggatcggctacaaccggagcgccaagcggtgtaaggagaagtgggagaacatcaacaagtacttcaagaaggtgaaggagagcaacaagcggcgccccgaggactccaagacctgcccttacttccaccagctcgacgccatctaccgcaagaagcacttcgctggcagaggcggcggcggcggcggcgtcacgatcgccgcctcccactccagcctcgccatcgtcaccgtctccgagcaggacaacccgagccagcgtgagctcgaggggaagagcagcaacgacgtcggcaacgtgcagctggcggtgcccctccttgtccacaacgccccagacaagaaggtggaaggctccgaaggcgaaccaaatgtcacagcagcagcggaggagacggacagcgacgagatgtgtggagaatacaccgacgatggcgacgacgacgacaaaatgcagtacaaaatagagttccagaagccaactgcgggcggcggcggcgacggcaacgacgcacccgtgccggcgacaactgcggcagcgacgagttcagccccaaccagcaacaccagcttccttgcggttcagtag

SEQ ID NO: 13038 - DNA, 453 bp, Oryza sativa
  Clone ID: TFbOSC900232j.C1.o13.fg
atggatcccttccaccacctcaactcctccttctccaacccctaccacccactcctcgcctccccgccccaccacttcgcccccgacccactccccccacctcctcctccgccgccgccgccgctgctccccgccgacccgccgtcgctcgagcgggagcgcctcccgcagtggtcccacgccgagaccgccgccttcctcgccatccgcgccgacctcgaccactccttcctctccaccaagcgcaacaaggcgctctgggaggccgcctcggcgcgcctccacgccctcggcttcgccaggacccccgatcagtgcaagtccaagtggaagaatctcgtcacccggttcaagggcaccgagggcgccgccgccgtcgccgccgcggggacggatcagatgcagggggggcagggcggtgaagacaatgagaggttggtcaagaaattataa

SEQ ID NO: 13039 - DNA, 421 bp, Oryza sativa
  Clone ID: TFbOSC101435j.C1.o1.fg
atggatcccttccaccacctcaactcctccttctccaacccctaccacccactcctcgcctccccgccccaccacttcgcccccgacccactccccccacctcctcctccgccgccgccgccgctgctccccgccgacccgccgtcgctcgagcgggagcgcctcccgcagtggtcccacgccgagaccgccgccttcctcgccatccgcgccgacctcgaccactccttcctctccaccaagcgcaacaaggcgctctgggaggccgcctcggcgcgcctccacgccctcggcttcgccaggacccccgatcagtgcaagtccaagtggaagaatctcgtcacccggttcaagggcaccgagggcgccgccgccgtcgccgccgcggggacggatcagatgcagggggggcagggcggtg

SEQ ID NO: 13040 - DNA, 2661 bp, Oryza sativa
  Clone ID: TFbOSC408508j.C1.o6.fg
atggccatttattacctggaaagggagggattaacccacaacatgccaatgcatggccatttttatactcctctgcccctgaaccattggcacgcggataccaccaacgcggctgacatgacacgtgggcccatgcgcatgtgggccccacatgtcagtggcatgaattttatatttttcatctcaaaagaaaaggtattgatgagagtagaaatggtgagctctcctgatgtactgatcattccatcacctccattccccagtggtaacactcgtgggggaggaggaggaggaggaggtagtagcatgcagcagcagcagccagggggaggagggggaggggtgcagcagttcggcgcggtggcgccggagatgtcgccattctcgccggcgggaggaggcggcggggggcggatctccatggcggaggccgcgtcgcccatcagcagccggccgccgccggcgcagcagcagttcgacgagctcggcgtaggcggcggaggcggaggcggaggtgggtttgacgccgaggcgctggcggcggcggcggtcggcgaggagggagccagcggcggcgcgggggggaaccggtggccgcggcaggagacgctggcgctgctcaagatccggtcggacatggacgccgcgttccgggacgccaccctcaagggcccgctctgggaggaggtctccaggaagctggcggaggagggttaccggaggagcgcgaagaagtgcaaggagaagttcgagaacgtgcacaagtattacaagcgcaccaaggagagccgcgcggggcgcaacgacggcaagacgtaccgcttcttcacgcagctcgaggcgctgcacggcaccgccgccggcgtcgtggcagcgccatcgccggtgacgtcgctggccccgccgccggcgacggctgtgggggtgtccggcggggtgcgcgcccccgccgagccgccgcccgcggtggtgatggggaacgtgatgagcttctcgacgtcgaacacggaggagtattccgacgaggaggactccgacgacgaggggaccgaggacatgggcggcggcggcggtgatgagagggggaagaggaagaggttgtcggagggtggcgccgccgcgggcgtcggtggcggcggcggaggaggaggagggagcgggaagatgatgaggttcttcgaggggttgatgaagcaggtgatggagcggcaggaggcgatgcagcagcggtttctggaggccatcgagaagcgggagcaggaccggatgatccgcgaggaggcgtggcggcggcaggagatggcgcgcctcgcccgcgagcaggagatcctcgcgcaggagcgcgccatggcggcgtcgcgcgacgccgccgtcgtgtccttcatacagaagatcaccgggcagaccatcccaatgccgcccatcatcgccgcccccgccatcaccgtcatgcccccaccggcgccatcccagcagcctcagccgccgccaccgccgtctcaccccacccccatcacctccgtcgcgccagctccgccgccgccgccaccagcagcagcagcagcagcagcatcccagccatcgccgcaggccaccaagtcgccattgccggcgacgccgcagacgcaaagcagcatggacattgtcatgacggccgccgaggcgcacgacgcggggtacgacgggtccggcggcggcggggggcagccgtcgtcgtcgcggtggcccaaggcggaggtgcacgcgctgatccagctgcggagcaacctggacaaccggtaccaggaggccgggccgaagggcccgctgtgggaggagatctccgccggcatgcggcggctgggctacagccggagctccaagaggtgcaaggagaagtgggagaacatcaacaagtacttcaagaaggtcaaggagagcaacaagaagcgccccgaggactccaagacctgcccctacttccaccagctcgacgccctctaccgcaacaaggcggctctcaactcctcctcctcctccgccgccgccgccgcaccggccctcccgccgccggagcacgcggagccggcggtgacagtcgccgcgccgatctcgcagacaccgccgccgccgccgccacagcccgtgacgacgaccaagaacggcaacggcaccagcagtacaaacggcgcgaacggcgaaggaggaggaggcggctccgggggcatgcaaatgcaggcgagcaacggcagcgtcgtcgccggcaacaagttcttcaccggcgcggcggcgaagaagccagaggacattatgaaggagatgatggagcagaggccgcagcagccggcggcggcgaacaacgccttcaaccgaacggacggcggcggtggcggcggcggcgtggacagcgacaacatggacgaggacgacgaggatgactacgacgacgatgacgacgacgacgacgacgacgtcgacggcaacaagatgcagtacgagatccagttccagcatcagcaccaccaccagcagccgccgcagcaccgccaccagcagagcgtcgtcagaccgaacgccgccgcctccgcggccgccggcggcaacccgcccggcaccgccgcccccgccacggcggcggccgcaacgacgaccaccggatctttcttggcaatggtccagtga

SEQ ID NO: 13041 - DNA, 1827 bp, Oryza sativa
  Clone ID: TFbOSC401782j.C1.o3.fg
atggccgccgcgttcgacctgcctccggtgaccacgccggcgcccgccgctccaagtgacgtcctgctgccgacgcagccgcaggtgtcgggtcccgaagaattccccgctgccgccgtcaactccaacgacgacgacatgatgatggtcgacgacgtcgtcgtcgccggcggcgtcggcgggagcgggagcaccggcaaccggtggccgcgggaggagacgctggcgctcatcaggatccggtcggagatggacgccgccttccgcaacgccaccctcaaggcgcccgtctgggaggagctctccaggaggcttgcggaattggggtaccagaggagcggcaagaagtgcaaggagaagttcgagaacgtggacaagtactacaagcgcaccaaggaagggcgcaccgggcggcaagacgggaagagctaccgcttcttctcgcagctcgaggcgctccacgccgcggcgccgccgccgccgccgcagcaacggcagggcatgccggtggaggacccgcagccgctggcgatggcgtggatgatgttgcccggggcggcggacctcgggttcttgtcgatgtcgtcggagtctgagtcggacgatgagtccgacgaggaggaggaggaggaggaggcggtggcgccgggcggcggcggtcgggaggggcttggcgatgatggtgacggtgatggcgaagggggcagcagcaccaggaagctgatggccatgttcgaagggatgatgaggcaggtgacggagaagcaggacgcgatgcagcgggtgttcctggagacgctggagaagtgggaggcggagcgcaccgagcgggaggaggcgtggcggcggaaggaggtcgcccggatcaaccgcgagcgggagcagctctccaaggagcgcgccgcggcggcgtcccgcgacgccgcgctgatcgcgttcctccagcgcgtcggtggcgccggcggggagcccgtgaggctctccccttcgtccgccggcgccacccgccacgacgcggccgcggcggggctgcagctggtgcccgtgccggcgccgagagcgaaggcggaggacgcctgggcggcagcaggaggagacggcagcgggacgacggcgccgtcgcggtggcccaaggaggaggtgcaggcgctcatcgacctgcgcatggagaaggaggagcagtacaacgacatgggacccaagggcccgctgtgggaggagatcgccgccggcatgcagaggatcggctacaaccggagcgccaagcggtgtaaggagaagtgggagaacatcaacaagtacttcaagaaggtgaaggagagcaacaagcggcgccccgaggactccaagacctgcccttacttccaccagctcgacgccatctaccgcaagaagcacttcgctggcagaggcggcggcggcggcggcgtcacgatcgccgcctcccactccagcctcgccatcgtcaccgtctccgagcaggacaacccgagccagcgtgagctcgaggggaagagcagcaacgacgtcggcaacgtgcagctggcggtgcccctccttgtccacaacgccccagacaagaaggtggaaggctccgaaggcgaaccaaatgtcacagcagcagcggaggagacggacagcgacgagatgtgtggagaatacaccgacgatggcgacgacgacgacaaaatgcagtacaaaatagagttccagaagccaactgcgggcggcggcggcgacggcaacgacgcacccgtgccggcgacaactgcggcagcgacgagttcagccccaaccagcaacaccagcttccttgcggttcagtag

SEQ ID NO: 13042 - DNA, 194 bp, Oryza sativa
  Clone ID: TFbOSC101435j.C1.o1.np
ttcccacgccggctccatctagggacgagtgcctagaggctctcatcattccgacgggacggggcgaggcggggtcggggcgccccagccctcggggacaaaacgggagcggcccgacccctcggggagatagagggaggggcggcctcatcacccttgggcccgacccccccgagggggtcaggccacgtggg

SEQ ID NO: 13043 - DNA, 247 bp, Oryza sativa
  Clone ID: TFbOSC401779j.C1.o36.gp
cgcttggcgctccggttgtagccgatcctctgcatgccggcggcgatctcctcccacagcgggcccttgggtcccatgtcgttgtactgctcctccttctccatgcgcaggtcgatgagcgcctgcacctcctccttgggccaccgcgacggcgccgtcgtcccgctgccgtctcctcctgctgccgcccaggcgtcctccgccttcgctctcggcgccggcacgggcaccagctgcagccccgccg

SEQ ID NO: 13044 - DNA, 1158 bp, Oryza sativa
  Clone ID: TFbOSC416839j.C1.o1.fg
atgctcctctccgggccgtcgccgcagcagcccaccccgccgctgctcctcccggagagcagcggcgaggacggcggccacgactcctcctcccgcgcggcggcgtcgggcggcggcggcggccccaagaagcgcgcggagacgtgggtccaggacgagaccctctgcctcatcgcgctgcgccgggagatggactcccacttcaacacctccaagtccaataagcacctctgggaggccatctcggccaggatgcgggagcaagggttcgaccgctccccgaccatgtgcaccgacaagtggaggaacctcctcaaggagttcaagaaggcgcgcagccacgcgcggggcgggggcggtggtggcgtgggcggcggcggcgcgggcaccggcggcgggaattgccccgccaagatggcgtgctacaaggagatcgacgacctgctcaagcgccgcgggaagccgacgggcggtggcggcgccgccgtggggagtggcgccgtcaagagccccacggtcacctccaagatcgactcctacctgcagttcgacaagggttttgaagatgctagcattccgttcggccctgttgaagcaagtggtagatcattgctaagtgtcgaagatcgactagaacctgatagtcatccacttgcattaacagctgatgcagttgcaaccaatggtgtaaatccatggaactggagagacacctctaccaatggtggagataatcaggttacttttggtgggagagtcattttagtcaagtggggtgattacactaaaagaataggcattgatggtactgcagacgcaattaaagaagccatcaaatcggcatttggtctaagaacaagacgggccttttggcttgaagatgaggatgaggttgtccgttccttagacagggatatgccggttggaacatacacccttcatctcgataccggaatgaccatcaaactatatatgttcgaaaatgatgaggtccggacagaagacaagacattctacactgaagaggacttccgagactttctctcgcggcgtggttggacactcctcagggagtattcaggctacagaatcgccgatactctggatgaccttcgtcctggtgtgatttatgaagggatgcgatcacttggtgattga

SEQ ID NO: 13045 - DNA, 272 bp, Oryza sativa
  Clone ID: TFbOSC4354j.C1.o1.gm
atggcgctgtttgggtttatcaagcaattgattggatacaacatcattgctttttgccacccctccacagtcttcatatttggtaaaagtactcgggagatcatggcgaggatgattgaagcacacggctttggaggtgacgagaatggctcgtcggctgacaacaggtggcttcggcaggatacactggagctgctcacgatccgacccgagatggacacggtgttgcaggaagcgaccctcaacggggccatttgggaggaaatctccag

SEQ ID NO: 13046 - DNA, 1269 bp, Oryza sativa
  Clone ID: TFbOSC24072j.C1.o1.fg
gaggaagtcctacagattgtcaaaccacagcatttcttgcctgttcatggagaactcctgtttcttaaagaacatgaattacttggaagatctactggcataaggcacaccactgtaattaaaaatggagagatgcttggcgtgtcacatttaagaaacagaagagttttgtctaatgggtttgttgcattagggaaggaagatttgcggctaatgtatagtgatggcgataaagcttttggaacatccactgatctctgcattgatgagagattaaggattgcatctgatggcgttatttttgtcagcatggaaatcttccgacctcagaaggaacttgcttcatcacagtcaggattgaaagggaagttcaaaataacaacaagatgcctatggcttgataatggaagactattagatgcactttacaaagctgcatatgctgcattatcaagttgtccagtgaattgtccacttagtcacatggagaggatggtatctgaaatcttgaggaaaatggtaaggaagtatagtgggaagaggcctgatgtcattgcggttgctacagagaacacaacagtgagttttgtagaagactcagaaactaaatcatctggaaagtttggatctttctcagctcctaggcattcgagcaggagttcaggtaggagtcttgaagaaagtgataaatcatgcccagagaatacagagggagaggctaaagaaaatcttcctgatgtcctgagaacaacacgtgatgatgcaaccacaagctccaatggcgaagcatttttctcctcagatttgcataagcctaaaacactagagcatttttgggactcattcaaatcccctacagctgtaaaaattgcaagaattgtcaatggttcagctcaagggagtaaatcaaagattggcaagatcagcatagtgggtaaggactctagcgatccttcttctgctccagttaaatcttcaaaaaagaacaagtggaagcctgaggaaattaagagcttaattcagatgcgtggcgaaatgaatgagcaatttcagactgtgaaagggagaatggttctgtgggaagagatatcttctagcatgttgagccaggggataagtcgtacaccagcacagtgcaagtctctatggacatcattggttcagaaatatgaggagagcaagaaagatgaggaaagcgtaaagacgtggccgtatttcttggacatggacagggttttatcaagccaaggggaaatggcaacccaatga

SEQ ID NO: 13047 - DNA, 2649 bp, Oryza sativa
  Clone ID: TFbOSC900303j.C1.o3.fg
atgggggcgctcgcctccctctcgtccctctccccctgcgggctcgcgcgccgccgctcggcctcctcagccgcctctatctcatgctgcgcggccccgcccccgccctccgcgaaaggatctcaagaatccagaactccacgtagaagggtgaggaaaactgagggtgccaccaagagcctggaagattcagtcaagcgaaagatggagcagttttatgaaggattggatggtccacctctccgagtccttccaataggtggccttggagaaatcggcatgaattgcatgctcgtagggaactatgaccgttacatattgatagatgcaggggtcatgtttccagactttgatgagttcggtgtgcaaaagattatcccagacacaacattcatcaagaaatggagtcacaaaatcgaagctgttattataacgcatggccatgaagatcacatcggtgcgttgccctgggtaatcccagcgctggattcaagcacaccgattttcgcatcatcttttaccatggagctaataaagaggcgtttgaaggagtttggaatttttctctcgtccaggcttaaggtttttagagtaaggaagagatttcaggctgggccatttgaggtggagcccctccgtgtaactcattcaattccggactgctgtggcttagtgcttcgttgtgctgatggcataattttccatactggtgactggaaaattgacgaatcaccagtggatggaaaaatatttgatcggcaagcattggaagagctctccaaagaaggcgttacacttatgatgagtgattctacaaatgttctatcccctggaaggtccatcagcgaatctgttgttgctggttcattgttgcgacatatttcagaagcaaaaggaagagtaattaccacacagtttgcttccaatatacatcgtattgggagcatcaaagctgctgcagacttaactggtcgaaagctggtatttgttggaatgtcactcaggacttaccttgatgctgctttcagggatggaaagtcaccgattgatccatcaaccttggtgcacttaatagaatctaggttcttgctgaaggttaaggtagaggacatggatgcctatgccccaaatgatcttctagttgttactacaggttcacaagcagagccacgtgcagctctaaatcttgcatcttttggaggaagtcatgcccttaaactatccaaagaggatgtccttctgtattctgctaaggttatccctggaaatgagtcacgtgtaatgaagatgttaaatcgccttactgagcttggtccaaaaattgtgatgggaaaggatgctggtctccatacctctgggcatgcctatcacgatgaacttgaggaagtcctacagattgtcaaaccacagcatttcttgcctgttcatggagaactcctgtttcttaaagaacatgaattacttggaagatctactggcataaggcacaccactgtaattaaaaatggagagatgcttggcgtgtcacatttaagaaacagaagagttttgtctaatgggtttgttgcattagggaaggaagatttgcggctaatgtatagtgatggcgataaagcttttggaacatccactgatctctgcattgatgagagattaaggattgcatctgatggcgttatttttgtcagcatggaaatcttccgacctcagaaggaacttgcttcatcacagtcaggattgaaagggaagttcaaaataacaacaagatgcctatggcttgataatggaagactattagatgcactttacaaagctgcatatgctgcattatcaagttgtccagtgaattgtccacttagtcacatggagaggatggtatctgaaatcttgaggaaaatggtaaggaagtatagtgggaagaggcctgatgtcattgcggttgctacagagaacacaacagtgagttttgtagaagactcagaaactaaatcatctggaaagtttggatctttctcagctcctaggcattcgagcaggagttcaggtaggagtcttgaagaaagtgataaatcatgcccagagaatacagagggagaggctaaagaaaatcttcctgatgtcctgagaacaacacgtgatgatgcaaccacaagctccaatggcgaagcatttttctcctcagatttgcataagcctaaaacactagagcatttttgggactcattcaaatcccctacagctgtaaaaattgcaagaattgtcaatggttcagctcaagggagtaaatcaaagattggcaagatcagcatagtgggtaaggactctagcgatccttcttctgctccagttaaatcttcaaaaaagaacaagtggaagcctgaggaaattaagagcttaattcagatgcgtggcgaaatgaatgagcaatttcagactgtgaaagggagaatggttctgtgggaagagatatcttctagcatgttgagccaggggataagtcgtacaccagcacagtgcaagtctctatggacatcattggttcagaaatatgaggagagcaagaaagatgaggaaagcgtaaagacgtggccgtatttcttggacatggacagggttttatcaagccaaggggaaatggcaacccaatga

SEQ ID NO: 13048 - DNA, 465 bp, Oryza sativa
  Clone ID: TFbOSC5909j.C1.o1.fg
atggcgatgctggggagctcgtcggcggtggtgctggagctgatgacgatggggtaccagtcggcggcgtacctcggcgagctgctccgggcggcgtccccggcgcaggcaggggatgagcagcaggagctcgccgcggagatcctccgctgctgcgaccgcgtcatcgccaagctgaaccggggaggagccactggtgctactaccggcaagaagcggaaggcggcggagtccgccgccgccgccgccgtgacctccccttctctccccgtcacgccgaccaaaagaagggcgcgtggcgcggaggcggtgagggaggtgaggagcggcacgacgacggacgggttcatctggaggaagtacgggcagaaggagatcaatggctgcaagcacccgaggctctactaccgctgcgcgttcaggggccagggctgcctcgccacgcggcgggtgcagcagtcgtag

SEQ ID NO: 13049 - DNA, 990 bp, Oryza sativa
  Clone ID: TFbOSC404464j.C1.o5.fg
atggcatttggtcaagataccatagagcagctgtaccgggagctcgccggcggccgccgcctcagcgccaagctccaggcgctgctcgaaggccccctcgatagccgcggccagaaggaggccgtcgatgttagcagagagctcgggcgagtgttcatggtgtctctctacatgctgaagccttgcagcaacagcagcagacgaccggaaggagtgaccaggacggcgccggagacgaggactgacgatagcatttgcttgcacactccggcgagggttaaacgcgttaggttgtacttcaagtgcacgttcagccgcgagcggagttgcgcggcgaagaagcaagtgcagcagcgggacgccggcgagccgcccatgttccttgtcacctacctcaacgagcacacgtgccagcagccgcaagctgttcccggcacgcccaacactgcaggtagctcgccgacgacgacgagccggcaacgacagtcgtcctcctccccgccggcggaaatgttggacctgacgatgaacggcgccggcctctttagccgtcttcttttaccccacgccgtcggcggcggcggcagcgccgccgaagaggaggccgccatcgtcacgtgcctcgcggcggtcatcagcggaggaggcgccgcagccgctccgccgccgttgatctggccgacatcggccccagaggcggcgttcgtggcgttcgcggcgggacactcggcgagcgccgcggacgagagcgtggcggacgaggcggcggcggcgcagattgccgacatggactactgtttcggccagtacgatcagtcaacgttcggggcggcagcagcagcggatcaccgtgtgttgatcggtgacgacggcgacgtgcagcgcatcgtcgcggcgcggatcgcggacacggtgtgcccgcggtacacgcgcgacacgagtgcatgggagactgctgggacgtcgtcgatgagaggatcgatcgattga

SEQ ID NO: 13050 - DNA, 885 bp, Oryza sativa
  Clone ID: TFbOSC413087j.C1.o3.fg
atggtggagctctgcggcggcgagggggaggggcagatcatgctggcgacggagctggcccagctgcgggccatggcgagggagctggaggcgaagatggacccggacagggtggccgcgcgggagctctgcagggcgctggcgtcgtccgtcgaccggtccatccgcctcgccgcgtcctgcttcccgccgccggagcacccgccccccgccgccggcaatgccggcagggacgccgcgttcaagaagaggcaagtcatggttcccggtcatggtggtttaatttcagggttgagagatcgccggagcaacgctctgacatgtgtttcgatgcaggaaggggatggccaaggtgaggaggcaggtgagggtgacgtcggtgcaggacacggcgtcgctggacgacggcctgagctggaggaagtacggccagaaggacattcttggcgccaaatacccgagggatgcaacgcgaccaagcaggtgcagcgcgccgacggcgacccgctgctcttcgacgtcgtctaccttggcgaccacacctgcggccaggccgccgtcgccgccgccgcccagagcgcgccgcccgagcatgccggccaggagcagcagaggcagagctcgctgctcgctgcgggaacggaaggaattcatcagcaggtagtggcagagcctatggcggcgccgttcttgttcacctcgacggcggccggcggcgtcgacgacggctacttctccttcatctcgccggcgaactccgactgccagttcagcagcgacttctcggcgggcagcgtcggggttgacatggaccacgaggctcgtttcgaagatcttttctcgagcactcttgagtttttccaatcggagattcagaatctgtag

SEQ ID NO: 13051 - DNA, 1455 bp, Oryza sativa
  Clone ID: TFbOSC404471j.C1.o29.gm
atggttaagaggagcgacaacatggacagctccagtgaatgttctagaggagcccataaaaggcttctgcaggacagtaggagctatgaccaggagaacgctatgaagtgctactacaggtgcacgtaccatcaggaccatggctgtccagcgagcaagcacgtggagcagcacaactcggaggacccgcctttgttccgggtgatctacaccaacgagcacacatgcggcaccagcaattctgcctccgattacatggcttcctccatgcaaatccagcagattgccgacgcctccttgagaaaggcacaggcggcggaaagactgagaaaggcagaggtggaaacacctcgcctgatgcattctcctcctcctcgctgcagcggcggctacaacatggcgatgaaagaagagaaggatgtgatcgtctcctcgctgctcaccgtcatcagaggctgtcacattgcagaatcagctggtggttttgataaggggatgtctagacaacgtctccaaggagagaacgacggaaacaccaccgtcgccgtccgccaagctccattgctccaccgccatcaaaacctctgccggtgtgtgggtacactgcaccggcgcccccgccggccagtctccgcatgcagccacctcaccgggctctgcctccaccgacatcacctctcgctgcgcagccatcacgcaccggccgtcctcgacgtcgccggccaagcctacacgcgttggacagttgccggccgcaactccttcagcgagccgacaccacctccgccgtcgcgggctgccggccgagccgacctcaccggccaaccgcaaccaccagttgctgcgcctccgcacgccgtcgcccgcgcatgttgccacctcctctgcgagcgcggcctcttgcccctccgccaccgtcacggtttccggggcctccgcaccatcgcacgtgccttcaccagcctccgcgccgtcgcaccgtcgccgccagccactgcctccgtcgccaatagcgacggctggatgctcgtcgtccggccagatccagccgtcgcagagtcggacctcacccgccaccgcgccaccgggcgccaccgtccgtcgccagcagaagaccccgccaccggccacttacctgccagatccaggcgcggatctggtggtcacttctaccactgtcatcacttccaagcgccggtgccacctttgccaaacgtcgccgccacaccgcactaccacgccgatgccgccgacatcctccccgctagatccggccggacggcacggatctggacggttccgccgtcccaaacgccgagtagcccccctgcccttgcgtggagagacgaaagcgttatctttgatctcgccgggcacgaactcgaggaggaagactaccctgttgtcgactacgagtcagaacttcagaccgccatatcgacaacagttagatag

SEQ ID NO: 13052 - DNA, 161 bp, Oryza sativa
  Clone ID: TFbOSC16135j.C1.o1.gm
gttgtacttcaagtgcacgttcagccgcgagcggagttgcgcggcgaagaagcaagtgcagcagcgggacgccggcgagccgcccatgttccttgtcacctacctcaacgagcacacgtgccagcagccgcaagctgttcccggcacgcccaacactgcag

SEQ ID NO: 13053 - DNA, 654 bp, Oryza sativa
  Clone ID: TFbOSC29687j.C1.o24.fg
atggcggcggcggcctcctcgtcgacgacctccgccgccgccgccccggccacggccaccaccaccgtcgccttctccttccagcatcccacgcccacgccgtctcaccaccaccaccaccatggcgtcctaggttacagccccctcgtcctcgaccaccaccacccaaccaccgccgccgcctcctcgcacgcgccctctcctcccaccctccaccaccaccacggcggcggcctccacgccgccgcgcctcctccgagatcgtcgccgccgcatccatggtcttgcgaggaaggcgatcatcgagggaggccgcagatggggaataagggcgaggcggcggcggcgatgggcgccatggggatcaacgacgccggcaacaacacggcggcggcggcggcggcgcagcatcatctgggggttggcgcggtgaggatgaagaaggttgggggaggaggaggaggaggagggaaggcgcggcggaaggtgcgggagccgagattctgcttcaagacgatgagcgacgtggacgtgctcgacgacggctacaagtggcgcaagtacggccagaaggtcgtcaagaacacccagcacccaagggcttttgaactgccattcttcccatgcatggtgtgtgacacttttgctagatag

SEQ ID NO: 13054 - DNA, 587 bp, Oryza sativa
  Clone ID: TFbOSC5800j.C1.o3.gm
gaccatatctgatgggagatgtgctgcgagctcaggccaccgcgtcggcggaggaggtggccggcggcgtctggccctgcgagctcgacgaccacctcataggcgagctcctcggtgacgacggcctgttcgtcccggccgccgaacaccccaccctctactactcgttcggcgcggggtcatcagcagccgccgccgccgcgccgtgcaacgggggcggcagcgctgatcacgagcggcggccgcggccggcaccggcggtgagcagggatctgtgctcggtgtactcaggcccgacgatccgcgacatcgagaaggcgctgtcgtcgtcggcgtcgccccggccgccgtacccctccggccgccgctacagctctctgtatttggtggaagcggagagcaagtacacgagcaaggtgaggagctgcggcggcaagatgccggccgacgggtacaagtggaggaagtacgggcagaagtcgatcaagaacaacccacatcccagaagtaacttactgttaacagtgaaatttggtaagcccggagtagtcatcggcttagagttagcatcggcttcgaagtcctga

SEQ ID NO: 13055 - DNA, 597 bp, Oryza sativa
  Clone ID: TFbOSC408573j.C1.o16.fg
atggcgaagggaaacccttgcccgcgtgcgtattaccggtgcaccgtggccgtcggctgcccggcggcggtggccaagtcgtcatccgccaatgccgcgaccacggagatgctcgagctcttgcgggatttcagtgactactcgagcttcaactcggatatctcaagtgagctcgagcggcttgcggcggcggtgacgcctagatctgacgcgccgcaggtggctgctgtggatctgaacggcggcagcagcagcagtagcaggctgacgacgacgacgccaccaccactgctgcaacttggatgccggcaagccctccccttcatagtccccaccggtagatgcgcttctctcgccgccgtcgtcgaggaaatcagcggccggcgtgcttctccgccatggatgtcggcagctggtgatgcggtcgcagtgataccctcatatgagaatcacgtcaccgaagtctctacttgcgtgaagcattcctcctctcacaccgatattgaccgtctcaggctaagtatcacaaccccgttccatgattatgacgttattaccctcattgataaaatcatcaatccgttattctggtgttaa

SEQ ID NO: 13056 - DNA, 984 bp, Oryza sativa
  Clone ID: TFbOSC900417j.C1.o4.fg
atggacgcggcgtggcgcggcggcgttggctgctcgccggtctgcctcgacctctgcgtcgggctgtcgccggtgcgggagccgtcggcggcgaggcacgagctgcttgaccggccggccggctgccgcggcggtggggattccaagtcgatgaccaatgacgaggcgaagatcgtcgaggcgaaggtcactcagatgagcgaggagaatcggcggctgaccgaggtgatcgcccgcctgtacggcggccaaatcccgcggctcggcctcgacggctcggcctcgccgccgcggccggtgtcgccgttatcgggcaagaagaggagcagggagagcatggagacggcgaattcctgcgacgccaacagcaacaggcatcagggcggcgacgccgaccacgccgagagcttcgccgccgacgatggcacctgccggaggatcaaggtcagccgggtgtgcaggcggatcgacccgtcggacacctccctggtggtcaaggacgggtaccaatggcggaagtacgggcagaaggtgacgcgcgacaacccgtcgccgagggcctacttccggtgcgccttcgcgccatcgtgcccggtgaagaagaaggtgcagcggagcgcggaggacagctcgctgctggtggcgacgtacgagggcgagcacaaccacccgcacccgtctccgcgcgccggcgagctcccggcggcggcggggggggccggtggctcgctgccgtgctccatctccatcaactcctccggcccgaccatcacgctcgacctcaccaagaacgggggagccgtgcaggtggtcgaggcggcgcatccgccgccgccgccggacctcaaggaggtgtgccgggaggtcgcgtcgccggagttccggaccgcgctggtggagcagatggccagcgcgctcaccagcgaccccaagttcaccggcgcgctcgccgcggcgatcctccagaagctgcccgaattctag

SEQ ID NO: 13057 - DNA, 1191 bp, Oryza sativa
  Clone ID: TFbOSC401425j.C1.o34.fg
atggctaagatgcttcctcctccgagccagtcagtcccctctcgcccaccttcttggctatatattcctcctcgtcgtcgccatggcaccttcactagctcatgcgcatttcggctctcgccttcttcgccttcttctcctcctcctcctgttcttgattttcagtatattcaattcatggattcgtggattgagcagacttccctgagcttggacctcaacgtcggcctgccgtcgacggcgaggagatcatcggctccggcggcgccgattaaggttctcgtggaggagaacttcttgtccttcaagaaggatcacgaggttgaggcgctggaggcggagctccggcgagcgagcgaggagaacaagaagctgaccgagatgcttcgggcggtggtggccaagtacaccgagctgcagggacaggtcaacgacatgatgtcggcggcggcggcggcggcggtcaacgccgggaaccaccagtcgtcgacgtcggagggcggctcggtgtcgccatcgaggaagcggatccgtagcgtcgacagcctcgacgacgccgcccaccaccgcaagccatcccctccgttcgtcgccgccgccgcagccgcggcctacgcctcccccgaccagatggagtgcacgtcggcggccgccgccgccgccgcgaagcgcgtcgtccgcgaggactgcaagcccaaggtctccaagcgcttcgtccacgccgacccctccgacctcagcctcgtggtgaaggatgggtatcaatggcggaagtacgggcagaaggtgacgaaggacaacccgtgcccgcgagcctacttcaggtgctcgttcgcgccggcgtgcccggtgaagaagaaggtgcagcgcagcgccgacgacaacaccgtcctcgtcgccacgtacgagggcgagcacaaccacgcccagccgccgcaccacgacgccggcagcaagaccgccgccgccgccaagcactcacagcaccagccgccaccgagcgccgccgccgccgtcgtccggcagcagcaagagcaggcggcggcggccgggccgtcgacggaggtggcggcgaggaagaacctggccgagcagatggcggcgacgctgacgagggaccccgggttcaaggcggcgctcgtcacggcgctctccggccggatcctcgagctctcgccgaccaagaactga

SEQ ID NO: 13058 - DNA, 924 bp, Oryza sativa
  Clone ID: TFbOSC401918j.C1.o38.fg
atggccgtggacctcatgggcttcagcccgcgcggcggctgccgcccgtccgtggagacggagcagctcgctttccaggaggccgccgccgcggggctccgcagcctcgagctgctcgtctcgtcgctctccgccgggggggagcaccaccaccgccgccgcccgcaggagaagcagtcttcgccgccgctgggggagatcgcggaccaggcggtgtccaggttcaggaaggtgatctcgattcttgaccggaccggccacgcccgcttccgccgtggccctgtcgtcggagcggcagctgcggaggcggctgccgcggcggcgtcggcgtcaccgtcgtcgtctcctgtctcgccgcctctcccgccggtgacgacgcagccggcggccgccgtgaagagcctgacgctggacttcacgaatcccgccaaggtcgcggcggcgtcggtgacctcgacgtcgttcttctcgtcggtcaccgccggcggagacggcagcgtgtccaagggccggagcctggtctcctccgggaagcccccgctcgccggcggcgtcaagcgcaagcacccgcacccgccctgcgccgccgccggcgacggccacggccacggcgcaggccacgcgcacgcgcacggcgggtgccactgctccaagaagcggaagcagcgggttcggcgcacggtgcgcgtggcggcggcgagcgcgcgggtggcggacatccccgccgacgagtactcgtggcgcaagtacgggcagaagccgatcaaggggtccccctacccgcgcggctactaccggtgcagcaccgtcaagggttgccccgcccggaagcacgtcgagcgcgccgccgacgaccccgccaccctcgtcgtcacctacgagggcgaccaccgccactcgccgccgccgccgccgcttgtttaa

SEQ ID NO: 13059 - DNA, 963 bp, Oryza sativa
  Clone ID: TFbOSC419986j.C1.o4.fg
atgaagaacagcagcaacaagaggtcactagttgctgatcaatggcatccttcttctgtttgctgcgaccaccgggcggcgttgagggagatagccaaggggcagtctctggtgacgcagctccgggccatcgtgttgccggcgcttcactccgacgagcgatgcgacctcgctgctcagatgttggagggcatcctcgactgctcgaggaaggccgtctctcagctgcagcttctgctctcttctccacatgatgatgatgatcatcatcatgttgatgacaaaaggagagttaggaagatcatttcctcttctgatgatgatgatcactgcagcagcaaggcagctgaggatgacaacgccaagcctcttcgccaacacaagagaaggaggtttggtgattcggtgtcgcttgaaactccagtgccacactacgatggccaccaatggaggaaatacgggcagaagcacatcaacaactccaaacacccaaggagctactacagatgcacctacaggcaggaagagaagtgcaaggcaacaaagacggtgcagcagcgagaagacctgcaccacgccaacagctacaatggcgatcaccccatcatgtacacggttgtctactacggccagcatacctgctgcaagggccctgcggcattagctgatgatcatgtcgtcgtcgaagcatcacagattagcaccgacagccattgccagagtccgagcagcagcagcgatctgcaggctgcggaagtacacgccggtaacagcagccagtgcagcaacatctccgtcacatgttcaccatcagtcgtcgttgaggattgcaataagcttcttgacatgatgccagctgctgatgaactgaccgctgatgtcttgttgttcgacatgactgcatatgcacctttagatttggatatcaactgggaaatggatacaaatgctctgtgggtttga

SEQ ID NO: 13060 - DNA, 951 bp, Oryza sativa
  Clone ID: TFbOSC401064j.C1.o110.fg
atggcggccggagaggaggtgatggatcggtcgacgtcggccgaggacgggtactgcagcgccggcacggactcgccgcgggcggagtccgtcgacgagcaaggggccgccgaggagtcgtcgccccggggagggcagaagcgggagctcccctcgccgtcggcttcgccgtcgtccccgctgccacctgccgcgaagcgcagccggaggtcagtggagaagcgggtggtgtccgtgccgatcgcggagtgcggcgaccggccgaagggcgccggggaggggccgccgccgtcggactcgtgggcctggcgcaagtacggccagaagcccatcaagggctctccctacccaagggggtactacaggtgcagtagctccaaggggtgtccggcgaggaagcaggtggagcgcagccgcgccgaccccaccgtgctgctcgtcacctactccttcgagcacaaccacccgtggccgcagcccaagagcagcagctgccacgcgagcaagtcgtctccccggtcgacggcgccaaagcctgagccggtggctgacggacagcaccccgagccagcggagaacgaatcgtcggcgtcggcggagctggaggtaccggagccggagccggagcaggaatctgagccggttgtgaagcaggaggaggagcagaaggaggaacagaaggctgtggttgagccggcggcggtcacaaccacggtggcgccggcgccggcggtcgaggaggaggatgagaacttcgacttcggatggatcgaccagtaccacccgacgtggcaccggtcgtacgcgccgctgctgccgccggaggagtgggagcgcgagctgcaaggggacgacgcgctgttcgcggggctcggcgagctcccggagtgcgccgtcgtgttcggccgccggcgcgagctcggcctggcggccaccgcgccgtgctcctga

SEQ ID NO: 13061 - DNA, 513 bp, Oryza sativa
  Clone ID: TFbOSC400222j.C1.o67.fg
atgacgtccttggactggcagtcgctcctgcagacgtgcctgcaggtaccgcctccggtgctggagcagcagcaaccggcggcggcggcgcaggcggatcagtacagcggggagaacgatcacggcgatctgcaggcggccgagagcagcggggcaggtaacaaggagaagcaggtgatggcgaagggcggggcggggaggccgtcggggacgaagaagaaggcgagccggccgcggttcgcgttccagacgaggagcgacaacgacatcctggacgacggctaccgatggaggaagtacgggcagaaggccgtcaagaacagcaagcaccccaggagctactaccggtgcacgcaccacacgtgcaacgtgaagaagcaagtgcagcggctcgccaaggacacgagcatcgtggtgactacgtacgagggcgtgcacaaccacccctgcgagaagctcatggaggccctcacccccatcctcaagcagctccagttcctctcccagttctaa

SEQ ID NO: 13062 - DNA, 1668 bp, Oryza sativa
  Clone ID: TFbOSC401716j.C1.o59.fg
atgacaacctcgtcgtccgggagcgtcgagacgtcggccaattcgcggctggggacgttctcgttcgccagcgcgagcttcacggacctcctcgggggaaacgcgggagccggcggcggaggtgtgtccaggtacaaggccatgaccccgccttcgctgccgctctcgccgccgccggtgtcgccgtcgtccttcttcaacagcccgatcggcatgaaccaggccgacttcctcggctcgccggtgctcctgacctccagtatcttcccgtcgccgacgacgggcgcattcgcgtcgcagcactttgactggaggccggaggtggcggcggcgcagagcgccgatcaaggcggcaaggacgagcagaggaattcctactccgacttctcgtttcagacggcgcctgcgagcgaggaggccgtgcgaacgacgactttccagccaccggtcccaccggccccactgggggacgaggcatacagaagtcagcagcagcagcagccatggggctaccagcagcagcctgcaggcatggacgcgggtgccaacgcggcgagcttcggtgcggcgccgttccaggcgacctcgtcggagatggcgccacaggtgcagggtggcggcgggtacagccagccgcagtcgcagaggcggtcgtcggacgacggctacaactggcgcaagtacgggcagaagcaggtgaaggggagcgagaacccccgcagctactacaagtgcaccttcccgaactgcccgaccaagaagaaggtggagcggtcgctcgacggccagatcaccgagatcgtgtacaagggcacgcacaaccacgccaagccgcagaacacgcgcaggaactccggctcgtcggcggcgcaggtcctgcagagcggcggcgacatgtcggagcattccttcgggggcatgtccggcacagcggcgacgcccgagaactcgtcggcgtcgttcggtgacgacgagatcagagttggctcccctcgggccgggaacggcggcggcgacgagttcgacgacgacgagccggattccaagagatggaggaaagacggtgacggcgaggggatctccatggctggcaaccggacggtgcgggaaccgagggtggtcgtccaaaccatgagcgacatcgacatcctcgacgacggctaccgctggagaaagtacggccagaaggtggtgaagggcaacccgaacccaaggagctactacaagtgcaccacggccggttgccccgtgcggaagcacgtggagcgcgcgtcccacgacctgcgcgccgtgatcaccacctacgaggggaaacacaaccacgacgtgcccgccgcgcgggggagcgccgcgctctaccgccccgcgccgccggcggcggccgccaccagcagccacccgtacctgccgaaccagccgccgcccatgtcctaccagcccacggggccacagccgtacgcgctgaggcccgacgggttcggcggccagggaccgttcggcggcgtggtcggcgggagcagcttcggcggcttctccgggttcgacgacgccaggggctcgtacatgagccagcaccagcagcagcagaggcagaacgacgcgatgcacgcctcgagagccaaggaagagcccggagacgacatgttcttccagaactcgctctactga

SEQ ID NO: 13063 - DNA, 852 bp, Oryza sativa
  Clone ID: TFbOSC404471j.C1.o19.fg
atggcgtcgccgcggctgaagagggagcagtcgttcgacttcgaggaggcgagcgcgcaggaagccgtgggatccgcgtcggcgtcgtacagccctcccgggggcggcggcgtctttggcatctcgccgccggagtcctcgccgcgcgacggccggaagagaaggaaggatagaccatcattggtgaaacatacgttcacacctcattttgatggtcatttgtggaggaagtatggccagaagaacatcaaggactctgctttccctaggttatattacagatgctcttaccgtgaggacagacagtgccttgcctccaagctggtgcagcaggagaacgacgacgacccgccactgtacagggtcacctacacgtacgagcacacctgcaacaccacgcccgtcccgacccccgacgtcgtggccgagcagccgccgccgggcgccgccggcgacgcgtacctcctcaggttcggctcctccgctggcggcggcggcggcggcgctcatcagcagcagaccgagcgagaacgacagcagcaaaatacagcgagaagaaggccattcatgatgctgagcttcgattctagtagcagccatcagctgcacgagcagccgcacgcgttccctcccgacggccagctgccggccacggccgcggccgcgtcgccgtcgtcgttcacggcagccgaggcgttggcggcgccgccgctcacgacgacgatgaacgacggaggcgacctgttctcgacgtgggacgcgctcaggtatggtttggactatgaccacgggcaccttggtaaccatgtttatctccctgatgactgtaatggtggtgatgataattactga

SEQ ID NO: 13064 - DNA, 990 bp, Oryza sativa
  Clone ID: TFbOSC419986j.C1.o5.fg
atggaggaggcctactgcatgatgatggtggggagggagagggagctcgtggctgagctgcgtcacctcctcttcccttctccgtctcccactccgaccacccctgcgagccactctactacggcgctcgccggcgacggcgagtgctgcttgccgccagggctgacaacgacgacgacggtgtccggtggaggacggcggcgggggaggaagagagtcaaccgcgacaatgataatgtcaagctgcttctgcaggcagatgatgatcaggaggccgtaatagctgatcatggcgatgcaaatgccaagcctcttcctaatttcaccaaaacaagaaggaggaagcagcaggcgacgacatcaacgatggtaacgacggtgccagatttcgatgggtatcaatggaggaagtatggtcagaagcaaattgaaggtgccttgtaccccaggagctactaccggtgcaccaacagcacaaaccagggctgcctcgccaagaagacggtgcagcgcaatggcggcggcggagcagcagggtacacggtggcctacatctcagagcatacttgcaagtccatcgaaccatccctgcctccagtcatcctcgacaccaccgtccgtactaccaacaaccaccagcagcctgcagctgctgaatcaccggcggcgacatcgtcgtcgtcgtcgaatatggtcatgacgagtagcgagactggtaattggagcggtcagcacggcgcctacgcatgccgacagatgatcgccgccgatgaagagtactgctgctgggacactccggcgacgacgacgaccacctctggctctaatggtggtaacagtacttgtgctgaggatatagaattattgagcaggccgatcaggtcgccgatgcacatcgcggcggaagggaattggatggacgatttgctccttgttactgacggccttatcgttatatccaactccagcatcacccatttcctcacttaa

SEQ ID NO: 13065 - DNA, 825 bp, Oryza sativa
  Clone ID: TFbOSC401580j.C1.o5.fg
atggccgccggagcggacgagcggtgccgcgcgctggtgtccggcctgctgtcgtcgatcgaccggtctataagcatcgcgaggtcgtgctgcacggaggccgccgccgccgggcgcctgacccagcaggccggcgccgcgcctgagtcgccgccgtccgccgacggtagcgccggctcggacctcggcgccgactcccggtgccgcgccaatgcggcggggccgtgcaagaagaggaagacgctgcccaagtggagcaagcaggtgaaggtgaggtccgtgcaggacgtcggccccctcgacgacgggttcagctggaggaagtacgggcagaaggacatcctcggcgccaagtacccaagagcctacttccggtgcacgcaccggcacacgcagggctgccacgccagcaagcaggtgcagcgcgcggacggcgacccgctgctcttcgacgtcgtgtaccacggcgaccacacctgcgcgcatggcgtgcgctccgccgccgccgccatcgacggccaggccgcggcgagcgcggagcaaaagcatcagccgacgccgccgcaggagcagaacgccgtctcggtcgcgttcacctccatggccgtcgtcaacgcatcgacgtcgtcgcccttcgtgtccccggcgatgtcggactgccagattagctacgagctgggcggtggcagcatggccggagtccgcaacgtgcccgacgtggagcttgcctccaagacgaactcctccatgggagacgacatggagttcatgttctcgctggactccgatttcttggacacctacaagtactccagctatttctaa

SEQ ID NO: 13066 - DNA, 783 bp, Oryza sativa
  Clone ID: TFbOSC415412j.C1.o2.fg
atggagggctcgtcgtcggacggcagcaggtacggcggctccgggaggtgcgcgctggtggcggagctggtgcagatgcaaggcatggtgaggcaactggaggcggagatgggcacgcatggaggcggcggcggtgggggtggtgggggcggcgccgatggccgccggagcggacgagccggtgccgcgcgctggaagacgctgcccaagtggagcaagcaggtgaaggtgaggtccgtgcaggacgtcggccccctcgacgacgggttcagctggaggaagtacgggcagaaggacatcctcggcgccaagtacccaagagcctacttccggtgcacgcaccggcacacgcagggctgccacgccagcaagcaggtgcagcgcgcggacggcgacccgctgctcttcgacgtcgtgtaccacggcgaccacacctgcgcgcatggcgtgcgctccgccgccgccgccatcgacggccaggccgcggcgagcgcggagcaaaagcatcagccgacgccgccgcaggagcagaacgccgtctcggtcgcgttcacctccatggccgtcgtcaacgcatcgacgtcgtcgcccttcgtgtccccggcgatgtcggactgccagattagctacgagctgggcggtggcagcatggccggagtccgcaacgtgcccgacgtggagcttgcctccaagacgaactcctccatgggagacgacatggagttcatgttctcgctggactccgatttcttggacacctacaagtactccagctatttctaa

SEQ ID NO: 13067 - DNA, 1047 bp, Oryza sativa
  Clone ID: TFbOSC32142j.C1.o1.fg
cggcgctctgtcggaagcgacgacagcgactgcggcaaggaggatctagggctgtcccttagcctgggagcgtcgtcgtcgtacgacgacgaccagaaggcggtggaagcaaggccgcacgacgtcgacggcgcggcggctgcggccatgatcggcggcgacggcagcaggccggcgccgagggggtacccgctgctggagagcagcaaggtgcagggtggcgcggcgccggccgccggcgagctcgccgcggccggcggcatcacgagccagagcgtcaacccggccaaccgcaaaactagggtttcagttcgagtccggtgccaaggccccaccatgaacgatgggtgccaatggcggaaatacgggcagaaggtcgccaagggcaacccgtgcccgcgagcttactaccggtgcaccgtcgcgccgggctgcccggtgcggaagcaggtgcagagatgcctcgaggacatgtcgatcctggtgacgacgtacgagggcacgcacaaccacccgctccccgtcggcgccaccgccatggcgtccaccacctccgccgcggccaccttcatgcttctctccagcaccacctcctcctcctccgtctccgacgcctccgccgcgccgtcgtcgtcctacctcagcccgtacctgctcaactccgcctcgccgttgctaatgccgggcgccaccggcggcggcggcggcatgcagcatctcaacctgttcgggaattcgccgtcgtcgtcgtctctgctagctccgcaagcgccaggctccagcaagtacccgtggtctccgaaccaccctccgctcgccggcgccggaggtaataagagaccgttctggagcgccggcggcgacggggacaagccggcgccggcggcattggccgagaacgtcggcgcggtgatgtcggacccgaacaagttctcggcggcgatcgccgcggcgatcaacaacttcatggggaaagacggcgagagtagcagcggcaagagtagtagtaagtggggcgtggttgaatcacttccaccccatgagtag

SEQ ID NO: 13068 - DNA, 1914 bp, Oryza sativa
  Clone ID: TFbOSC400663j.C1.o7.fg
atgacatgggataataggattaaggaggagtcttccctcctcattgcccttttaatacgtcttagacacccagacattgacttagatgcctcgggagaagtagcattaggatttaagaccgttccccattttagctgtaccaagagagacaaaggtacacaagattaccagaaagaggccaggagcatgtcatccaagaagaagagagctgccatagatctctccctggaggcagagagaagacggccagaagaacgcggcggcggcagcgatcgcgaagccagcgatggcgccgctgctgcagctgaggaagatggtgatgtcaagcaacgagagggccctaaagaggaaaccggcggcgaggaggagaaggtagttgaagtggttgtggaccaaggagaagacggctccaatgaggagatcaaatataggactcaacaagcagagatgatcgaggaggacaagcaaccagctgcagcagcaaacgtcgacgacgatggcggcgacagcgacggagtcggagctagcgcggaagagaagcacatggtaacagaggccaccggcggcgaaggcgacgacggaggcgatagccgtacccccatggcgcaagatgagctcagcgagatgcaggaggagatggagaggatgaaggaggagaaccggatgctccggcgagtcgtcgacaagacggtgcgcgactactacgagctgcagatgaagctagccgcctaccagcagcaaccggcagcagcagatgagcctaaggagaccgaggtgttcctctccctcggcgcaacggccgccgcctccgccggctgcggcggcggcttcccggaggcgaagagcaaggagcaggccgcgtggcggcggcgctctgtcggaagcgacgacagcgactgcggcaaggaggatctagggctgtcccttagcctgggagcgtcgtcgtcgtacgacgacgaccagaaggcggtggaagcaaggccgcacgacgtcgacggcgcggcggctgcggccatgatcggcggcgacggcagcaggccggcgccgagggggtacgcgctgctggagagcagcaaggtgcagggtggcgcggcgccggccgccggcgagctcgccgcggccggcggcatcacgagccagagcgtcaacccggccaaccgcaaaactagggtttcagttcgagtccggtgccaaggccccaccatgaacgatgggtgccaatggcggaaatacgggcagaaggtcgccaagggcaacccgtgcccgcgagcttactaccggtgcaccgtcgcgccgggctgcccggtgcggaagcaggtgcagagatgcctcgaggacatgtcgatcctggtgacgacgtacgagggcacgcacaaccacccgctccccgtcggcgccaccgccatggcgtccaccacctccgccgcggccaccttcatgcttctctccagcaccacctcctcctcctccgtctccgacgcctccgccgcgccgtcgtcgtcctacctcagcccgtacctgctcaactccgcctcgccgttgctaatgccgggcgccaccggcggcggcggcggcatgcagcatctcaacctgttcgggaattcgccgtcgtcgtcgtctctgctagctccgcaagcgccaggctccagcaagtacccgtggtctccgaaccaccctccgctcgccggcgccggaggtaataagagaccgttctggagcgccggcggcgacggggacaagccggcgccggcggcattggccgagaacgtcggcgcggtgatgtcggacccgaacaagttctcggcggcgatcgccgcggcgatcaacaacttcatggggaaagacggcgagagtagcagcggcaagagtagtagtaagtggggcgtggttgaatcacttccaccccatgagtag

SEQ ID NO: 13069 - DNA, 729 bp, Oryza sativa
  Clone ID: TFbOSC4096j.C1.o1.fg
atgtggatgcaggaagggcatccaacatgtgtcaaccttacgcctataccacatacagatggccatctctggaggaagtatggagagaagaaaatcaagaactcatcgttcccaagacgttggtgtaaaactgtcgcgatctacaggctatactaccgatgctcttaccgggacgacaggaattgcatggcgaccaaggtggtgcagcaggagaacgacgccgacccgccactctacagggtcacctacattcacccgcacacctgcaacccatcgccgccggccccgacgccggcccatgtcttcaccgagccaccgccggccaaagcggaagtacaccacgcggtgttgttcaggttcagctccactgccggcggccacacggccaataatgcagtgcatcgtcagcagtggcagcctgcggcggctacgatggcggcgggggcccaggcgcagctgtcaatgacgatgagcgacgacgagcgggagcagccgccggcggccatccgttctgcgccgccggcacggcggctgtcgatgttccgcgccgtcgttgatggactcaggcagatgcggtcgtcggcgccgccaacaccgtcgtcgtcgatggtggtggacgacggatgggacacgttctcgtcgtttgatttggatacgtgcgaattcagtgtcgatgacgagttgctctgtggtgaccatatgtatttcccggacagtatgcagcaatag

SEQ ID NO: 13070 - DNA, 960 bp, Oryza sativa
  Clone ID: TFbOSC413014j.C1.o3.fg
atggaaggcgttgttgacgggagcggcgcgcagctggtggtggcggagctggtgcgcgtgcaggggctgctccggcagctcgaggcccacctgagcgcgccgtgctccgtcgagctctgccgcggcctcgtcgcgcagatcgtcgcgctcacggacaggtccatcggcatcgccacccggtccttctcctccgcctccggcggcggcgcgcatttcgcggacacggcgccgccgatgccggcgctgacgtcgtgcacgcccagcccgctcagcgacggctccgaccaccagccgttccggaccaccaacgccaagaagaggaagacgacggcgaggtggacgagccaggtgagggtgagcgcggcgggcggcgcggaggggccagccgacgacgggcacagctggaggaagtacgggcagaaggacatcctgggcgccaagcacccgcgcggctactaccgctgcacccaccgcaacacgcagggatgcaccgccaccaagcaggtccagcgcaccgacgacgacgcctccctcttcgacgtcgtctaccacggcgagcacacctgccgcccgggcgccgccagcgccgccgccgccaagaggccgcacgcgcagacgctgctgcagagcctcagcgccagcctcaccgtgaacacggacaccaacacgccgctgacgccggagaaccgcgcgccggcgccgccgctgcagcagcagcagcagcagcagagcgtgtcggcgtcgcccgtggcgtcggactcgtacggcctgggcggcgccgggtacggggactggcgctgctgcgacggcgacctgcaggaggtcgtgtcggcgctcgccaccgtgacgtcggcccccgaccacgccgccatggacgccgccgacttcatgagctactgcttcgacttcgacccggcggtgtacggcggcatcgtcggcacgccgagcttcttcctatga

SEQ ID NO: 13071 - DNA, 1086 bp, Oryza sativa
  Clone ID: TFbOSC400271j.C1.o13.fg
atggagagcatggagggcaatggaggagggcggctggtggtgacggagctgagccacatcaaggagctcgtgaggcagctggagggacacctgggtggctccggctcccccgacctctgcaagcacctggcctcgcagatcttctccgtcaccgagcgctccatcggcatgatcaggtccggccacttcgacggccaccgcaagcgctccgccgccgctgtcgccgccggtgacctcgactcggcgactcccagccccctcagcgacgtctccgacttgcctttcaaggccaccaagaagaggaagacgtcgacggagaagaagaggcatcagattagggtgagctcgacgggaggggtggagaatccaccggtagatgatggccatagctggagaaagtatgggcagaaagagattcttggagccaagcacccaaggggttactaccgttgcacccaccgccactcgcagggatgcatggcgacgaagcaggtgcagcgcaccgacgaggacgcgacggtgttcgacgtgatctaccacggcgagcacacgtgcgtccacaaggcggtggccgccggcgccggcaagccggagacggagacggacacgaacgccgccgccgagagccgcctccacgacctgagctccggcctgacggtgaagatcgaggggctgacggcgccgccgcagcaacagcagggcggcggcggctggaacgccatgccgccgttctgcctgtcgtcgccggtgagcggcctggcgccgccggatcagcacaacccgttctccgcgccgtcgacgccggagaaccgcctcgccgccgccgcgtcgtcggcggcctcgccggcgacctccgactcgatggccgccgcgccgttccaccaggcggcggccggcggcggcgatgaggcgtggcgggacgccgagctccaggaggtggtgtccgcgctcgtcgccgcgacgacgacgacggcgaccgcgcagccggcgcccgccaccgccatggtcgacgccgacctctccgccctcgacgccttcgagttcgaccccggattcaccattgatatcaccagcttcttcgcatga

SEQ ID NO: 13072 - DNA, 678 bp, Oryza sativa
  Clone ID: TFbOSC900348j.C1.o27.fg
atggagagcatggagggcaatggaggagggcggctggtggtgacggagctgagccacatcaaggagctcgtgaggcagctggagggacacctgggtggctccggctcccccgacctctgcaagcacctggcctcgcagatcttctccgtcaccgagcgctccatcggcatgatcaggtccggccacttcgacggccaccgcaagcgctccgccgccgctgtcgccgccggtgacctcgactcggcgactcccagccccctcagcgacgtctccgacttgcctttcaaggccaccaagaagaggaagacgtcgacggagaagaagaggcatcagattagggtgagctcgacgggaggggtggagaatccaccggtagatgatggccatagctggagaaagtatgggcagaaagagattcttggagccaagcacccaaggggttactaccgttgcacccaccgccactcgcagggatgcatggcgacgaagcaggtgcagcgcaccgacgaggacgcgacggtgttcgacgtgatctaccacggcgagcacacgtgcgtccacaaggcggtggccgccggcgccggcaagccggagacggagacggacacgaacgccgccgccgaaagccgcctccacgacctgagctccggcctgacggaaaaatggactagatcttga

SEQ ID NO: 13073 - DNA, 666 bp, Oryza sativa
  Clone ID: TFbOSC17493j.C1.o2.fg
atggcggcagtcggcgcgcacgcagcggtctaccaccacccggtctcgggcctctcggcgccggcgggcgacgccgcctactcgatgtcatcgtacttctcccacgggggaagctcgacctccagctccgcgtccagcttctccgccgccctcgccgccgcaacgacgccgccgcttcccgacccgtcggggtcgcagttcgacatctccgagttcttcttcgacgacgcgcctccggccgccgtgttcaatggcgcgcccaccgccgcgctgccggatggcgccgccgcaaacgcaacaaggagcgcggcggaggcggtgccggcgccggcgccggcggccgtggagaggccgcggacggagcggatcgcgttccggacgaagtcagagatcgagattcttgacgacggctacaagtggcgcaagtacggcaagaagtccgtcaagaacagccccaacccaaggaactactaccggtgctcgacggaagggtgcaacgtgaagaagagggtggagcgggacaaggacgacccgagctacgtggtgacgacgtacgaggggacgcacaaccacgtgagccccagcacggtgtactacgccagccaggacgccgcctccggccgcttcttcgtcgccggcacgcagccgccaggttctctcaattaa

SEQ ID NO: 13074 - DNA, 1781 bp, Oryza sativa
  Clone ID: TFbOSC401478j.C1.o35.np
atggagctcaggccgccgccgcccaagcaccaccaccaccgccgccgtcgcggcggcggcggcgaagacggcggggaggaggaggaggaggagactggccgcctgtcgctgcgcggcggcggcttctggcggcgccacgacggggaggaggaggaggagaagggcggcgggaggaggggcgagatcaaggaggtggacttcttcttgggcgccagcggccgcgatgtcgtcgtggcctcccggcggcacgacgacggcttccgcgggacgacgcatggcggcggcggtggcggcgacgtcaacatcgggctagacttgctgaccaccaccaccgccggcgcggcggcgggtggtgcggcggccggcgccggcgaggaggacacggggaagaatcatagaaaggaggcgacgacggcggcggtggatgtggagctccggcgagtggtggaggagaaccggcggctgcggggatgctggacgagctcaaccggagctacagcgcgttgtaccatcagtatctgcaggtcacgcagcagcaaaaccatcgccatcctgatcatcacctgattatgaacaacaacaacaaccggccttcactagctcaaacacaccggaccgcggcgacgacgacggcgacgacgcagcaattcctggagccgcgagcgtcgtccacggcgcaggccaccgccgacgcggacatggcagcgtccgacgacgaggccggccgcggcggcggcgacggcgacgcgtcgtccccttcgctgagcaacgccgccggcggcggcggcggcggcaacaagatgaggagggttggtggtcaagacgagactgcggcggcggcgccggcgagggagaacggcgagcagcaggcggcggcggcggccgagctgccgtgccggaaaccgagggtgtccattagtgatgggtgccaatggaggaagtacgggcagaaaatggcaaaggggaatccatgcccgcgagcgtactaccgatgcacaatggctatcggatgcccagtcaggaagcaggtgcaacggtgcgccgaggacaagaccgtgctgatcaccacctacgagggcaaccacaaccaccagctgccgccggcggccaccaccatggccaacaccacctccgccgccgcggccatgctcctctccggcccggctgccagccgcgacggcgccgccgccgccctgctcggccaccaccaccaccaccacccggcggcgatgttccaccagtccttcccctacgcctccaccatggccacgctctccgcctccgcgccgttccccaccatcaccctcgacctcacgcagacgcctgccggaggcgccggcgccgccagcctgctgcacgcgctccaccgcccgccggtcatccaccctggtgcggctgcccaggcgatgccgttcgccgtgccgccgcagctggcgatgtacctcccgcagcagagggcggcggccgcggggctgggcggcgccggcgccgccaggcagccgtcggtgatggagacggtgaccgccgcgctcgccgccgacccaaacttcacgacggcgttggcggccgccatctcgtccgtcgtggcgggaggggctcatcatcaggctctgtccaccacaccccgtggcagcgccgccggcgccggagacggcaacggaaacgggagctccgccgcggccgtcgccaccggcgccgcctcgccggcggcgacggccgaggcacctgcggcgtccggatcacctcctcggctcgcgacgcagtcctgcaccacgtcgaat

SEQ ID NO: 13075 - DNA, 1623 bp, Oryza sativa
  Clone ID: TFbOSC418607j.C1.o7.fg
atgtccgcgcgccccccgccgccgccgcgcccgaggctcgcgctgccgccgcgctcggccgccgagtcgctcttcacgggcgccggcgacgccagtccgggccccctcaccctcgcctccgcgctcttcccctccgaccccgacggcggcggcggcggcggcggcgtcatgacgtcgtcctcctcctccgccgcgggggccacgagcttcacgcagctgctcatcggcaacctctccgcgcctcctcctcctcctcctcctccgcagcagcagcagcagcgtgaggcggcgcgaggaggcggggtcgcgagggccgggccggcgctgtcggtggcgccgccgccgacggcggggtcggtgttcaccgtgccgcccgggctcagcccctccggccttctcgactcccccgggttgctcttctcgccggccatgtttgatgcttttgatgtccttgatatgttcatacctgataagatccttccaaaacgcgctactcggattaagttggacatctactttgtaaagacaagtcctgaagggggttttgggatgtcgcatcgggaggctcttgcccaagtcacagcccaagcaagccattctccactcagaatgttcgatcacactgaacaaccatcattctcagcagctccaacatcatctgaagctatgcagcatatgaatgcagcagttaatatgacaggaatttcagacatggtcatgggtccaacaaacaatgagaatgtagcctttcaacctgctgaggcgtctcagaggtatcaagtcaatgcccctgttgataagcctgccgatgatggctataattggcggaagtatggtcagaaggtggtgaaaggcagtgattgcccaagaagctattacaaatgtactcaccccaattgtccggtcaagaaaaaggtagagcatgcagaagatggtcagatatctgagatcatatacaaaggcaaacacaatcaccaacgtccaccaaacaagcgggcaaaagatggcagctcttcagcagctgatcaaaacgagcaatctaatgataccgtgtctggtctgtcaggtattaagagagatcaggaagctatatatggaatgtctgagcaactatctggtttaagtgaaggagatgatatggatgatggtgaatcaaggccacatgaagcagatgacaaagagagcgacagcaagaaaaggaatatacaaatttcttcacagaggacttcagcggaagctaagattattgtgcaaacaaccagtgaggttgatcttttggatgatggttatagatggcgcaagtatgggcagaaggtggttaaaggaaaccctcatccaaggagttactacaagtgcacctatgctggatgtaatgttaggaaacacattgagagggcttcgtcagaccctaaggctgtcataacaacttatgaaggaaaacataaccatgaaccaccggttggtaggggaaacaaccagaatgcgggaaatgcggccccttcaagcagtgcacaacagaatatgcagaatttgtctagtaatcaagcttcacttacaatggcagacttcaacaacattaaccagaggccaattggggtcttacagttcaaaagcgaagaataa

SEQ ID NO: 13076 - DNA, 180 bp, Oryza sativa
  Clone ID: TFbOSC29687j.C1.o31.gm
atggaggggagctattaccggtgcacgcaggacaactgccgggtgaagaagcgggtggagcggctggcggaggacccccgcatggtgatcaccacctacgagggccgccacgtccactccccctcccgcgacgacgacgacgccgcccgcgcctccgccgagatgaccttcatctggtag

SEQ ID NO: 13077 - DNA, 987 bp, Oryza sativa
  Clone ID: TFbOSC458j.C1.o1.fg
atggcgctcactatggttagtctcgccgccatcgccgggaagcccaccgcggcgtcggctcagctcgtcgccgaggggagggagtcggcggcccgcctgtatgccctgctggtcggctcgtcggcgctccacggccctgtgggcctcgccgagcagatcctcctctgcttcgaccgcgcgctcgccaagctgcacggcgtcaacctcgccggagctgaggacgacgacgacgctgccggcaacggcaacggcaggaagcgcaagccggggcgtggtcgtggcttgactgccgcttcagctgcagcgagctccaaaaggatgagggtgagcaatgctggaggaaatggagcaaggattgagaggaaagcgacaatggatgacaaatttctgtggaggaagtacgggcagaaggagatcaagaacagcaagcacccgaggttttactaccggtgcagctacaaggacgaccatggctgcacggcgacgaagcaagtccagcagtcggagacggcggacgacgacactgcctcgcccgtctacatcatcacctacttcggcgagcacacctgccgccatggggacgacgccgccgccatggtcgtcgacggcggcgaggaggaggatcagctctcgccggcgcagatggtcatcagcttcgcttccagcaacggcggcgatgcttctgtgtcctggccgtgctccggcgacgacgcccagaacaacagcgagacatcgcatgaatcgagcccgccggaggcgccggccggcgaggaagaacgtctgcggccgtgcacagccgccggcgtgtctgacgaaccgatcatggagtcaacgccgccggcgccggagcttcttgcggatctgaagcccatggatgggtgcctccttgacggcgagagcttgtttggcatggatgaactcgtctactttcatgagctctcagctgctctcggcctactcgatcgagactggggtgcgccagtatag

SEQ ID NO: 13078 - DNA, 1128 bp, Oryza sativa
  Clone ID: TFbOSC404471j.C1.o17.fg
atggcatttggtcaagataccatagagcagctgtaccgggagctcgccggcggccgccgcctcagcgccaagctccaggcgctgctcgaaggccccctcgatagccgcggccagaaggaggccgtcgatgttagcagagagctcgggcgagtgttcatggtgtctctctacatgctgaagccttgcagcaacagcagcagacgaccggaaggagtgaccaggacggcgccggagacgaggactgacgatagcatttgcttgcacactccggcgagggttaaacgcgttaggagtgaagaggttcttgtcagaaatggcagagaagaggtggttacgaggacggagattattacaccttccccgtacaaggatggctaccagtggagaaaatacgggcaaaagaacattcaggacagcaattatctaaggttgtacttcaagtgcacgttcagccgcgagcggagttgcgcggcgaagaagcaagtgcagcagcgggacgccggcgagccgcccatgttccttgtcacctacctcaacgagcacacgtgccagcagccgcaagctgttcccggcacgcccaacactgcaggtagctcgccgacgacgacgagccggcaacgacagtcgtcctcctccccgccggcggaaatgttggacctgacgatgaacggcgccggcctctttagccgtcttcttttaccccacgccgtcggcggcggcggcagcgccgccgaagaggaggccgccatcgtcacgtgcctcgcggcggtcatcagcggaggaggcgccgcagccgctccgccgccgttgatctggccgacatcggccccagaggcggcgttcgtggcgtccgcggcgggacactcgccgagcgccgcggacgagagcgtggcggacgaggcggcggcggcgcagatggccgacatggactactgtttcggccagtacgatcagtcaacgttcggggcggcagcagcagcggatcaccgtgtgttgatcggtgacgacggcgacgtgcagcgcatcgtcgcggcgcggatcgcggacacggtgtggccgcggtacacgcgcgacacgagtgcatgggagactgctgggacgtcgtcgatgagaggatcgatcgattga

SEQ ID NO: 13079 - DNA, 660 bp, Oryza sativa
  Clone ID: TFbOSC400426j.C1.o42.fg
atggcggcttcgctgggactctgccacgagacgtcgtacgcctactcgtacccggcgtcgaacacctcctcctccttgtgcttccctcctctcatggcggaccacatcgtcgacggcggcggcggcggcggctgttcctttggtgaattcctggagctcggccattccgtgtactcgctgccgcttccgccgccgccgtcgcagccggtggtggtcgccggcgggaacaatgatcagtatggcgtgtcgtcgtcgtcgtcggcggcggcgacgacgagcaggatcgggttcaggacgaggtcggaggtggaggtgctggacgacgggttcaagtggcgaaagtacgggaagaaggcggtgaagagcagcccgaacccgcggaactactaccggtgctcggcggcggggtgcggcgtcaagaagcgggtggagcgcgacggcgacgacccgcgctacgtcgtcaccacctacgacggcgtccacaaccacgcgacccccggctgcgtcggcggcggcggccacctcccgtaccctacttccgctgcgccgccgtggagcgttccggcggcggcggcctcgccgcctcccgcgcacgcgcaggcgtggggggcgccgctgcacgccgccgcggcggcgcactcgtcggaatcgtcgttctga

SEQ ID NO: 13080 - DNA, 1235 bp, Oryza sativa
  Clone ID: TFbOSC9240j.C1.o1.fg
atgaccgccgcgccggggagcctcccgctggtgaactcgaggcccgtctccctctccttggcggcgagcaggtcgtccttctccagcctgctcagtggcggcgccggctcgtcgttgaacctcatgacgccgccgtcttctctcccgccgtcgtcgccgtcgtcctacttcggcggcgtctcgtcctccgggtttctcgactcgccgatcctcctcacgcccagtttattcccatcgccgacgacgacgggcgcattgttcagctggattacgacggcgacggcgacggcggcgatagcgccggagagccaggtgcaaggaggggtcaaggacgagcagcaacagtactcggacttcacgttcctgccgacggcgtccacggcgccggcgacgacgatggccggagccaccgcgacgacgtccaactccttcatgcaggactccatgctaatggctccattgggaggggacccgtacaatggcgagcagcagcagccatggagctaccaagaaccgaccatggacgctgacactaggccagcggaattcacctcgtcggcggcggcgggtgacgtggccgggaacggcagctacagccaggtggcggcgccggcggcggccggcggcttccgtcagcagagccggcggtcgtcggacgacggctacaactggcgcaagtacgggcagaagcagatgaaggggagcgagaacccgcgcagctactacaagtgcaccttccctggctgcccgaccaagaagaaggtggagcagtcgccggacggccaggtcaccgagatcgtctacaagggcgcgcacagccaccccaagccgccgcagaacggccgcggccgcggcggctccggctacgcgctgcatggcggcgccgccagcgacgcatactcctccgccgacgcgctctccggcacgccggtggcgacgcccgagaactcgtcggcgtcgttcggggacgacgaggcggtcaacggcgtcagctcgtcgctgcgggtcgcctctagcgtcggcggcggcgaggatctcgacgacgacgagcctgattccaagaggtggaggagagacggcggcgacggcgagggcgtctcgctggtggccggcaaccggacggtgcgtgagccgagggtggttgtgcagacgatgagcgacatcgacatcctcgacgacggctaccggtggcgcaagtacgggcagaaggtggtcaagggcaacccaaacccaag

SEQ ID NO: 13081 - DNA, 663 bp, Oryza sativa
  Clone ID: TFbOSC9240j.C1.o1.gp
ggccgttctgcggcggcttggggtggctgtgcgcgcccttgtagacgatctcggtgacctggccgtccggcgactgctccaccttcttcttggtcgggcagccagggaaggtgcacttgtagtagctgcgcgggttctcgctccccttcatctgcttctgcccgtacttgcgccagttgtagccgtcgtccgacgaccgccggctctgctgacggaagccgccggccgccgccggcgccgccacctggctgtagctgccgttcccggccacgtcacccgccgccgccgacgaggtgaattccgctggcctagtgtcagcgtccatggtcggttcttggtagctccatggctgctgctgctcgccattgtacgggtcccctccctacaatattgcaaacacaacaatatcaatgatacatgcatcttttttttggagtgcatcacatgcagggtaattattttttccaagggagttttgactaattgatctagtttagaactgtagcaagcttgactaatggtatgtgcttaggttttcatggagaacgtgaaaatgaagtttgcttttgcaaatctagcctgagtgtcccttatcattaaaaaaacatgttgattaagatatcttggccgcgagatattaatgcatttcatcatatatgtatg

SEQ ID NO: 13082 - DNA, 1554 bp, Oryza sativa
  Clone ID: TFbOSC400397j.C1.o35.np
atgcatgagttatttcatgatttggcgtgctccgtctcaaaggatgaatgcttcagttcaggggaagcattttgcagccttccagaaaatatttgccacctttcagttgttcttccagattccaagtcagttgtgctgactaaagtacaaagacatctgcagtccctgatggttgtcaagagatctgcatcagagtacccaggttcatttgtgccacttttgaaaatactgggtctgaatgatcttctcatgaaatgtagatttttaagagcgttgaatttgagctgtacaacaatacgagagctccccagttctattatgaagatgaaacacttgcaattcttggctctgaacaatacaaagatccaaagtctcccagctgaaataggtcagttacaaacccttcagacattagaactcaagtattgttgctgtctcattgagttaccggaaagcacaatgaatttgacaaagctgcggcaccttgatgtccaaaaggaaccaggaaatgttcatgttagcatgcctcatgggatcgggcaactaactgatctgcaaacattaacagtatttaatacgggggatgatttatcacattgttcaattggggacctgaagaatctcagtggactaaggggacatgttcatataacaggtcttcagaatattactgcaagtgatgatgccaaagaagcaaatctagtaggtaagcaattcctaggagctttgacactggaatggtgttggagcagtcaggacatggaagatgacagtgacaaagaaattgctaatcaggtccttcataatcttcagccaaacactaacctgcaggagctctccattcgaaattattctgggaatttattccccaactggattcaggattcttcactttccatgcttgtctcgattactatcgatgactgccaagactgtaatgagatcccacatcttggtgacctgccttttcttaaatatctcctcatacataaaatggacaaatacacagtaaaatatctccttaagaagactacgacagatgatggctggaattggagaaagtatagtgaaaaggatttacttggctccaagtacaaaagatcatggtacagatgcaaccagaagcagtccacggggtgcgtggcaaggaagattgttgagcctaacaacgatgatcccaacacatggttggtaacatacttatacgagcacaaccataaacaagaagctaggccctgcgacaagccatcaccttctgatttgcacgttcagctggcaagtggcaacacccagtggtgtgtgcttagaggcttctacggtggagtgaggcagatgacggtggggagcaacacacagctgcatgagcgtgactacaccggcaacgcaaatcacagtggcatcatcgcaagacagacatggatcgagatgctccggcgcggctgcacggccggccattctcaacgtagagctgtcacctattggatatactgtgacgatagctctagtatcaaggacaagttggagattgtagatgtcgatgttttatatcagcaa

SEQ ID NO: 13083 - DNA, 1077 bp, Oryza sativa
  Clone ID: TFbOSC404464j.C1.o3.fg
atgcaggcgcaatcccgcctcgctgctgccgcgagcggcggcagcggcagtggaattagcgggagcggtggcattagcaggttgggtggtggagcgggggaggagcacgaggcggtggtgagggagctgacgcgcgggcacgagctgacggcgcggctgcgggcggaggcgctgcgggcgctgcgcgggcaggggcaggccgaggccaccgctacattcatcctcggggaggtctcccgcgccttcaccgtctgcctctccatcatggccagcgcctccccgtccgcctcgccgccacaaccggacgagacgccgccggccgactcagccgtctcgccaccaccaccgcgcgcggcgagagaggacaacgtcccgcgaaagagattattgacagcctctccttacgacgatgggtaccagtggaggaagtacggtcaaaagaagatcaacaacaccaacttcccaaggagctactacaggtgcagttaccaccgggagcgcagatgccccgcgcagaagcacgtgcagcagcgcgacggcgacgacgtcccggcgctgcacgtcgtcgtctacacccacgagcacacgtgcctgcagggggcgcccgccgagcttcccgacgcggcgacgaacggtggcgccgccgccgccgcgtcgccggactacttccccgccggcggcgagacgccgtcgtcgctgcggcggctccggggcgtcggcggcggcggcctgcagcctcagttcgtggaccaccgcgccgccatggaggagcgcgagcgccaggtgctcgtctcgtccctcgcccgcgtgctgcaggggcggcagtgctacgacgacgacgacgacgacgacaccgacgtcgcctccctcggcgccgtgcacgcgcgcgcgcctgcggcggcggcgccggtcgccgcgtcgtcgtcgtcgtccgggcccgtcgacgctgccggcgaggagctggacgtcatggactacgacatgacggacgcgctgttctgggggcctttcggcacggacagcaactcgtacgacggaaacctgacgtcgacacgctgttttgatctaattaattaa

SEQ ID NO: 13084 - DNA, 732 bp, Oryza sativa
  Clone ID: TFbOSC135j.C1.o3.gm
ggcgaattcgagctcggtacccggggatcctctagagtcgacctgcaggcatgcaagcttccccagctgccgcagctggtccacgaccacgccgccgccaccgggacgaaccatggcgtgatgttctcgtcggaccatggctgcctgtacccgctgctcccggggatcccgttctgcctcgactccggctgcggcgccgccgcctgcgacgacgacaagcccgccggtttcgcgcacttgggctccgccgaggcggacacatcggcggcggcggcgagagtggatagcgagattgctgcagctgccaccgcaaccacttgccatgggcctaattcatggtggaaggggacggagaaggggaagatgaaggtgaggaggaagatgagggagccgaggttctgcttccagaccaggagcgatgtggatgtgctggacgacggctacaagtggaggaagtatggccagaaggttgtcaagaacagcctccacccaagattgcaatatttttcttcagagatacttagtacccgtaagaaggggaagcccctgagctactacaggtgcacccacaacaactgccgcgtgaagaagcgggtggagcggctgtcggaggattgccgcatggtgatcaccacctacgagggccgccacacccacaccccctgcagcgacgacgccaccaccggcgccgccggcgaccacaccgccagctgcgccttcacctccttctga

SEQ ID NO: 13085 - DNA, 741 bp, Oryza sativa
  Clone ID: TFbOSC400036j.C1.o6.fg
atgtcgtcgctgtacccgtctctcctctcgctgagcgagagccccgccgagtaccggcaggtcggcggtggccgctacgcgggggaggacgtcgtcgacgacgacgacgacatggctgccgtcgccgacgctgtgtccagctacctctccttcgacatggacgacgtcgagtattacacgccggaggtgggcttccactcaaagcagcacaacccgccgccagttgctgcggcgccactggaagccggaggaggcagggagcaaagccggcgggaagccgccgtcaatcttggcaagatggacaggggaccggcgccggtgagcggcggcgcggcgactggcggcgtgccgaggagcaagaacggcagcaagatcgcgttcaagacgaggtcggaggtggacgtgctggacgacggctaccggtggaggaagtacggcaagaagatggtcaagaacagccccaacccaaggaactactaccggtgctcgagcgaggggtgccgcgtgaagaagcgggtggagcgcgcccgggacgacgcgcgcttcgtcgtcaccacctacgacggcgtccacaaccacccggcgccgctgcacctcaggccgcagctgccgccgcccggcggctactcgatcgccggggcaccggccgtggtggcgccgcacggccgcctcgggctggaggaggccgaggtgatcgctctcttcaggggcaccaccgccacctcgctgctgcttccttga

SEQ ID NO: 13086 - DNA, 1752 bp, Oryza sativa
  Clone ID: TFbOSC401655j.C1.o1.fg
atggaggccgacgacagcggcggtggcggcggcagggcacgcaggtccgtcgaggtggacttcttctccgacgagaagaagaacatgaagaagagccgtgtctcgggcggcgtcgccgccgaggcggacgacgccaagggacccgccgccgccggcctcgccatcaagaaggaggacctcaccattaacgttagccgccgccgccttcttcgctcgtcgatcgccagacacctgtttaactcacggcgatctaacgcgtgtgctcgtccgtgttcgttgcagcttcttcccgccgggaacaacgcgaggagcgaccggtcgatggtggtcgacgacgacgcggcgtcgcggccggatcacgaggagaagagccggagcagcaacgagctcgcggcgatgcaggcggagctgggccgcatgaacgaggagaaccagcggctccgggggatgctgacccaggtgaccaccagctaccaggcgctgcagatgcatctcgtcgcgctcatgcagcaaaggcctcaaatgatgcagcctccgacccagccggagccacctccgcctcaccaggatggcaaggccgagggcgcggtcgtgccgaggcaattcctcgatctgggcccgtcctccggcgccggcggcgaggcggcggaggagccgtccaactcgtcgacggaggccggcagcccgcgtcggtcgtcgtctaccggcaacaaggaccaagaacgtggtgacagcccggacgcgccgtcgacggcggcggcgtggttgccgggacgcgccatggcgccgcagatgggcgccgccggcgcggcgggcaagagccatgatcagcaagcccaggatgccaacatgaggaaggcccgcgtctccgttcgcgcgcgatccgaagcgccaatcatcgccgatgggtgccaatggaggaagtacggtcagaagatggcgaagggaaacccttgtccacgcgcgtactaccgctgcaccatggccaccggctgcccggtgcggaagcaggtgcaacggtgcgcggaggaccggtccatcctgatcaccacgtacgagggcacgcacaaccacccgctgccgccggccgcgatggcgatggcgtccaccacgtcggcggcggcgtcgatgcttctgtcggggtccatgccgagcgccgacggcgccgcggggctcatgagctccaacttcctggcgcgcaccgtgctgccgtgctcgtccagcatggccaccatctcggcgtcggccccgttcccgacggtcacgctcgacctcacccacgcgccgccgggcgcgccgaacgccgtgccgctcaacgccgcgcggccgggcgcgccggcgccgcagttccaggtgccgctgccaggcggagggatggcgccggcgttcgccgtgccgccgcaggtgctgtacaaccagtccaagttctccggcctgcagatgtcctccgattcagccgaggccgccgccgccgccgccgccgccgcgcagttcgcgcaaccgaggccgccgatcgggcagctgcctggccctctctccgacaccgtcagcgcggcggcggcggcgatcaccgctgaccccaacttcacggtggcgctcgcggcggcgatcacgtccatcataggcggccagcacgcggcggcagctggcaacagcaacgcgaacaacaccaacaccaacaccacgagcaacaccaacaacacaagcagcaacaacacgacgagcaacaacaccaacagcgagacgcagtaa

SEQ ID NO: 13087 - DNA, 2991 bp, Oryza sativa
  Clone ID: TFbOSC401140j.C1.o23.fg
atgacgaccgcgacgctggatccgccgccgcctcccctcctcatcgccggctccctcctcgacgacgatcgcgacgctggatctgccgcctcctcctctcctcgctggctcccccgggcgcgcggatccaccgtcggctcccctcctcgccggggaggggaggagaggggaggggaggcggcgacgaggaggaaaggcaacagctcctgtcctgacgacgacgatgactgccgcaacgacgaggacgactgccgcaacgacgacgactaccgcgacgatgatgtgggggcgacgacggatggaggaggagacgcggcggctcttctcccgatggcgatgatgactgccacgacgatggcgccgatgcctgtcgaggcagcggtggacggaggaggagagctgtcatcggccggagagggtggccagcggcgggtgaatctactgcctacgaagatattgtccgcctacgaaaatcatctattttcgcaggcccttgcttgcagggaagatgaatggatcatcgagaagcttgcggtcatcgctgctagacgctcatcatttgtctctgaagaatccttgtgctctgttccggctgcggctttggtctctttggccattgcccatttggctttctcccccatgttggtctatggcgttcttgatcgtttatgttccgtttgccatctgggtgagatggagggagacatagcgatggaggagtggaaggattccaaccatcgaggcgcggattacctgatgacgatgccgatgcagaacttcctcgccgacgcgttcccgccaccggagctcttggagggagaaggcgggttcgagaagcacggcctgtcggtggccgttggctcgccgccgccgacgccgccgcctccggaggacgggtgctcgccgctgccactgacgccgcagttcggccagaagttcggctccggcggcggcggcggcggcagcctcgccgacaggagggcgagaggcgggttcagcaacgtcgccaggatcagcgtgccgtacaaccagccggcggcggacgtgtcgtcggcgggggcgccgtcgccgtacgtgacgatcccgcccggcctgagcccgacgactctgctggaatcgccggtcttctccaatgccatgggccaggcctcgccgaccactgggaagctgcacatgcttggtggtgccaacgacagcaatccaatcagatttgaatcccctcggatcgaagaaggatctggtgcattttctttcaagcctctgaatctcgcatcctcacactacgcagctgaagaaaagacgaaatctctacccaacaaccagcatcagtcgctaccgatttctgtcaagactgaagctactagcattcaaaccgcacaagatgaagcagcagccaaccaactgatgcagccgcagttcaacggcggcaagcggagccgcgctgcacctgacaacggcggcgacggcgagggccagccggcggagggcgacgcgaaggctgactcctcctccggcgcggccgcggtcgccgtcgtcgccgccgccgcggcggcggtggcggaggacgggtacagctggaggaagtacgggcagaagcaggtgaagcacagcgagtacccgaggagctactacaagtgcacgcacgccagctgcgcggtgaagaagaaggtggagcgctcgcacgagggccacgtcacggagatcatctacaagggcacccacaaccaccccaagccggcggcgagccgccgcccccccgtccatcctccgccgccgtcgccggcgacgacgacgacgacgccgctgccgccaggcgacgcgcaggccgaccacgcgcccgacggcggcggcggcagtaccccagttggcgccggacaggcgggcgcggagtggcacaacggcggcgtggttggcggcgaggggctggtggacgcgacgtcgtctccctccgtccccggcgagctctgcgagtcgacggcgtcgatgcaggtccatgaaggcgcggcggcggcgcagctgggggaatcccccgagggcgtcgacgtcacgtctgcggtgtccgacgaggtggacagggatgacaaggcgacgcacgtgttgcccctggccgccgccgccgccgacggcgagagcgacgagctggagcgaaagagaaggaagctggactcctgcgccaccatggacatgagcacggcgtcgagggcggtgcgcgagccgcgggtggtgatccagacgacgagcgaggtggacatcctcgacgacggctaccgctggcgcaagtacgggcagaaggtcgtcaaggggaaccccaacccaaggagctactacaagtgcacgcacccggggtgcctggtgcggaagcacgtggagcgcgcgtcgcacgacctcaagtcggtgatcaccacgtacgaggggaagcacaaccacgaggtccccgcggcgaggaacagcggccacccggcgggctcggcttcgcccggcggcggcgcggggtcgtcgtcgcagccccacggcgtcggcgtcggcgggcgcaggccggaggtgccgtcggtgcaggagagcctgatgaggctcggcggcggctgcggcgcggcgccgttcccgccccacttcggcctgcacctgccgccgccgccgccgagggacccgctcgcgccgatgagcaacttcccctactcgctcggccacgcgccgtcgccggcgctgcggggcctgccgccgcccccgcccccgccgccgtcggcgtcggcgctggcggtggcggggctcggcggcgtggtggaggggctcaagtacccgatgctggcgccgccgtcggtgcactcgctgctgaggcaccgccagggcggcggcatggaggcggtggtggtccccaaggcggaggtgaagcaggaggcgatgcggcccgccgccgccgtcgccggcgcggggcgcggcgcggcggtgtatcagcaggcgatgagcagggtgtcgctggggaatcaactgtag

SEQ ID NO: 13088 - DNA, 1014 bp, Oryza sativa
  Clone ID: TFbOSC101929j.C1.o1.fg
atgtctggacctggaggaggaggtcatggcctctacgaggatcatcctgcagccgccggcttcctccccttcgaccacgacgacgacgtggtggccagcttcttctttggcagatcggcggcgtccggaggaggagccggcgccggcgccggcgctggagacgatgatggtgttgggctcatcacgccctactccagcatcacggattatctgcaaggcttcctgcaggaccccgtgtacgcgtcgtccccgttgggcggcgatgctgccgtgaagcacgaaacggtggtggatcatcccagtcaggccggcggcgtggcggcggcgccggccacgccgaactcgtcggtgctgtcgtcgtccagcgaggcggctggaggggacgatctgcgccggtgcaagaaaggtcgtcggccggaggacgaggaggaggaggagattgacgatgagggatcggccgttcagagttgcaagacgaacaaaatgaagaataaaaaaggggcgaagaaggagcgtgagccacgtgtggcgttcatgaccaagagcgaggtcgaccacctcgaggacggctaccggtggcgcaagtacggccagaaagccgtcaagaacagctcctacccaaggagctactaccggtgcacggcgccgcggtgcggggtgaagaagcgggtggagaggtcggagcaggacccgtccatggtgatcaccacatacgaagggcagcacacgcacccgagccccgtgagctaccacatgcacaggcagcaggggctcatgcatgtgagcgcgcgcggtgtcatgcccggcgccgccggcgcctaccagttcggcgcgccgccgccgccgctccttggcttcgacgaagccctcgccgctcgggtgcgaatgacgatgaaccagcagcagcagcagcagcagttaggcttcgtgccgagcatacacgccgccgccgcccggccgacgatgcctcctcttcatctctacaccgcgcagcaagacctcttccttccgtga

SEQ ID NO: 13089 - DNA, 960 bp, Oryza sativa
  Clone ID: TFbOSC23303j.C1.o9.gm
atggccatggcgggcgccggcgactggccgttcgccgccgacgaagcgtacgccgactcgtcggccatattcgccgagctcggctgggccaacgggctcgccgtcgtcgacgccgtgggggagctactgccgccgctggatccaccgggcgagctggccacgccgccgccgccgccgctggatctgccggagacgccggccgggtcctccgcggacggcgccgcgtcgtcgtgctccaccgacgacgccgacggcgggaagccggccgccgcgtccaccgaggcagcgagcaagtcgctgacgcctgggaagaagagggcgcggcaaccgcggttcgcgttcatgacgaagagcgagatcgatcacctggaggatggctatcgctggagaaagtatggccagaaagccgtcaagaacagtccttttccaaggtgcacgaacagcaagtgcacggtgaagaagcgggtggagcgctcctccgacgacccctccgtcgtcatcaccacctacgagggccaacactcccaccacaccgtcaccttcccccgcgccgccgccaccgccgccggcttctcgcacatccacgccatggccgccctggccgccgcacccttctccgcgcaccaacaactgtacagcaacctgcagccgccgccgccgacgatgccgcttgctgctactactccggcgtcgtcgtcgtcgctgctacagctgcctctgcactgcaaccatgagctgcaggttgttgccagctgcggcggctacccgtcgtcgtcgtcgtcgccgccggcgagtgttcttcccgtcgacaaggggctccttgatgacatggtgcctagggcaatgaggcatgatggccgtgcgccgccgccgatcctgtcgtcgtcgtcgctcgggaaggctgccgtcgtgatcgccaagccgtcgccgacctcgtccgcccctccgtcgtcgccgtag

SEQ ID NO: 13090 - DNA, 954 bp, Oryza sativa
  Clone ID: TFbOSC400495j.C1.o37.gm
atggcgggcgccggcgactggccgttcgccgccgacgaagcgtacgccgactcgtcggccatattcgccgagctcggctgggccaacgggctcgccgtcgtcgacgccgtgggggagctactgccgccgctggatccaccgggcgagctggccacgccgccgccgccgccgctggatctgccggagacgccggccgggtcctccgcggacggcgccgcgtcgtcgtgctccaccgacgacgccgacggcgggaagccggccgccgcgtccaccgaggcagcgagcaagtcgctgacgcctgggaagaagagggcgcggcaaccgcggttcgcgttcatgacgaagagcgagatcgatcacctggaggatggctatcgctggagaaagtatggccagaaagccgtcaagaacagtccttttccaaggtgcacgaacagcaagtgcacggtgaagaagcgggtggagcgctcctccgacgacccctccgtcgtcatcaccacctacgagggccaacactcccaccacaccgtcacctttccccgcgccgccgccaccgccgccggcttttcgcacatccacgccatggccgccctggccgccgcacccttctccgcgcaccaacaactgtacagcaacctgcagccgccgccgccgacgatgccgcttgctgctactactccggcgtcgtcgtcgtcgctgctacagctgcctctgcactgcaaccatgagctgcaggttgttgccagctgcggcggctacccgtcgtcgtcgtcgtcgccgccggcgagtgttcttcccgtcgacaaggggctccttgatgacatggtgcctagggcaatgaggcatgatggccgtgcgccgccgccgatcctgtcgtcgtcgtcgctcgggaaggctgccgtcgtgatcgccaagccgtcgccgacctcgtccgcccctccgtcgtcgccgtag

SEQ ID NO: 13091 - DNA, 1200 bp, Oryza sativa
  unsure (1)..(1200): unsure at all n locations
  Clone ID: TFbOSC101754j.C1.o8.hg
nagcagaggaccgcgcgcggagaggcgggaacggagagggaggaccgcncgacacaaaccggacccacggagcgacagagggcgnagggaaggagcccgccagaggagaggccnncgccagccggacgacaggaggagaggaggcgacagggaggggaccggaccagcaaaggcacaagccngaacgaggaaaagaacccccgaaaggagaagaganagagggggaccagcccaanagcgggggaagcaccgggcgggnagcaacggggaggaaaaccaaggccgccnncgcaagcgaaggggacagcaaaagaagcgcgggacccccaaaagccgaagcaggcgagggggccgcaaagaaaagaagaaaaagaaagggagaagggccggggggcaagcaagaaagacaggaaaacacgcaaaggaaaagacaccaccggcccaagcgaggacaacaacccgncggccaccccgagggcaggcaccgccccgccgccgagaaagcgcaagagcgagagcctcnncgactccccgccgccgccgccgccgccgcacccacacgcggcgccgcaccacatgcacgtcatgcccggcgccgccgccgccggctacgccgaccagaccgagtgcacctccggcgagccctgcaagcgcatccgcgaggagtgcaagcccaagatctccaagctctacgtccacgccgacccatccgacctcagcctggtggtgaaagatgggtaccaatggaggaagtatggtcagaaggtcaccaaggacaacccctgcccaagagcctacttcagatgctcatttgctcccgcctgccctgtcaagaagaaggttcagagaagcgcggaggacaacacgatcctcgtggcgacgtacgagggggagcacaaccacggccagccgccgccgccgctgcagtcggcggcgcagaacagcgacggctccggcaagagcgccgggaagccaccccatgcgccggcggcggcgccgccggcgccggtggtgccgcaccgtcagcacgaaccggtcgtcgtcaacggcgagcagcaggccgcggcggcgtcggagatgatcaggcggaacctggccgagcagatggcgatgacgctgacgcgtgacccaagcttcaaggcggcgctcgtcaccgccctctccggccgcatcctcgagctctcgccgaccaaggattga

SEQ ID NO: 13092 - DNA, 927 bp, Oryza sativa
  Clone ID: TFbOSC13125j.C1.o4.fg
atgaagaacaagggcagcagctgcaggtatcttcctcactcttctgcaccatgcgccaccgacggcgccagatgtttccgctgcgaccaccggccggcgatcgacgagatcgtcagggagcagtcgctggtgacccagctgcgcgccgtcgtgctgccggcgctggagacgaaggccgacgacgggcgggcggagatcgtggcgcagctgttcgggagcatactggattgctccaggaaggtgatctctgctctgaattctcgctacgtcggagaatcacctcctgacgatgatgagatcgtcgacaaaaggagggcgaagaggaagaacagtgagggcaagaagggtgatgatcaggtgaaagtgaagccacatgagcacaagagaagcaggagatacactaactcaacatcacaaatcacagctgttccacattatgacggtcatcaatggagaaaatacggacagaagaatattaacaactcaaaccaccaaaggagctactacagatgcagctacaagcatgaacaaaactgcaaagcaaccaagacagtgcaacaactggacagtgccggcgaaaccatcatgtacaccgtggtctactacggacaacacacctgcaagactaacatgagcaatgctcctctccatgttgttgaaacaagtaccactcaaagcatctcaacaacatgctgctctgatgatcttggcgattatagccaaaagatggagaacatgcacacaccagagttggcagaagtgtgctctgatgagcttggttcttaccatgcaataataggggcagagcacagtgcactagggttggaggatgaacacatgcacaagctgctcgacacatttgcatgtggagcattagatctggacagctgggagattgatgcaattgtgagatctggtttctgctag

SEQ ID NO: 13093 - DNA, 930 bp, Oryza sativa
  Clone ID: TFbOSC400920j.C1.o10.fg
atggccgtggacctgatgggctgctacgccccgcgccgcgcagacgaccagctcgccatccaggaggcggccaccgccggcctccgcagcctggagatgctcgtgtcgtccctctcctcctcctctcaggccgccggggctcacaaggcctcgccgcagcagcagccgttcggcgagatcgccgaccaggccgtctccaagttccgcaaggtcatctccatcctcgaccgcaccggccacgcccgcttccgccgcggcccggtcgagtcgtctgctcccgccgcccccgtcgctgctgctccccctcctcctcctccaccaccggcgccggtcgctgccgccctcgcgccgacttcctcgcagccgcagaccctgacgctggacttcacgaagccgaacctgaccatgtcggccgcgacgtccgtgacatccacgtcgttcttctcgtcggtgacggccggcgagggaagcgtttccaagggccggagcctgctctcctccggcaagccgccgctgtctgggcacaagcggaagccctgcgccggcggccactccgaggccaccgccaacggcggccgctgccactgctccaagagaaggaagaaccgggtgaagaggacgatccgagtgccggcaatcagctcgaagatcgccgacatcccgccggacgaatactcgtggaggaagtacggccagaaacccatcaagggctccccttacccacggggctactacaagtgcagcacagtgagaggatgccccgcgcggaagcacgtggagcgcgccaccgacgacccggcgatgctggtcgtgacctacgagggcgagcaccgccacacgccggggcccctcccggcgccacccgccgccgccgccgtcgccgcgatgccggtgtccgtcgccgtgtccaccggcaacggacatgtctaa

SEQ ID NO: 13094 - DNA, 1266 bp, Oryza sativa
  Clone ID: TFbOSC400542j.C1.o3.fg
atggaggaagcaaacagggaggcagtgcagagctgtcacagggtgctcaccctcctctccagcccccatagccagcttgtccctaacaaggatctcgcggcggctacgggagaggctgttgcaaagttctgctccgtggcatccaggctgaacaatggcaatggcctccagggccatgcccgggttagaaagatcaagaagcccttgcctatctttgatagcaacctctttttggagagccctgcactggctgtggcgatggcagccaagacacctaactcgagtccgatcactagcctccagctgtttccgaggtaccatcagatggagggctcttcttcaaaggatcctgttaggatccctgcccaattccccaaaaggttgcttctagataaccctgcggttgattcggatgggccatcacgggggccaccgctccagctcatccagccggtgtctgttgcgcccccagctggaacgcctcacccggcattgccttcggcgcatcttcatttcatccagcagcatcagagctaccagaggtttcagctcatgcagcagatgaagatgcagagtgagatgataaagaggagtggccttggtgaacagggtggtagcaatggtggtggtaagggtgttaatctcaagtttgacagttctaattgcacggcatcatcctcccgttcattcttgtcgtctctgagtatggaggggagcattgcgagtttggacggtagccgctccagtcgtccattccagctagttagtgggtcacagacgtcaagcactccagagttaggcctcatgcagaggaggaggtgcactggtagggaggatggtagtggacgatgcacaactgggagccgatgtcactgtgcgaagaaaaggaagctgaggataaggaggtctatcaaagtccctgcaatcagtaataaggttgctgacattccagctgatgagttctcatggaggaagtatggacagaagccaataaaaggatccccacatcctaggggttactataagtgtagcagtgtaagaggatgcccagccaggaagcatgttgagagaagtggcctccagggtgaatgtggcaaggctactgacaagcgcagtgacaggcaaccattcgtatccgttctactctgtccaaagtccaaaccgtgcaagtctgaaatggcctgtttccttgtagccactagcccactaggcaagcttgaactaatgccagatactcaaggcccaactgccccaagtactccataa

SEQ ID NO: 13095 - DNA, 2184 bp, Oryza sativa
  Clone ID: TFbOSC400075j.C1.o19.fg
atggcgctggagctgagcctggtgtccgcttcgccccctggtgggctggcggcgagcccgcccccgcccgccgccatcccggggaaggagcagcaggtggccggggtggggatcctgctgcagatctccatgctcgtgctctccttcgtgctcggccacgtcctccgccgccaccggttctactacctccccgaggccagcgcgtctctcctcatcggtctagttgtcggtgggcttgctaatatttcaaatacagagaccaacactagaacccaatcaggattcagtctatccccaaaaccattctttgcaaattttggggctattgtaacttttgccatccttgggacattcattgcttctgttgtaacaggagttctcgtctatcttggtgggttgacatttctaatgtacaaacttccatttgttgagtgcctcatgttcggtgctcttatatctgcaactgatcctgtcactgtgttatcaatattccaggagctgggcactgatgttaacttgtatgctcttgtgtttggagaatctgttctaaatgatgcgatggcgatttcgctttacaggacaatgtcattggtcagaagtcaagcagcagctggggagaacttctttatgatggttttccagttccttgagacctttgttggttcattgtcatcaggttgcatcacagctcagaatattctcaactatttcaaagggacctttggcattgtggtgttggagttggatttatctctgctcttatatccttttcctaagttctacatggaaactctgtttgcaaaacatgaaagactatgcatgcttagtattgaccatgttaaattgcaatatttatgtattactatttaccatttactcattgcttgttttacggtaaattattttatttactacttgatcttgtgcaaccttgaccactctgtgtacctgtttaagtatgctggactggatattgacaagtatatgttagcagaaggacttgggttgtcaggaattgtttccatactattcacaggaatggttatgaagcactatacattttccaatctctcaaacaactctcagcgcttcgtttctgccttctttcacttgctgtcatctttagcagaaacatttgtggcagtaaatgtcttttcttgtgcatatttggttaacatgtcacggccagaacatcgacgcatacctctaaagcatcagaaagcactttggtttagtgggcttagaggggccatggcttttgcacttgctctccaatctgccaatgaacttcctggaggacatggaaaaacaatattcacaaccaccacagctattgttgttttaacggtacttcttatcggaggatcgacgggcaccatgctggaagctttggatgtaattggtgatgaaaacagatcaatagaaaattatgacgacaacaatggttacatccccccaacgtatgaggaaggttcatcatctggaggaggattaagaatgaaactgaaggaattccacaaaagcacgacatcgttcactgcccttgacaggaactatctgactccatttttcaccagtcaaactgatgaggatgatgatgtcttcgaaattggccattatgccactcccaagagtgggtttcgccaaaatgccattctgccgaatggattcgttaaaatgccatgtacaagagataccaaacatttgttttgccatttgcgccaattctctccatttttacctaattttgcatctgggctgaccaaaataccccttcgggctggttcaagaccagtactccgcaacacctcctccggctgtgccgccgccgccgcctgcgcggaccagtactccgccgcgacgcccgataactcctccgtcacgttcggtgacgacgaggccgacaacgagtcgcatagcagcgaaggctacgagcccgaagccaagtgctggaaggaggatgctgacaatgagggtagctccggcggcatgggcggcggcgctggcgggaagccggtgcgcaagccgaggcttgtggtgcacacgctgagcgacatcgacgtcaacatcgacatcctcgacgccggcttccggtggaggaagtacggccagaaggtcgtcaagggcaaccccaacccaaggagctactacaagtgcacgacggtgggttgcccggtgcggtag

SEQ ID NO: 13096 - DNA, 1695 bp, Oryza sativa
  Clone ID: TFbOSC400934j.C1.o26.np
atggggggcgagccgcgcgcgcgcgcggaggcggcctgggcggctgcgttgcctgccgcgttggttgcgctggtgcgcgacacggctacatacacacgaatgatgcaccgtctccgaatggaaacgccacggggccccacctgccagcttgacccctgctgctgctgctgcactgcacatgttattccccctccgcctccggtgtcacgcacgcacgcgacgcgacgcgatgccgaggcgtccgtaccaccaccgccagcatcagcggccgtcagctcgagatcggacggcacgggacagatggcagcaggcgtcacgctggcgtgtgccgcccccccgccgctaagggccccacgtgccagcgatggaggcaggcgccgtggggtggtcaaagggggcgcggggacggacacgtgtcggtcgccgcaacgtctgaatgttcgaccgcgcgagagagagagggtgcgtgcgtgcgtgcgtgctagagccaagaaccacgagcacggccagcgtcggcgagaggcggcggtggatccggctatgtcgggcgagtaccagttccaggacgagctggcgccgctgttcgcgcggccggggggcggcgcgggggagatgcagatgctgccgtcgtcgtggttcgccgactacctgcaggcggggacgccgatgcagatggactacgacctgatgtgccgcgcgctggagctgccggtcggggaggacgtcaagagggaggtcggggtggtggacgtcgtcgcggccggcggcggcggggcgccgccgctgacgccgaacacgacgtcgtcgatgtcgacgtcgtcgagcgagggggttggtggaggaggtggaggcggcgccggcgccggcgccggggaggaggagtcgccggcaaggtgcaagaaggaggaggatgagaacaaagaggaaggcaagggagaagaagatgaaggacacaagaacaagaaagggtcggcggcgaagggagggaaggcggggaagggggagaagcgggcgaggcagccgcggttcgcgttcatgaccaagagcgaggtcgaccacctcgaggacggctaccggtggcgcaagtacggccagaaggccgtcaagaacagcccataccccaggagctactacaggtgcacgacgcagaagtgcccggtgaagaagcgggtggagcggtcgtaccaggacccggcggtggtgatcaccacgtacgagggcaagcacacgcaccccatcccggccacgctccgcggcagcacgcacctgctcgccgcgcacgcgcaggcggccgcggcggcggcggccgcgcaccagctgcaccaccaccacggccaccacggacaccacggcatggcgccgccgttgccgctgggctccggcgccgccgcgcagttcggccggtcgtccggcatcgacgtgctgagcagcttcctgccgcgcgccgccgccgcccaccacggcatgactacgatgggcggcgccgcggcgacgacgacgacgagccatggccttaacagtgcaatcagcggcggaggcggcgtctcgagcgagacgacgagcgcggtcaccgtcgccgcctcggctcagccgtcgtcaccggcggcgctccagatgcagcacttcatggcgcaagacttgggcctcctgcaggacatgctgctgccgtccttcatccacggcaccaaccagcct

SEQ ID NO: 13097 - DNA, 1306 bp, Oryza sativa
  Clone ID: TFbOSC400940j.C1.o1.gm
gggtacgtcgcggttggaccccgaccagggaccgaccagcggcaggacgtcgccgtcccccggctggaccggcctttccgagacaaaaagcagagccaagaaccacgagcacggccagcgtcggcgagaggcggcggtggatccggctatgtcgggcgagtaccagttccaggacgagctggcgccgctgttcgcgcggccggggggcggcgcgggggagatgcagatgctgccgtcgtcgtggttcgccgactacctgcaggcggggacgccgatgcagatggactacgacctgatgtgccgcgcgctggagctgccggtcggggaggacgtcaagagggaggtcggggtggtggacgtcgtcgcggccggcggcggcggggcgccgccgctgacgccgaacacgacgtcgtcgatgtcgacgtcgtcgagcgagggggttggtggaggaggtggaggcggcgccggcgccggcgccggggaggaggagtcgccggcaaggtgcaagaaggaggaggatgagaacaaagaggaaggcaagggagaagaagatgaaggacacaagaacaagaaagggtcggcggcgaagggagggaaggcggggaagggggagaagcgggcgaggcagccgcggttcgcgttcatgaccaagagcgaggtcgaccacctcgaggacggctaccggtggcgcaagtacggccagaaggccgtcaagaacagcccataccccaggagctactacaggtgcacgacgcagaagtgcccggtgaagaagcgggtggagcggtcgtaccaggacccggcggtggtgatcaccacgtacgagggcaagcacacgcaccccatcccggccacgctccgcggcagcacgcacctgctcgccgcgcacgcgcaggcggccgcggcggcggcggccgcgcaccagctgcaccaccaccacggccaccacggacaccacggcatggcgccgccgttgccgctgggctccggcgccgccgcgcagttcggccggtcgtccggcatcgacgtgctgagcagcttcctgccgcgcgccgccgccgcccaccacggcatgactacgatgggcggcgccgcggcgacgacgacgacgagccatggccttaacagtgcaatcagcggcgaagacggcgtctcgagcgagacgacgagcgcggtcaccgtcgccgcctcggctcagccgtcgtcaccggcggcgctccagatgcagcacttcatggcgcaagacttgggcctcctgcaggacatgctgctgccgtccttcatccacggcaccaaccagccttga

SEQ ID NO: 13098 - DNA, 843 bp, Oryza sativa
  Clone ID: TFbOSC464j.C1.o2.fg
atggcgaggcgcctgccaaagtccgagaggtcgccgtcgccgccgccgccgccgcccggcgaccaaagggacgctgccatccaggagctcagcaagggcagcgagctggcgacgcagctcatggcgcagctggagctcatcccggagcgggagctcgacggccgccgcgacgacgcgctggccaacgtgaggagcctctccatgtccctcagctcctcgctctacgccctccggtccgagaggagggagcactactactgcggctcctcctcctcatccggcggcgctgggccagctgctgtcacctccgtctccggcgccggcggcgaaagaaagacgaagcgccggcgaggcaagcatggcgaggagctcatcgagacggtattcattactacgacaccagaaaatgatgggtttcactggaggaaatatggcgagaagaatatcctcaacagtgaatttcgaaagttatactacagatgtggttacagtgatgagcgaaagtgtcaagcaaagaaatatgtgcagcaagaaaacaacaaacatcccccagagttcagggtcaccctcaccaacgagcatacatgcaatacagtgttccaagatcagcccagttcaagcagtactaattcccaagtgctcgacttcacaaaagcatccatttcctcatcattaatggattctcatgtcggcgcgccgatcttgaaggaagaggaagaagaagaagttccctccattgatgagagcacaagaatcatgtccacaattatgcgtaactatggatcctatggcgactatgatgagtcgtctccgcagccatggaatggtgccggctggaagtga

SEQ ID NO: 13099 - DNA, 1872 bp, Oryza sativa
  Clone ID: TFbOSC400127j.C1.o3.fg
atggaggactggatgccaccacccacacccagcccgagaacactcatgtcaagcttcttgaatgaagattttgtctctggttcattttccaatattttcagtgatcatgagagcaacaaaccccaggatcagtttgagagaaacagagagcttgtggatttgagtaaggaagtgccttcccaattcgcaagacccgcattccagagggatgcttccctggatcatagcttggtcagtcctacacagagatcaaactcgcatggtggtttggcagagcgcagggctgcgagggctggtttcagtgtcccgaaaatcgatacatcccgtggtggttcatccacagtaattcgatcgcccgtggcaattccaccaggtcttagtccaacaacacttctcgagtcaccggttttcctttacaacgcaatggcacagccttctccaaccactggcacactgccatttttgatggcttcaaatgctaagtcaacaataccgtcagctaccaagatggacgaagattgcacatttggcaatgacactttctccttccaaccgcatgtagggtcgagacggccaaatttctccgctgcagaaaagggtcccaatgcttgtcaccaaaaccaatcgctgtcgaatatccatcagcgggaatccagtcttcagtcaagctttactgcagtcaaagatatcactgatgaaaaaaacattaaaacaaagacatctgactccatgtttggtgataaccactcttctgatgaacaagatgatgagactaaccaaaatggagaaaactctatgccacctccgaaccaccgttcaggtgtccctctgtcacataccaatgatccagaagtgaatgtcctagagaaccgcggttcacagacatgccataactctgcatccttgtgggacaatgccaaaaatgattgccttcaagatgttcaaagtgaagttattgaaacaagaacagctgcttgtcttccagtatcaaccaattgtgatacatctatcatggagtcccaagatgcagttgatgtgtcgtcaacactatctaatgaggaggatgatagggcaacgcatggcacggcttctatagagtgcaacggggatggagatgagactgattccaagagaaggaagctggatgctttgacagctgcaactgctgctattaccaccaccagtaacattgacatgggagctgcggcatcgagaggtgtccgggagcctcgtgttgttgttcagacaacaagtgaggttgacatccttgatgacggttaccgctggcgcaagtatggacagaaggttgttaaaggaaatccaaacccaaggagctattacaaatgtacgcaccaagggtgttcggtgcgcaagcacgtggagagagcatcgcatgatctaaaatccgtcatcacgacgtacgaggggaagcacaaccatgaagttccagctgccagaaatagtggacatgggagctctggatctggaaacgctccatctgcaccgcaatctaacggctctcagcgcaggcaagaacaagggcaagccagcttcagccagtttggtggcgcggctcccttcagctccttcgttctcccaccaagaaaccaatttggaccatcggcgagcaatttcccctttgggatggtcccgccaggcatggcgattcccatgccatctctagggtctcttgctccagcaaagatggctggtcatccatccaccatgcagggctaccaggggctcatgattccggaaggagagatgaagacagagcccatgtcgcagctcggcttccccgcggtaaaccaatcttcatcatccttccaacagatgatgaacaggcctccatcatttggacctcagatgtaa

SEQ ID NO: 13100 - DNA, 633 bp, Oryza sativa
  Clone ID: TFbOSC401607j.C1.o4.fg
atgtctcctgtgccgagtccgcatcaatcacaccatctaggccatggctcaaggaaagagaagcgcatgaggaaggtggatacctttgcgccgcacaacgacggccaccagtggaggaagtacggcgagaagaagataaacaactgtaatttccccagatactactacagatgcacctataaagataacatgaattgcccagcaacgaagcagattcagcagaaagattatagtgatccaccattgtactcagtcacctactacaatgagcatacatgtaatagtgcttttcttcctcttagcccctcagagttccagctgcagactgcatctgggaaggcagtctccatctgctttgaatcatctggggctcaagaaccaatgaccaatgccagctcaccttcttcaagcgcagcacggcgtagcacaccttcagagaacaagaatcagcctcttccacggcattcggaagcctattcttggggggttggtgttgtagaacaaaagccgtcctgcactgagctccaatcttgcagcaccgaatgtcaggatgcattttcagctggtacgattcctgaagagacagtagatgcaggaagatttggttctatcagattcttccattttttgtaa

SEQ ID NO: 13101 - DNA, 762 bp, Oryza sativa
  Clone ID: TFbOSC400974j.C1.o8.fg
atggcggatccgttcccggcggcggcgcgcggcggcgagcagggtggtggcaccgcggggcagctggtgtcgacgccgtccaggttgaggacggcggtggcgtccatgctcaaccgcaccggccacgcgcgcttccgccgcgccgcccccgtcgtcgtgcaggaggaggaggatgaggcggcggcggcggcgagggatgcggtcgtgcggtgtgacgggctcagcgcgtcggccagctcgtcgttcccgtcgtcggtgacgggggtcaccggcgatgggagcgtgtccaacgcccgcgcggtgctcccggcggcaggcgacggcgacaagccgccaccaatgcagtctgcttcagattatgcttctgatggccgcctcaaacgcagcagcgacgacgacggcgagcgctgccactgctccaagaaaaaacggaaggcgtcgtggagggcgaggcggcgcatccgcgtgccggcgatcagctcacggaacgccgacatcccggcggacgactattcgtggcgcaagtacggccagaagcccatcaaaggctcgccttatccacgcgggtactacaagtgcagcacggtgcgcgggtgcccggcgcggaagcacgtggagcgcgaccccggcgagccggccatgctcatcgtcacctacgacggcgaccaccgccacggggaacccggccatcgacgtcccgatgaggcggcaacgacgacggagcacaggacgactgaccaaactactggaagattgctctag

SEQ ID NO: 13102 - DNA, 1524 bp, Oryza sativa
  Clone ID: TFbOSC400426j.C1.o40.fg
atggacgtcgtcgtcgagagcccgccggtgagggacgagaagaaagtcgacgtcgccgcgattggaggcgcgcctccaatagtctttgagagttttgcaccatcgacgcagagagattcaaccatcatcaagaaggaggagaagatggaggcagcgaaggcggagatgggcgaggtgagggaggagaacgagcggctcaagacgatgctcacacgcatcgtcagcgactacaagtcgctgcacacgcacttcctcgacgtcgtcaaggtcaaggagcaaacggcggcggagctctccggagacgacgacgacgacgagcccgacgacctcgtctccctgagcctctgcacgaggcccaacgccgccgcgacgcgccggaagggccacgagaggacgccgtcgtccggcggcggcggcgacgacgggcggctgtccctcgggctgagctgcgctcgcggcggcgttgcctccgacgacgacgacgacaagcaggcgagccgccgcgcgttgccgccgatgcccgtgctgaacctcagctccgacagcagcggggacgccgccggcgccggcgccggcgagcctacccagccgaacaaagcgtccaggagctcgagcggcggcggcgatggcgccgacgacgaggtgctgcagcagcagcaggccaagaaggctagggtttccgtcagagtcaagtgcgacacccccacgatgaacgatgggtgtcagtggcggaaatacgggcagaaaatctcaaaggggaacccttgcccgcgcgcctattaccgttgcaccgttgcacccaactgccctgtacgcaagcaggtgcagagatgcgcggacgacatgtcgatcctgatcacgacgtacgagggcacgcacagccacccgctgccgccggcggcggcggcgatggcgtccacaacgtcggccgcggcggcgatgctgacgtctggctcgaccaactccacgatgcacggcagcggcggcgttcaccaccacctgccgttcgcctcggccgtcggcggcggcggcggcgtcgggctgctcggcccgaccaccatctccaccgccacgtcctgccccaccgtcacgctcgacctcaccgcgccgcactcgctcctgcacccgtcgtcggcgtcgccctacgccgccgccgccgcggggtacgagtccagcagggcgctgccggcggcgtggagcagcgggtacctggcgtacggcggcgcggcggcggcgcagccatactacgccaagggcgttgcgccgtcgccgttcggccatcatttcggcatgatgggcatggcggcggcggcggcgaggccggcgccggagcagctgttcggcggccagacgacgtcgccgtacctgcagagagccatcggcggcggcggcgtcgcgccggcggccgtgacggacacgatcgcgaaggcgatcacgtcggacccgagcttccagtcggttttggcggcggcgatcacgtcctacatggggcgcggcggcggcgcggcggcgccgaacaagtga

SEQ ID NO: 13103 - DNA, 1035 bp, Oryza sativa
  Clone ID: TFbOSC102216j.C1.o15.fg
atggtgaattttctcaaattatcggatattcagtctacggatgcggaaagcgtggatgttggatttattagctcggttcataagacaacaagaaagaaagggttcactacatgtctgttaggaaggaattccattttgtttggcaagacgactgtggtaataggtgagaaggtggagcactgttgtaggtggagtcaagaagaagaaattacagggatagcaggagttgactcttgttatggtgagcctggtggagtcttatcggggcggctcggcgtgaacggcgaaaagggatcaactcaatttcagatctcctatggtgtttcttccgcgtttggtttccgatgtgatttcgggaccggctttataacacatgggatgggagatcaccacggcatgcctcttcctcctccacttcaactaccgtgccatccgaagctactccagatgccattcgaccaagaagatcagcccggaatccatggcgtgatgctctcttctgaccactgcgggctgtaccctctgccggcgcttccgttaagcaactccgccgccgccgccgccgcaaccgtcgcattggggaagcacagtgcagccgccggttccatgcccaatattggcggcgctgaggaggtggccaccactgtaaccaaagctggcaatgagagtactacttgcaatggctccactacatggtggaggggctcgacgatggcggcggcgggggagaaggggaagatgaagatcaggaggaagatgagggagccgaggttctgcttccagaccagaagcgaagtggatgtgctggatgacgggtacaagtggaggaagtacggacagaaggttgtcaagaacagtctccatcccaggagctacttcaggtgcacgcacagcaactgccgcgtgaagaagcgggtggagcggctgtcgacggactgccgcatggtgatcaccacctacgagggccgccacacgcactccccctgcgacgacaactcctccggcgagcacaccaactgcttcagctccttctga

SEQ ID NO: 13104 - DNA, 1128 bp, Oryza sativa
  Clone ID: TFbOSC31206j.C1.o5.fg
atggtgaccccgttgtcggtgttgctcgctgctgctgctggtggtggtttcgatcgccgtgatcggagcagggttgtcggcggcggcggcggcggccgagagggttgggagatggacgaggtgctggcgcagatcagcgaggggttccggctcgccggcgagctgatgtcggagctcgcggcgacccagaacgacccggactacctggccgcgcgctgccacgccattgccggcgcgtacgccgccgcggcgcgcgtgctgcagggggcgcgccacggcggcggcggcgtgggcgcggcgtcaacgtcgttcggcggcgagggatacctccatcaccagcatcgccagcagaggacctcctccgcattccgaattgcttgccaagtcatggcgcttccgctttgcacacaagttacacgagggtttacacacaactacgagtactctacgaggagggagagcggggagaaggtgacggtgatggtggcggcacagcggacggggaacacggagcagccgccggatgacgggtacacgtggcgcaagtacggccagaaggacatcctcggctccagatatcccaggagctactaccggtgcactcacaagaactactacgggtgcgaggcgaagaagaaggtgcagcggctggacgacgaccccttcacctacgaggtcacctactgcggcaaccacacctgcctcacctccaccacgccgctgctcacactccccgccgccgccgccacttcggtgacaaactctccgaccgccgccgccgtgctcggccaggacttcgtcatggcgcccgccgccgatcagcagccgccccagcaccagcaggcgcagccgccgctgtccacgtccatccacctcggcatcggatggccgatgacgccggccagcctcgccggcgccgtaggcgagggaagcactagcactaccgccaccgcgccgcaggtgacgacaatgggcgccacggcggccggcggcggcggtgcagcagctagggacgcggaccattacccggtggcggacctcgccgacgtcatgttcaactccggcggcagcggcagcagcagcatcatggacggcattttttcttctcacgatcgacgtgataactga

SEQ ID NO: 13105 - DNA, 945 bp, Oryza sativa
  Clone ID: TFbOSC400044j.C1.o100.np
atgggcttcgccaaaacaacaaccgaaacggatatcaaattgtttcttatggggccgtgcggggcatcaaagcaaaacaattcgaaacggggcggctcgcgcacggtcgcgcgcgccgaagcttcatccaacgactcgagccaggaagctcgacggctcttcggcgcgtgtcacgtaagagagtcggccaacccacatgcacgtgtaccgatgtacatggcggcggcggctgcgggagcaagcacacccttcaatttttgccgccacggctcgcacgccgagtacgacgccgtcttcagcggcagctggatggcgcgccgcccctccgcggcgccgcacggtggcggcgcctccggctccggctccggcagcggctacggcgccgcctcgtacgttgctcccaccttcggcgcggcgtttaggcagcagcatctcgacctcctcgactacctgtccgacgatcagggcgttccggcgccaccaccagcggctgtgcccagcgcgtcgtacgtgacgccggcgccggcgatggcccccgctgaaccggtcgtgccggatgctgttgccgccgccggcggctatccgaggagcgtggctgcggcggcggcggccgtggccggcgagggaagagatcggacgacgacggacaagatcgcattccggacgaggtcggacgatgagatactcgacgacgggtataagtggaggaagtacgggaaaaagtccgttaagaacagccctaatccgaggaactactaccggtgctcgacggaggggtgcaacgtgaagaagagggtggagagagacaagaacgacccgcggtacgtggtgacgatgtacgaggggatccacaaccacgtgtgccccggcactgtctactacgccgcgcaggacgccgcctccggccgctttttcgtcgccgggatcagtcacccagaccttaat

SEQ ID NO: 13106 - DNA, 486 bp, Oryza sativa
  Clone ID: TFbOSC400426j.C1.o60.gp
ggaattatgcacaaatcatcacgattttatagctaaaacaatacggcgtactccgtttagaaaaaaattaattctaacgacgaatctgaagttctaaacatatgattgtctagatttatagttaagatttaactcttttttttttaagtagtaagtctagtgcatacaagaaccgatcgatcgatcacgaacggcggtacaactaacaagcaaccaagaaaaacaaaaacagaagtaaattcagcgttcagaacgacgattccgacgagtgcgccgccgcggcggcgtgcagcggcgccccccacgcctgcgcgtgcgcgggaggcggcgaggccgccgccgccggaacgctccacggcggcgcagcggaagtagggtacgggaggtggccgccgccgccgacgcagccgggggtcgcgtggttgtggacgccgtcgtaggtggtgacgacgtagcgcgggtcgtcgccgtcgcgctccacccgct

SEQ ID NO: 13107 - DNA, 1290 bp, Oryza sativa
  Clone ID: TFbOSC400099j.C1.o8.fg
atggaggaggaggtggaggcggcgaacagggcggcggtggagagttgccacagggtgctggccttgctgtcgcagcagcaggaccctgcgttgctcaggagcatagcttcagagacaggagaggcctgtgccaagttcaggaaggtggtctccctcctcggcaatggcggcggcggcggcggcggcggcggcggtggtggacatgctagaggcaggatggccgggagaagcaggccttcggcggtgctgagagagaagggattcttggagagcagcagcggcggcggccagctggggatgatgatgtccggtgctgccactccgtctactagctccgccgcgcatttgcgcaaccggattggcggaggcagcggcgtgccaccggattcgttgcgggggctcgatttggtcagctcgagcagcaagggtggtgctcatcagttcgatcctccgaagctggtgcagccgttgtcggttcagttccagttcggcgctaccgcgcataggtacccgttccagcagcatcagcatcagcagaagttgcaggctgagatgttcaagaggagcaacagcgggatcagccttaagtttgatagccctagtgccaccgggacgatgtcgtcggcgttcatgtcgtcgcttagcatggacggcagcgtggctagcttggaagggaagccgccgttccatttgatcagcggcccggtcgcgagcgacccggtgaacgctcaccatgtgcccaaacggcggtgcacggggagaggggaggatggaagtggcaagtgtgccacaaccggaaggtgccattgctcaaagaggaggaagttgcgaattaagaggtcaattaaagtgcccgccattagcaacaaaatagcagacatacctccagatgaatactcatggcgaaagtatggtcagaagccgattaagggttcgcctcatccaaggggttactacaaatgtagcagcgtccggggctgcccagcgaggaagcacgtcgagcgattaagagagaatggaggaagaacatgtgattggatagtgaccggcaagatttgctcaaagaagggagggattaggtttgaagatttcaaaggaagattgacaaaaggaagtgaacaactgaaacatcgtgtaagcctggaaaaggataagcaggatttggcttttagcgtgcacaagtttacttgcaatgacttgcctctgtatgttgcttttgctttattgaaagatcaaaattttcttttggcagaagaatcattcagcattaaagctgtttctacttgctaa

SEQ ID NO: 13108 - DNA, 1011 bp, Oryza sativa
  Clone ID: TFbOSC401122j.C1.o48.fg
atggagcacttcaacgactgggacctgcaggccgtcgtgcggagctgcagcttcccgcaatcggagcctcctcgcgtcggcgtcggcgtccccgcggcgccgggagcgggcggggctccggtggtggtggcgccgcccgcgcgcgcaccggatggtccggatcagatggcgcgggcgtcggcgtcggcgctgtacgacctcgagtacctggatttggatcataagccgttcttgctgcccgggtcgtcgtcttcgtcgtcgtcgtcccgagcggtggcgcgggcgcgaggggaggatgacggcaaaggcagacacgaggtgatgatctctttccccgcggcggcggcggcctccacgtccggtgcgcagccgcggtcgccgtccggtcggaagccgggcatacgcaccccgcggcctaagagaaggagcagcaagaagagccagctgaagaaggtggtgtacgaggtgccggtggcggacggcggcgtctcctccgacctgtgggcgtggcgcaagtacggccaaaagcccatcaagggctcgccttatccacggggatactacaagtgcagcagcatgaaggggtgcatggccaggaagatggtggagcgcagcccggccaagcccgggatgctcgtcgtcacctacatggccgagcactgccaccccgtgccgacccagctcaacgcgctcgccggcaccacccgccacaagtccgcccctaccggcgacgacgacaagccgacgtcgccgggccctgcagccggcagagcggccgccggcgagggagtggtcaagtgcgaggacgtcgacggcaacgagctgtcggcgatggccgcggatggcggcgcagaggacacggcggcggcggcggatgacgacggtgagttgtggccggaggggatggggctggagctggacgagttcttgggtcccatggatgacgacgtgttcgagttcgaccatgtcttggaggacgacggcgtgctggggcgacggctctcgctatag

SEQ ID NO: 13109 - DNA, 585 bp, Oryza sativa
  Clone ID: TFbOSC15464j.C1.o1.fg
atggcggcttccgtaggactgaaccctgaagctttcttcttcagcaactcctactcctactcctcatcccctttcatggccagctacacgccggagttctcggccgccgctatcgacgccaacttattctccggcgagctcgatttcgactgctctctcccagctccggcccaggagtacccggaaaatgaaaacactatgatgaggtacgagagcgaggagaagatgagggcgagggtgaacgggaggatcgggttcaggacgaggtcggaggtggagattcttgatgatggcttcaagtggaggaagtacggcaagaaagctgtcaagaacagcccaaatccaagaaactactaccggtgctcgacggaggggtgcaacgtgaagaagcgagtggagagagaccgggaggaccaccgctacgtcatcaccacctacgacggcgtccacaaccacgcgagccccgccgccgccgccgcggcgctgcagtacgccgccgccgccggcgactactacagcccgccgctcagcagcgccggctcgccgccggccgcctattcggcaggcggctcgctgctcttctga

SEQ ID NO: 13110 - DNA, 231 bp, Oryza sativa
  Clone ID: TFbOSC29687j.C1.o32.gm
atgggccggccggcgtcggggcggcgcccggcggcgggcggcggcggccgtggcgggtggcggggccgcggcggcggcgggcggccggcggcggggccgcgcgctgcggcgcccggcggggtcgcgcccggtggagggctgtggcgcccggcggggtcgcgcccggcggagggcggcggcgccgcgcgcggcggcgggcagcggggcttcgggcggcggcggccggagtag

SEQ ID NO: 13111 - DNA, 607 bp, Oryza sativa
  Clone ID: TFbOSC29698j.C1.o1.np
cgccgccaccatgggtggtcggcctaaataatgtggacctgctccatgcgaggcggtgccaggccacaaccacagtggcattcccattccagattcccacggccacgcgttgtatcatcaccaccacaatggattcataggatacagccacttggtccccgtctttcaccacggaccagcggcgcaggcttcctggcatgagccctctcctcccaccgtccgccgccacaatggtgggggcttccacgccgccgcgcatcttcagagatggtcgccgccgcatccatggtcttgcgaggaaggcgatcatcgagggaggccgcagatggggaataagggcgaggcggcggcggcgatgggcgccatggggatcaacgacgccggcaacaacacgtcggcggcggcggcggcgcagcatcatctgggggttggcgcggtgaggatgaagaaggttgggggaggaggaggaggaggagggaaggcgcggcggaaggtgcgggagccgagattctgcttcaagacgatgagcgacgtggacgtgctcgacgacggctacaagtggcgcaagtacggccagaaggtcgtcaagaacacccagcacccaagg

SEQ ID NO: 13112 - DNA, 1221 bp, Oryza sativa
  Clone ID: TFbOSC401719j.C1.o53.fg
atgcaagagagcagagagtattggcgcgacggcggcgatgtcgtcggagaggagctcttgagggagatcctcgatgagaccgccgcggtgcattccaattccaattccaattcaaattcaaattccaattcaaaggaggcggaggaggaggatgagagagaatattttgccgcagctgcagcggatgagcagctgcaggtggaggctccttgcgggcggcggcggcgggagtcgatggtgaacaagctcatctccacggtgtattctgggccaaccatcagcgacatcgagagcgctctctccttcaccgccgccggcgaccatcagctactcgccgacggtcacaatttcgctgcaagtagctgtagcccagtggttttctcgccggagaagacgttgagcaagacgatggagaacaagtacacactgaagatgaaaagctgtgggaataatggtgggctcgcagatgatgggtacaaatggagaaagtatggccagaaatccattaagaacagcccaaaccccaggagctactaccggtgcacgaatccgcggtgcaacgcgaagaagcaggtggagcgagctgtggacgaacccgacactctgatcgtcacctacgagggtctccacctgcactacacctactctcacttcctccactccacttcttcctcctcgtcgtctactaccacccaacaacaactgcagcctcagcctcagatgatgaccaactgcaagaagaagcccaagctgcacctgcacccgctgctgcacgacgacccacccccacccccaccgccgccggaaatgacgaccatgatgataatgcagagcttcagcatccagcaacaacaacatgatgatgatcagctgctgcagcctgctgcagatgatcacttgatggtgcaggctccccccgatgattgttacaatattaacggcagcagcagcagcggcttgatgatgagcttggacgacgacgagcaggccgccggcgccggcgggctactggaggacgtggtgcctctgctggtccgccgcccgccgccgcccatctgcaacaacaacaactactactactcgccggccaccacctgcacctctgacaacgagtacggctcgtcggcgtcggcgtcgccgtcctcctccgtctccgtctccagctggactactcccatgtctccctgcatcgacatggccatactctccaacatcttctag

SEQ ID NO: 13113 - DNA, 830 bp, Oryza sativa
  Clone ID: TFbOSC875j.C1.o1.fg
atgtcccatcaacaagccttggcacaagtaacagcagaagcagtccattctccgtacagtatgattaatcaatcagatttctcactcccgttctcgtcgacaacgacttcagtgttggcatcacaacatgtcaactcttctgccaatgtgtcatcaccacgagaaataccaactctgccatcccacacagataatagcaccattgaatcaactgaggtttcacatggattccaaactactgccctcactgaggataaacctgctgatgatggctacaactggcggaagtatggccagaaggcagttaagggtggggagtatccaaggagctattataaatgtacccatttaagctgtccagttaagaagaaagtggagcgctcatctgacggacagattactcaaatactttatagaggccagcataaccaccaacgaccaccaaaaagaaggtccaaagatggtggcgctttactaaatgaagcagatgtttcccctgagaaggaagatgcatcaactagatcagaacagggctcccaagattattctggaaaattcaaggcatcaaatgatggtggtccttcatcatccaggaggggagataggggtgagcaaatatcgggctcaagtgatagcaattcgagctcggtacccgaagaagtgaaggttgagggtagagctactagtgatggaaatgcgaacaaaagacatgtgccagctccagctcaaagaatcattgtgcaaacaactagtgaggttgatcttttggatgatggctaccgatggcgcaagtatggtcaaaaagtagtaaaagggaatcctcacccaag

SEQ ID NO: 13114 - DNA, 1092 bp, Oryza sativa
  Clone ID: TFbOSC419704j.C1.o3.fg
atggcggcggtggagagctcgaagaagctcgtggccatcctgtccaagtccggcgacccgttccggctgatggcggccgtcgcggagaccgacgaggcggtgtcaaggttcggcaaggtggtcaccatcctcagcaacagggtcggccatgcgagggcgaggcttggcaagaggaggagctcgccgccggttgatccgggctgcctcatggaccacccgttggcggcggcggcgagctctcctgctcccagcaatggccgcctccatttcagtagtagtgctgctactgcgtcgccgtctccggcaacggcggcggcggcttcctccgccgcgaacgtcacgccggcggtggttgaccggagcttgtttcttgagacgacgctcttggatttgaacagtcgcggcgctcctgctccagctgcatccatggcggcggctgccaagaacagctcgaagcttgcacctgcacccatggtgaacagctcctcctccgcaaatcacatccagttccagcagccgatgaagagctttcagttcgagcagacgccgatcagcgacaagttccacatcgagatgccgagaggcgtcggcggcggcggagggaaggaggtgatcagcttcagcttcgacaactcggtgtgcacctcgtcggcggcgacctccttcttcacctccatcagcagccagctcatcagcatgtccgacgccgccaccaactccgccgcggctgcggcggcgccgacgaccaagaagccgtcgtcgtgcgccaggaaggccaccgccgacgacgacgccggcggcaaatgccattgcccaaagaagaagtccgtgtcaatctcgccaccgtttctcggccatttctgccatgatcttgaccgtgttcttgcttccgatttcttcgcaggaaacccagggagaagaaggggatactacaggtgcagcagcaagaaggattgcccggcgaggaagcacgtcgagaggtgtcgcagcgacccggcgatgctgctcgtcacctacgagaacgaacacaaccacgcgcagccgctcgatctctccgtagtgcagcaagccaccgctaatccccagacctga

SEQ ID NO: 13115 - DNA, 673 bp, Oryza sativa
  Clone ID: TFbOSC31212j.C1.o2.gm
gacgcagcaatcgtccgggaattcggtggtcgtcaagaacctcgacgacggccaggcatggcgcaagtacgggcagaaggagatccaaaactccaagcacccaaaggcctacttccggtgcacgcacaagtacgaccagctgtgcacggcgcagcggcaggtgcagcgctgcgacgacgacccggcgagctacagggtcacctacatcggcgagcacacctgccgggacccggccaccgcccccatcatcgcggcgcacgtcatccaccaggtcgccgccggcgacaacgacgacggctgcggcggcctccaagcggggtcccgcctcatcagcttcgtcgccgcgccggcggcgccagtagacgctgccgcggcgccgacgaccagcacgatcaccacggtcaccgcgccgggcccgctgctgcagccgctcaaggtggagggcggcgtcggctcgtccgaccaggaggaggtgctgagcagcctcacgcccggcagctccgcggcgcgcggcggcggcggcggcggcggagtcgcgggtcccttcgggccggaccagggcgatgtcacgtcctccctgcactggagctacgacgccgtcgccggcatggagttcttcaagaacgacgaggttgtcttcgatctggacgacattatgggtttgagcttttga

SEQ ID NO: 13116 - DNA, 1023 bp, Oryza sativa
  Clone ID: TFbOSC900009j.C1.o3.fg
atgtcgccggcgccggcgccggcgtacgcgcaggtgatggaggacatggagaaggggaaggagctggcggcgcagctgcaggggctcctccgcgactcgccggaggccggccgcttcgtcgaccagattctccacaccttctcccgggcgatgcgggcgctcgacaaggcggcggtctccgccgccggaggagaagggtcggaggtgcagagcgaggtcacctgcgggggcggggccagcgccggcgggaagaggaaagcccccgccgccgaccggaaggccaactgccgcaggagcctgggagtgtttgagaaggggattgaggagattgggaagatacgtaaaacgaggacgcagcaatcgtccgggaattcggtggtcgtcaagaacctcgacgacggccaggcatggcgcaagtacgggcagaaggagatccaaaactccaagcacccaaaggcctacttccggtgcacgcacaagtacgaccagctgtgcacggcgcagcggcaggtgcagcgctgcgacgacgacccggcgagctacagggtcacctacatcggcgagcacacctgccgggacccggccaccgcccccatcatcgcggcgcacgtcatccaccaggtcgccgccggcgacaacgacgacggctgcggcggcctccaagcggggtcccgcctcatcagcttcgtcgccgcgccggcggcgccagtagacgctgccgcggcgccgacgaccagcacgatcaccacggtcaccgcgccgggcccgctgctgcagccgctcaaggtggagggcggcgtcggctcgtccgaccaggaggaggtgctgagcagcctcacgcccggcagctccgcggcgcgcggcggcggcggcggcggcggagtcgcgggtcccttcgggccggaccagggcgatgtcacgtcctccctgcactggagctacgacgccgtcgccggcatggagttcttcaagaacgacgaggttgtcttcgatctggacgacattatgggtttgagcttttga

SEQ ID NO: 13117 - DNA, 1260 bp, Oryza sativa
  Clone ID: TFbOSC413551j.C1.o2.fg
atgtcgggcggcggcggcggcggcgagggcttcccgttccacgacgagctggcgtcgctgttcgctgagcggccgccgaacggcgccatgccggggatgctgcagcagcagcagccgtggtcgttcatcgactaccaccaccacctgatgcaggagagcgcgccgacgacgccgccgctggactacgaggcattcgccggggagttcgacgacgacgtggcgcctctggaggaggtgaagagggagctggtggtggacggcgtcgggttgttccctgggggtggtgcttctgctgctgcggcggcggcggcggtggcggggccgatgactccgaacagcatgtcggtgtcgtcgacgtcgagcgaggcgtgcggcgtcggcggcggcgccggaggggacgaggagtcggccgggaagtgcaagaaggaggaggagggggacggcggcgacgacgacggcaaggaaggatcgtcgacgaccaagggggatggcgatggagaagacaagaacaagaaaggaggtaaggggaaggggaagggggagaagaggccgcggcagccgcggttcgcgttcatgaccaagagcgaggtcgaccacctcgaggatggctaccggtggcgcaagtacggccagaaagccgtcaagaacagcccatttcccaggagctactaccggtgcacgacgcagaagtgcccggtgaagaagagggtggagcggtcgtaccaggacgcggcggtggtgatcaccacctacgaggggaagcacacgcacccgatcccggcgacgctgcgcggcacggcgcacctcctcggcgccgccgccgccgcgcaccaccacggcggcctccagtaccaccatcccggccacttcgcagccgccgtcggccaccgtttgcctccgcagccgcacgacgcgctcggcggcggcctcctggcgccgccgcatgcgcagcatctccatgccatgcagcaccagatgcagctggcggcggcggcggcggcgagcggcggatcactgcacgccgccgccatgcagcagatgccgcagcctgatcatgctggcttggttgccatcatcgcctctaccaccggtgcttccaccacgccgccgccgccgccggcgacggggagcgctgctgctgctactactcctctccggatgcagcacttcatggcgcaggattacggcctcctgcaggacatgttcatcccgtcgccgttcttgcacaacgacgacgccaacaacaacaaccaccgttga

SEQ ID NO: 13118 - DNA, 840 bp, Oryza sativa
  Clone ID: TFbOSC900417j.C1.o3.fg
atggaggagaacgcgcggctgacgcgagcgctcgacgccattctggccggtcaccacgcccaccagcgcgcgctcttggcgccgtcgctgtcgccgccgccgccttccgccacagcaagggcgccgagcgtgtccaccagctgcgcggcgagggaggacgccgcaccggcggtcgccgccgccgccgcgtcgacggcatgtccgtcgagacagcagccgccgaccgcggagccacggcccaaggtcaggacggtccgcgtgcgcgccgacgccgccgacgccaccgacgccaacagcatggcggagaccgtgaaggatgggtaccaatggaggaagtacgggcagaaggtgacgcgtgacaacccctaccctagagcttacttccgctgcgcattcgcgccgtcttgccccgtcaagaagaagctccaaagatgtgcggaggataggtcaatgctagtggcgacctacgagggagaacacaaccatgccctgtccacgcagacaaccgaattcgtcgccagcggctgcactacgagccagcacgccggggggtcgtcgtcgtcgccgctgccgtgctccatctccatcaactcgtcgggccgcacgatcacactcgacctgacgaaccaagcagggtccggatcgatcgcgagctgcggcgtcgaggcggccgccgtctccggcgagctcgtcacggtgctctcgccggagttgaggaggcacctcgtggaggaggtggtgcaagtgctcaagaacgacgccgagttcgtggaggccgtgaccaacgccgtggccgctagagttgtggatcaaatcccacacattcctgttcatttgtag

SEQ ID NO: 13119 - DNA, 1857 bp, Oryza sativa
  Clone ID: TFbOSC400135j.C1.o2.fg
atggccgattcgccaaaccctagctccggtgaccaccccgcgggcgtcggcgggtcgccggagaagcagcccccggtggatcggcgcgtcgcggcgctcgccgcgggcgcggcgggcgcgggggcgaggtacaaggcgatgtcccccgcgcggctgccgatctcgcgggagccctgcctcaccatccccgcgggcttcagcccctcggctctcctcgagtcccccgtcctcctcaccaacttcaaggttgaaccctctccgacaactggtactctgagcatggctgcaattatgaacaagagtgcaaatccagacatacttccttcgcctagggataaaacatctggtagcacccatgaagatggtggctctcgagattttgaattcaagcctcatctgaattcatcctctcaatcgacggcttctgctatcaatgatcccaaaaagcatgaaacttctatgaaaaatgaaagcctgaatactgccctgtcatctgacgatatgatgatcgacaatatacctctatgttctcgtgagtcaactctcgcagtcaatatttcaagtgccccgagccaactggttggaatggttggtttaactgacagctcacctgctgaagttggtacatctgagttgcatcagatgaatagctctggaaatgctatgcaggagtcacagcctgaaagtgtggctgaaaagtctgcagaggatggttataactggcgcaaatatgggcaaaagcatgttaagggaagtgagaacccgagaagctattacaagtgcacacatcctaactgtgatgtaaaaaagctattggagcgttcgcttgatggtcagattactgaagtggtttataaagggcgtcacaatcaccctaagccccaacccaataggaggctgtctgccggtgcagttcctccaatccagggtgaagaaagatatgatggtgtggcaactactgatgacaaatcttcaaatgttcttagcattcttggtaatgcagtacatacagctggtatgattgagcctgttccaggctcagctagtgatgatgacaatgatgccggaggagggagaccttaccctggagatgatgctgttgaggatgatgatttagagtcaaaacgaaggaaaatggaatctgctgctattgatgctgctttgatgggcaagcctaaccgtgagcctcgtgttgtagtacaaacggttagtgaggttgacatcttggatgatgggtaccgctggcgcaagtatggccagaaagtagttaaaggaaaccccaatccacggagttactacaagtgcacaaatacaggatgcccagtcaggaagcatgttgagagagcatcacatgatccaaaatcagtcataacaacatatgaaggaaaacataaccatgaagtccctgcgtcgaggaatgcgagccatgagatgtccactccccccatgaagcctgttgtccatccaattaacagcaatatgcagggccttggtggcatgatgagagcatgtgaacctaggacatttccaaaccaatattctcaagcagctgaaagtgacaccatcagccttgatcttggtgttggaatcagcccgaaccacagcgatgccacaaaccaattgcagtcctcagtttctgatcagatgcagtatcaaatgcagcccatgggttcagtatacagtaatatgggacttccagcaatggcaatgccgactatggctggcaatgcagctagcaatatatatggttcgagagaagaaaaacctagtgaaggttttactttcaaagccacaccgatggaccattcggctaacttatgctacagtaccgccggcaatttagtcatgggtccgtga

SEQ ID NO: 13120 - DNA, 843 bp, Oryza sativa
  Clone ID: TFbOSC404459j.C1.o1.fg
atggcgatgctggggagctcgtcggcggtggtgctggagctgatgacgatggggtaccagtcggcggcgtacctcggcgagctgctccgggcggcgtccccggcgcaggcaggggatgagcagcaggagctcgccgcggagatcctccgctgctgcgaccgcgtcatcgccaagctgaaccggggaggagccactggtgctactaccggcaagaagcggaaggcggcggagtccgccgccgccgccgccgtgacctccccttctctccccgtcacgccgaccaaaagaagggcgcgtggcgcggaggcggtgagggaggtgaggagcggcacgacgacggacgggttcatctggaggaagtacgggcagaaggagatcaatggctgcaagcacccgaggctctactaccgctgcgcgttcaggggccagggctgcctcgccacgcggcgggtgcagcagtcgcagtcgcaggacgacccggccgcggcgttcgtgatcgcctactacggcgagcacacctgcggaggcgacgccgccgccgccgccgcgtgccgggacggggaactaatgccacctgccgtcatcaactccggcgcgtcgagcttcgccgccgcttggaacatggcctcgcgtgagccggcgtcgtcgctcgccgtcgagcggaggagctgcgacggcgacgctcccagcgagacgtcgcaggggtggtctccctccttctcgtcggaggtggagctggacgtggtgggattcgacctcgccggagccgactcgtcggcgtcgccggtgtgggagttcttgaatggcagcttcgactgggaattcgtcatcaactccctctga

SEQ ID NO: 13121 - DNA, 945 bp, Oryza sativa
  Clone ID: TFbOSC400284j.C1.o48.fg
atggccggagcggagtggtcgccgttcgacggggacgccgccttcgcggagtactcgtcggcggtgctggccgagctcggcgggtgggcggcgccgggcgaggaaggcggcgcggggatgatggtaccggcggcgctggatctgccggtggatgtggtgggggcggcggcgcgggaggaggaggaggaggaggaggaggcgccggcgagatcgggcgacggcgccgccgccgccgcgtcgtcgagctctagcggggagcccgccgcccccgacaagcgaccggccgccgccgaggcagcgccggcggcggcggcgacggcgacggcgacggcgaagaaggggcagaagagggcgaggcagccgcggttcgcgttcatgaccaagagcgagattgaccacctcgaggatggctacaggtggaggaagtatgggcaaaaggcggtcaagaacagcccattcccaaggagctactacaggtgcaccaacagcaagtgcactgtgaagaagcgcgtggagcggtcttccgacgacccttccgtcgtgatcaccacctacgagggccagcactgccaccacaccgcctccttccagcgcggcgtcggcggcgccgccgtcgcggcgcacatccacggcgcggcggccgtcgccctcgccgagcaaatgtcggcgttcgtctcgccgccgccacagccgcatatgctgtacggtttaccccggttgcacccgccgtcctccgagaccgccgtcagctgctcgatgccgacgacgacgtctttgcaggagctgaacaatagcgaggggctacaacgccctggctataataatagcccccaggcggcggtgaccatcgcgcagcggccgccgtcgccgtcggtgcctccggctgtttcgtttgacaaggggctacttgatgatattgtgcctcctggagttagacttggatga

SEQ ID NO: 13122 - DNA, 1617 bp, Oryza sativa
  Clone ID: TFbOSC414373j.C1.o24.fg
atggagcgccctgccccggaggcggcggctgcggcggcggagccccctggggcgaaggcggaggaggaggaggaggggccgaaggatgtgggggtgaagggtacggggaaggagaaggagacagagaaggttgaggccgagaaggagatggaggggaaggggaaggggaaggagtcgatggaggtggaggaggggaaggagaaggagggtaaggggaaggcgaaggagaaggagaaggagacgaaggtgaaggtgaaggaggagggtggggaagagaaggagaaggggaaggttgaggtggtggaggcaaagcggcggccggctggtgttggcgcggagacacccatcctagcggtgccgatggtggccgtgccatgcttcttggcgtctcctgcatttgcgggtcacttttcaatgagccatcaagcagctttggcgagtgtgacggctcaggcacaaatacaattgcagtcaccaaccacaccatattcagaagggctgcccagtccatttcctataacacctaaagctgtaatgcccctgcagcgatcaccttcaggaactgaagggagtgttcgcagatcagtgttagagaagtcagcctcatttcagtcaagaccacacaatcatgtgtctgtaaacatggttggtgatggcttcaactggaggaagtatggtcagaagcaagtgaaaagtagtgaaaattccaggagttactatagatgtaccaactctaattgcttggctaaaaagaaggtcgagcattgtcctgatggccgcgtggtggaaatcatttacagaggaacacataatcatgaaccgccacaaaagaccagatttgtgaaagagagagtggctcatattactgcttcctctggagatgatgaaaccttgggacttgtgaacaatgaaattatagaatccccgtcaccgggatgtaaattagagccgggtgctgtctctgaagcttctgaacagcagcttttttgctcaagtgattgtgaaggtgatgctggtaacaaatcagaagatgatcatcctagcacagagcctcagccaaaacgaagaataattgaaactagcacacctttgactccagttctcagaactgttagagagcaaaagattattgtacaggctggaaagacgagtgatgggtatagatggcgcaaatatggacagaaaattgttaagggaaatccaaaccctaggagctactaccgttgtactcatgatgggtgccctgtccgtaagcatgttgagaaggcaccagacgatgataacaatattgttgtgacctatgaaggtaagcacaaccatgatcaaccgtttagaaacaacagtgagtcgaaggatgggcctgttcctatgatcattccagcagagacaacatctgagcagcccagcacaatgacctcaacatcagaacagaaacagccgatcagtctgctgaaggatggcggcgatgagcccatgaagggcaagacttcagaaatcggtggtgagaaggcagtggagtctgcgcaaacccttatcagcattaaaactaatcccgatgacatgaagaataccctcttgaaagatacttccgcggtagttcctgtccaaaataattga

SEQ ID NO: 13123 - DNA, 551 bp, Oryza sativa
  Clone ID: TFbOSC18795j.C1.o1.fg
atggagagcatggagggcaatggaggagggcggctggtggtgacggagctgagccacatcaaggagctcgtgaggcagctggagggacacctgggtggctccggctcccccgacctctgcaagcacctggcctcgcagatcttctccgtcaccgagcgctccatcggcatgatcaggtccggccacttcgacggccaccgcaagcgctccgccgccgctgtcgccgccggtgacctcgactcggcgactcccagccccctcagcgacgtctccgacttgcctttcaaggccaccaagaagaggaagacgtcgacggagaagaagaggcatcagattagggtgagctcgacgggaggggtggagaatccaccggtagatgatggccatagctggagaaagtatgggcagaaagagattcttggagccaagcacccaaggggttactaccgttgcacccaccgccactcgcagggatgcatggcgacgaagcaggtgcagcgcaccgacgaggacgcgacggtgttcgacgtgatctaccacggcgagcacac

SEQ ID NO: 13124 - DNA, 783 bp, Oryza sativa
  Clone ID: TFbOSC401926j.C1.o17.fg
atgacctacttagagtttctccagaaaaatcaatgggggcaggaggccagcgtgggggcagacggcgtgcaggtggacgacgtgtgtgcgggcagcctcggagggcacgcgacggccggcgtgtggccaggcagatggcgggagatcggcggccgggcatgcgcatggactgccgccgaaggccttgagaacggtgggcaagaaagcagggcagatggttcatcccgaagaattatactagagcttggagatcgtgacgattcctatccctggaggaagtacgggcagaaggacattcttggcgccaggtttgcaaggagctactacagatgcgcccagatgttgggctgcacggcgaggaagcaggtgcagcaatccgacgacgacccgtcccggctggagatcacctacatcggcctgcacacctgcggcggcgaccggccgtcgtcgccggctcccaccaaccccgccgacggcccgcgttgcgacgcagcaaccagtagtcaccgtcttctgccgtcagctctgcagcagaagctggaggaacatgtcccggcggcgtcggacgacatgatgatggcctgcacgccgtcgtggctgttcataccctcgccggcgtgctcgcagtcggagcttctgtcggagggggaggttccggagctgcgggtggtgcggcaggagccgtatgatccggtggagctggtggaggagcacaagaagccgagcgacgccgacgaggactccctcgccctccacaactccgtcgtgccggattttatgtag

SEQ ID NO: 13125 - DNA, 1896 bp, Oryza sativa
  Clone ID: TFbOSC27462j.C1.o1.fg
atgtcgagtttcttgaacgaagaattcagctccggtcccttttcagacattttctgtgataatggcagtaacaaacatcaggatggacttgggaagagcaaagctttcatcgattcaagccgggaagaaactgctcagctagcaaaaaagtttgaatcaaacctttttggtgccaaccagaaatcaagctcaaatggctgtctgtcagagaggatggctgcaaggacaggttttggtgtcctgaaaattgatacatctcgtgtcggttattctacaccgattcggtctccggtgacgatcccgcccggtgtgagtccaagggaacttcttgagtcgccggtttttcttccgaacgccattgcacaaccttctcctaccactggcaaactgccatttttgatgcatagtaatgttaaaccatcgatccctaaaaaaactgaagatgaaacacgccatgatcgtgtattcttctttcaacccattttgggatctaagccaccaacttgtccagttgcagagaagggtttcagtgttaatcatcaaaaccagccttcagtgacggataatcaccaggagctcagtcttcagcctatctcaactgcatccaatgatttcacttcaccaactattgttaaacctaagacatctgattccatgttagacaatgatgatcacccttcccctgcgaatgatcaagaagagaatgcttcacacaaaaatgaagagtattcttcagacctgatcattacccctgctgaggatggatataactggaggaaatatggacagatgcgagttagaacagtggagcgttctcaagatggccaaataacagagatagtctacaaaggttctcacaatcaccctttgccgccttccaaccgccgaccaaatgttcctttctcacacttcaatgatctgagagatgatcactctgagaaatttggttccaagtctggtcaggccacagcaacttcatgggagaatgccgcaaatggacacctccaagatgtcggtagtgaagttctgacaaaactgtctgcttctcttacgacaacagaacatgctgaaaaatctgttatggacaaacaagaagctgtggatatctcatcgacgctctccaatgaagaggatgatagggtaacgcatcgtgccccgctttctctgggctttgatgcgaacgatgactatgttgaacacaagagaagaaagatggatgtttatgccgctactagcactagcaccaacgccatcgacataggagctgtggcgtcaagagctatccgggagcctcgcgttgttgttcagaccacaagtgaggttgacatccttgatgatggttaccgttggcgcaagtatgggcagaaagttgtcaaaggaaacccaaatccaaggagctactacaagtgcactcatccgggttgctcggtgcgcaagcatgtggagcgatcatcgcatgatctgaaatccgtcatcacgacgtatgaaggaaagcacaaccatgaagttccagctgccaggaacagtggccacccaagctcaggctcagccgctgcaccacaggctaccaatggtcttcttcaccggagacctgaaccggcacaaggtggtggtggtggtagccttgctcagtttggctatggctcagctggtcacagaccagcagagcagtttggtgcagcagcagctggtttctcctttggaatgctgcctcgtagcattgcaactccggcgccgtctccggcgatcgccgtgccggcgatgcaggggtacccagggcttgtgctgccgagaggtgagatgaaggtgaacttgctgccacagtctgggaatgctggtgcagcagctagccagcagctgatgggcaggttgccaaagcagcatcctcagatgtaa

SEQ ID NO: 13126 - DNA, 933 bp, Oryza sativa
  Clone ID: TFbOSC10036j.C1.o3.fg
atgaacacttttacacttttcagggatgaggtgcagaaagcttcagagaaggttcatcggcatcacgcgaacgacgacgaggccgggttattcctgtcacttgggcttagcctcggatcgtctcctgatgcgtgccagtgccacgccagcaagaaagacgaagcggacgccggcaacggcggcggcgacgggtacctcgccctcgcgctgcgttgcgcccccgccgccggcgagccaatggtgcatcccaagaggcagagggccaccaccaacagcagcagtagcagcagcatctgcggcgaatacgggggcggcgccgccgccgccgccgtgccggcgggccacgacgacgacgaccggtcttgcatgatcacggctgcgtcgacggcgaatcggcctggccgggtcgtactcagaacacgatgcagcgcacccacggtgaaggacggttgtcaatggcgcaagtacgggcagaagacggcgaagggcaacccgtggccgcggggctactaccggtgcaccggcgcgccggggtgccccgtgaagaagcaggtgcagcgctgcaaccacgacacctccgtcctcgtcaccacctacgatggcgtccacaaccaccccatcacgccctacgccgccgcgctccctccgtcgtcgtcgtcctcctcatcggcggcggtagccatgctcgcctcctcctcgtcgtcttcgacgtggtcggagcttcagcgcgcgatgccggcggcgcagtcgtcatggagccagagaaactaccctattcaggcagatgtcgtggcgaaggcgatctgggaccccaagttccaggcgacggtggcggccgccgtcgcgagctacgtccgtgaccgtgagcagagcgcgcgcgttgccggtgggaagggtgccggagagctcttcaacttggctcctccatgctga

SEQ ID NO: 13127 - DNA, 1161 bp, Oryza sativa
  Clone ID: TFbOSC30380j.C1.o1.fg
atggacggcgacgcatggtggtaccctggcggcggcggaggtggtggtagcaacaactgggatcttggcgctgtcgtgaggtttgggtgcggcgggggacgggtgagcccggcggcggcgttgctgggcgaggcgtgggagtacgacgacgacccgttctcgtcgttcctcgcgccgcccatgacggcgcagcaggcggcgctgcccgccgtgtgggaggagggagacgacggggacgcggcgtggatggcgccgctcccggggcttcagaccggtggtggctggggtgatcaggcccccatggtcgtcgacgagctctgcggggccctcgttgtggcccctcctccacctccgaagcaacaggaggtgcttcaggtccagcagcagccgccgccggcggacaacacgcagcccactacctaccagcagggatccggcggcgacggtgagagcactcgcgccggcggatcaaggtcggcgaggagaaagtatgcggcctccgctatttatatagtctccgtttgcttttctgattcttgcataatgtggattcgctcgctggctgatgaccgtggcgttcgccatgcatgcaggaagaagcagacgagaaaggaggtggtgcgcgtggcggcgagcgggccggcgccggacttgtgggcgtggcggaagtacgggcagaagccgatcaaggggtccccgtacccgcgcggctactaccggtgcagcagcaacaagaactgcgccgcccggaagcaggtggagcgctgccgcttcgacccctccttcctcctcctcacctacaccggcgcccactccggccacgacgtccccctccaccgcaactccctcgccggcaccacgcgccacaagccgccgccgccgccgccgctcccgtccgccgccgacaagtctccggccaccgcggctgaggcggcgacggcgagccagagccccggcctgtcgccgaccacgccgctgcgcgcctcgtccatggagctccacggcgaggacgacgccgaggccgagctgcaggtggaggaggacgacatggccatcgacgacgaagacgacgacgacgtcgccgacgagaccatcagcaccgtgccgtggggcacgcccatctccgacgcgatcatcgcggcgagctacgagtggagatga

SEQ ID NO: 13128 - DNA, 781 bp, Oryza sativa
  Clone ID: TFbOSC30380j.C1.o1.np
atggaaacgataaggactactgtgattgtatccatattggtttccctagttctacttggacaagcggacacctatgggtataaatacaaggccccctaggaggagaggggacacggaacaatagatcaatacacaagatcaatatacaagctaacatacgtcaagacaagacgccggatatcgacttcagagattagcatggctagtcccctacggtgtctacggatactgataggagagacatagcgctgtctttgatcttgccggatgcggattcgaggagtaaggctaccctgttgtcgactacgagtcagcacttcagaccgccaagtcgacaacagttagataggatctatctcttttacctaagtctcgcatgtatcctggtaccaacgatccccattctatgcaaataccggaatcgcgacatcaaatatcgacaaatactctgtctatctgaccgaccacatgccaccaattagacctgcccatagacggcgggcttctgcccgtacttccgccacgcccacaagtccggcgccggcccgctcgccgccacgcgcaccacctcctttctcgtgggccacaacgagggccccgcagagctcgtcgacgaccatgggggcctgatcaccccagccaccaccggtctgaagccccgggagcggcgccatccacgccgcgtccccgtcgtctccctcctcccacacggcgggcagcgccgcctgctgcgccgtcatgggcggcgcgaggaacgacgagaacgggtcgtcgtcgtact

SEQ ID NO: 13129 - DNA, 261 bp, Oryza sativa
  Clone ID: TFbOSC8596j.C1.o2.np
aacagtttgtcctacgatggctacagctggaggaagtatgggcagaagcaagtgaaagggagcgagttcccacggagctactacaagtgcactcacccaacatgccctgtcaagagaaaggtggagatgacaccagatggccggattgctgaaattgtatacaacggtgagcacaaccaccccaaacctcatcctccaagaaagccaacattatcaacaagttataatttacctgacatctgtgacgatggcattggcctg

SEQ ID NO: 13130 - DNA, 915 bp, Oryza sativa
  Clone ID: TFbOSC400222j.C1.o48.fg
atgtccggcggcggcgggcgggagcagatgaagggcggggaggacgtcgctgcggcggattgcccggggtcgccggtgtcaccgtcaccggcagctgctcagcggtcggcggctggggcggcggcgtcgcctagcgggaggtcgaggcggtcggcgcagaagcgggtggtgaccgtgccgctggccgacgtgaccgggccgcggccgaagggcgtcggggagggcaacacgccgaccgactcgtgggcgtggcggaagtacggccagaagcccatcaaaggctcaccctttccaagggcttactaccggtgcagcagctcgaaggggtgcccggcgaggaagcaggtggagaggagccggaacgacccggacacggtgatcgtcacctactccttcgagcacaaccactccgccacggtgcccagggcgcagaaccggcaggcggcgccgcagaagcccaaggcgcaggcctgcagtccgccggagccggtggtggaagtggaacccgaggaaacgcaccagtacggcgtcaccgccgggcctgccaccggtggcggcggcggcgcggcggccatcgaggtgcgcgacgagttccggtggctctacgacgtcgtgtccgtcccagccacgtcgacctcgccctccgacatcgacgcggccgacgagatgcagctgtacgatcagccgatgttctttggcggcgccgtcgtcggcacggccgcgctcctccccgacgagttcggcgacgtcggcgggttaggcggggaggggctgggcgaggaggaggcgttgttcgaggggctcggcgagctgccggagtgcgccatggtgttccggcggcgcgccggcgacgggctggagatgggaggaggggttaagatcgagcagccggcggagagcacggccatgacatga

SEQ ID NO: 13131 - DNA, 972 bp, Oryza sativa
  Clone ID: TFbOSC30411j.C1.o3.fg
atggatctgatgggtgggtacgggcgggtggacgagcaggtggccatccaggaggcggcggcggcggggctaagggggatggagcatcttattctgcagctgtcccagactgggacgagcgagaggtcgccggcgccggcgcaggagcagcagcaacaggtggactgcagggagatcacggacatgacggtgtccaagttcaagaaggtgatctccatgctgaaccgcaccggccacgcgcggttccggcggggcccggtggtggcgcagtcgtcgggcccggcggcgtccgagccggcgccggtgaggtcgtccccgtcggcggtgtcgaggcccatgacgctcgacttcaccaaggcggcgtccgggtacggcaaggacgccgggttcagcgtctccggcatctccgccgcgagctcgtccttcctctcgtcggtcaccggcgacggcagcgtgtccaacgggcgcggcggcgggtcatcctccctgatgcttcccccgccgccggcgaccagctgcggcaagccaccgctgtcctccgccgccgccgccatgtcagccggcgcaggccacaagcgcaagtgccacgaccacgcgcactccgagaacgtcgccggcggcaagtacggatccaccggcggccgctgccactgctccaagcgccggaagcatcgggtgaagaggacgatccgcgtgccggcgataagctcgaaggtggcggacatccccgccgacgacttctcgtggcggaagtacgggcagaagcccatcaagggctcccccttcccacgaggatactacaagtgtagcacgctgcgcggttgcccggcgaggaagcacgtggagcgcgacccgaccgacccgtccatgctcatcgtcacctacgagggcgagcaccgccactccccctccgccgccggccaggaccacccgccggcgccgcctccgccgctggcgctgccgctcgcctga

SEQ ID NO: 13132 - DNA, 1002 bp, Oryza sativa
  Clone ID: TFbOSC400188j.C1.o7.fg
atggcgtctcctgatggtggcgttggagacggcggcgcggagccacatgaagttatggacgacctgctcgagatgcgcgagcaagcggcgatgctccacagcatgctacatgggacatcgccgtcgagctgtgcggcggcggcgagcaccaggcagctgaatcagctgatagacggggtgatgagcaggctgcagtccagctcgctgtcggtgatgtcgcctggaggaggaggaggaagaagaggatcgggcgggaggaagaagaaaggcgccaaggccgtggccgggccgcacaggcggagcagctccggtagaagaagatcgaaaagtccttttgtcaggatggtcacgaccaaggagctggaggacggcaggcaatggcgaaagtacgggcagaaacatatacaggactccccaaataatccaaggagctactacaggtgcacgcataggccagaccaaggttgtatggccacaaagcaagtacagacctccgagtctaactcgtcggagttcgtcatcagctactacggtgagcacacctgcagcgacccttccaccatcccgttcgtcgtcgaggccgaagctcccgctgcagactacgcgaacctcatcagcttcggatccagcggcggcgcgagcacaagcagagtcgaccctcttcgtcagagccgccatcgtttgatggcagaagccgttgatccgacgccgtcctgcagcttcgccaactgccactctccggtactgtcctcggagtgcgccagcgaggcggcggcgctcagcagcagcctgccgctctccgccgtggtgggatcggcggtgacaacgccgtcgacgtcgatcgtgggttcagcgcctgcggattacgactggccgtcagggctcgccggaggtgacatggccggcagcttcccgtcctctcccagcagcctcgggttcatgactggctcctttgggaatcttcctggggatgacgacgacatgtttggcttcgatccttaa

SEQ ID NO: 13133 - DNA, 1140 bp, Oryza sativa
  Clone ID: TFbOSC401122j.C1.o38.fg
atgtcttctggaggaggaggaggaggaggaggagatcgccatggcccctaccaccagcacgggcacctcggccgcggcgaaggcgctgattacgtgtacagcagcagcgacatggagagcttcttcttcagccaacccgggggcgtcggcatcggcgggggtggtggtggcgtcgtcggcgccggcggtgccgacgagatcatgccgtactccagcatcacggactacctgcaggggttattggacccctccgggctagctcggcacctcgacgtggcgtgcccgtcgtctcaggacacggtggtcaagcaggagctgtcggtggatgtgacgagccacgacagccagggcaccggcggcgtcgccggagaaggcgtcgcgcaggccacgccgaactcgtcggcgtccttctcgtccagcgacggagaggcggagggcggcaaatcgtcacgccggtgcaagaagggtcaggcgaaggcggaggaggaggacgacaaggatgaggaggatggagagaactccaagaaaccgaacaagcccaagaagaaagctgagaagaggcagcggcagcctcgcgtggcgttcctcaccaagagcgaggttgatcacctcgaggacggctaccggtggcgcaagtacggccagaaggcagtcaagaacagcccatacccgaggagctactaccggtgcacgacgcccaagtgcggtgtgaagaagcgggtggagcggtcgtaccaggacccctccacggtgatcaccacgtacgaagggcagcacacgcaccacagcccggcgagcctccgcggcggcggcggcggcgtcggcatcgtcggagggcaccaccaccaccacctcttcatgcccggcgtgcatggcctgccgccgtcgcacctcatgccggcggggttccaccctgagctgatgggcctcatgcaccaccacccggccatggccgccgccgccgcaaaccctagcatgtacttcccgggcgtagctgcttctgctccgccgcctcctgctgtggctggcggcggtgcaatgccgcccaacgatcatcctcctcttcagcagcatcacttcactgactacgccctgctgcaagaccttttcccttccacaatgcccagcagcaacccatga

SEQ ID NO: 13134 - DNA, 1119 bp, Oryza sativa
  Clone ID: TFbOSC100778j.C1.o10.fg
atggcgcccaatccggtcgggcatgcgcctttgtgttgcagactggtgcagggcaactttgaaactttccctcaacaggacttggtacctttaacagcacaagaggttcattctaagtgcattacattcggtcgagcagagaacctgccttttatccctttggcgacttcagcgctggtctcccaacatactggttcttcttctgtaaatgtgacaccgttgcaagaaattctgacttcgccgtcgcaaataagcaatgtcaacactgaatctattggggtgttacaagggctcccagcttcatccatcgttctggatagacctactgatgatggatacaactggcgaaagtatggtcagaaggcagtgaagggtggggaatatccaaagagctactacaaatgcacccatctgaactgtttggtcaggaaaaatgtggagcactctgcagatggacgaatcgttcagataatttacagaggacaacacactcatgaacggccctcaaaaaggaggtttaaagattgtggtggtatatcagatgatttagacgatttcagtggcaccacgggcacttcagtcagatcacagcctgattacgatgattactgcagaaagcctatcattccaagtggcaccatggttgctcctttagtgaaaaagattgaagatggtgatgaccaattgtctggatcaagtgataaccaggatgagcatgatgatgaggtgaggacttctgatggagcttccggtgatgccagtgcaaatgaaaggaatgtgccagccccaggtcaaaagattatagtgagtacaaccagtgagatcgatcttttggatgatggttataggtggcgaaaatatggacagaaagtggtgaaaggaaatccttacccaaggagttattacaaatgcacctacctaggctgtgatgtaaagaagcaagttgagagatctgttgaggaaccaaatgctgtgataactacatacgaggggaagcatatccatgatgtgcctgctgcaaggaacaaaagccatgtcgtagccaatgcctctctattgcagaacacaaagtcgaatacctactgcacagagcaatcctacacaacgatcacttgctag

SEQ ID NO: 13135 - DNA, 559 bp, Oryza sativa
  Clone ID: TFbOSC15307j.C1.o1.fg
gagttactacaagtgcaccagctcccgatgcagcgccaagaagcacgtcgagaagtccaccgatgacccggagatgctcatcgtcacgtacgaggggtcgcaccatcacggcccgcagccgctcttcccgccgcacatcgcccagccaccgccgccgacgtcggtagtgggcttctccgccgcctccggcgctggcccgccgccgtcgtcgcccgcggcggcggcaaggaagaggaagaactatgtcagggcggccttctcgccgacgacgtccgaggacgacggcgacggcgccggccggctacggccagagtggccacaagacgatgggacgtcgtgtgacgtcgccgagttacgacgacgtggcgacgcggagcacgccgcgccgcgtcgtgtcgcgacggatcgctcgtgcgacgatggcggcggcggcggctcgacctcggcctcgtcgtccgtggcgcgcgctgacgccgctacggcgctgtcctctgactcgccgccgaccatatggtcgtgcctggactggccgtggtcccaggaaacactgtttctgtag

SEQ ID NO: 13136 - DNA, 505 bp, Oryza sativa
  Clone ID: TFbOSC5799j.C1.o1.gm
gaccatatctgatgggagatgtgctgcgagctcaggccaccgcgtcggcggaggaggtggccggcggcgtctggccctgcgagctcgacgaccacctcataggcgagctcctcggtgacgacggcctgttcgtcccggccgccgaacaccccaccctctactactcgttcggcgcggggtcatcagcagccgccgccgccgcgccgtgcaacgggggcggcagcgctgatcacgagcggcggccgcggccggcaccggcggtgagcagggatctgtgctcggtgtactcaggcccgacgatccgcgacatcgagaaggcgctgtcgtcgtcggcgtcgccccggccgccgtacccctccggccgccgctacagctctctgtatttggtggaagcggagagcaagtacacgagcaaggtgaggagctgcggcggcaagatgccggccgacgggtacaagtggaggaagtacgggcagaagtcgatcaagaacaacccacatcccag

SEQ ID NO: 13137 - DNA, 612 bp, Oryza sativa
  Clone ID: TFbOSC5800j.C1.o2.fg
atggaggaggatgatgggttggccttgatgacgggggcaaaccagagcttatggagttactacaagtgcaccagctcccgatgcagcgccaagaagcacgtcgagaagtccaccgatgacccggagatgctcatcgtcacgtacgaggggtcgcaccatcacggcccgcagccgctcttcccgccgcacatcgcccagccaccgccgccgacgtcggtagtgggcttctccgccgcctccggcgctggcccgccgccgtcgtcgcccgcggcggcggcaaggaagaggaagaactatgtcagggcggccttctcgccgacgacgtccgaggacgacggcgacggcgccggccggctacggccagagtggccacaagacgatgggacgtcgtgtgacgtcgccgagttacgacgacgtggcgacgcggagcacgccgcgccgcgtcgtgtcgcgacggatcgctcgtgcgacgatggcggcggcggcggctcgacctcggcctcgtcgtccgtggcgcgcgctgacgccgctacggcgctgtcctctgactcgccgccgaccatatggtcgtgcctggactggccgtggtcccaggaaacactgtttctgtag

SEQ ID NO: 13138 - DNA, 1719 bp, Oryza sativa
  Clone ID: TFbOSC401547j.C1.o14.gm
atggagaataatcagtcaggtcaagctcaggacggcatggccgatcaaagatttcgcagctggctaacagaacaacttaatatgcagcagcagaatgccggttgttcttccaacccagcaccagcagtaatgcagatgccagctctgccatctcacacagattatggtggcatatatcccaacccaactgaatatgatggctacaactggaggatgtgtgggcagaaattagttcagggtgggtgccatcagaaattctactatgaatgttctcaagcaaactgcggtgccgagaaatccgtgacgcgctccgcagatggacagatcaagaaaacagtatgggttatcaggccttcagttgcaatgcctaggaatgaggaggaagatgggctacaatctggttcgagtgacagcggggatgatgatgctagtgaagcaagagctgctgacatgttcctgcagctgcagctcaagataccaccgcgcataacacaattgacgttgatgttctgggtaacagctctcagcagcgtaagaattatcaccgaagtggtggaaaagttcaaagtgcagaatgtaaacattgtaaaaaatgcctcagtggaaaaacttcaggaggaacaagccatctgcgccgacatctcaagatatgtcctgcacaatttagaacgactagactgcagcaagaaggtgccaagcagtgcaaattttaggcagtttttggttgccatctgtcctgattataatatggtgccgcaggctgcttttgaagagaagttcctcagcttttttcataatgaaaagatgaagctaaaagagaaaatagaacttacacctggaggagttttcctgtcggtaacaaagcagtacgtcgagtttaaaaccttcgtctgtatcacagtacattttattgacaacgagtggaagatgaatagaaaaatcattagctacggctatggcggataccctgatggtgctgattactatgtggatcccaggttcaaactaaggtatcttgagcagtgcttcacacaagtttccagtagtggttgtgccaaattgttcgtccttgaagttcgtgcaaagatttatgagctctttcttcaatactcctgtaatgttgattggcaaactggtgagctacttaatcacaggagtaatgatctacagatggatagacacggtaatgattcattacatggaacagataagaatgacattgagcaaggatcaaatggagaattcagagaactaacttcgtacattgagggggaactttatcctcagaatgaccaatttgatatcctgaaatggtggaaggataatgcgtcaacgtatccaactcttgctaggcttgcacgcgacattttagcaatacctggaagtgcagtttctgctgaatatgcttttaacaaaactggtgaaagggcagcaggggttatcaggccttcagttgcaatgcctatgaatgaggaggaagatgagctacaatctggtttgggtgacagcgaggaagatgatgctaatgaagcaagagttgatggtgacgacatggtgcagctcaagatatcaccgctcaaactgcaactgaggttgatgttacgggtaacggctgtcagcaacgtaagaattattgccgaaggtttccttgcttgggaaggtatgtttcgggtttccattggtttctaccccgaattggacgtggaggaggacttgtag

SEQ ID NO: 13139 - DNA, 1509 bp, Oryza sativa
  Clone ID: TFbOSC101573j.C1.o8.fg
atggagatgatggtgcagaagcaacgacacgaggagggggaagaggagcgaggaggcttgtgcgcccgcgagatcaaggagctcgacttcttctccgccgccggtgccggtgccggccggagagacgacgacgacgtcctccgtgcggatgggatcagcagcagccacgccggatttatggtcagcactgcgctggacttgctgacagcggtcaacgacggtgatcatcatgaggagaagaaagggcagtcaaatattcaccaaagcaagcagatggatgcggcggcgacgacggtggagggggagctccggcaagccggcgaagagaaccggcggctgcggcggaggctggaggagctcaccagcagctatggcgccctctaccaccagctcgtccaggcgcagcagctgcacaccaagcatcagcagcaggctccgatcgccggcgtgcagttgctggacgcgctcgcggcggcgtctccggcgagccaccggcgacgagcggcggcggcggtggacggcgatagaacagctgactctgatggtggcgagggcgacgagaacgtgtcgccttctcttggtagcaagaggccggcggcggcagcgacgttaacgcggctgacgccggagagcggcagcggcggggagaataatggcggcggcgagcaggcgccggcggcggagatggcgccgtgccggaaggccagggtgtcggtgcgagcacgatccgaggctccaatgatcagtgatggatgccaatggaggaagtacgggcagaagatggccaagggtaacccttgccctagagcctactaccgatgcacaatggcttcgcaatgccccgtcagaaaacaggtgcaacgatgcgcgaaggacaagagcatcctcatcaccacctacgagggcacccacagccacccgctgccgccggccgccgccgccatggccaagaccacctccgccgccgccgccatgctcctctccggccccgccgtcagccgcgacgcgctgttcgccgcccaccaccacgtcgtcgcgccgccgcccttcttccaccacccctacgccgggtccaccatggccacgctctccgcctccgccccgttcccgaccatcacgctcgacctcacccagccgccgccgacgacgacgaccaccgccgccgccgccatgctccagctccaccgcccttatgccttctcctcattgccgttctcgatgtacggcgccggcggcggctcgcaccggccgcccgtcgtcctgcccccgccgtcgtcggtggtggagacgatgaccgccgcgatcaccagggaccccaacttcaccacggcggtggcggccgcgctctcctcgatcatggcgggaggcggcgcccaagctcgaacacctccacgcggcgggagtgacgccgccggagacatcaacggaggcggcggcgccgaccacgccactgccggagcacgcgccgcggcggcggcgacgcagccttgcggcacgtctcccacctga

SEQ ID NO: 13140 - DNA, 1953 bp, Oryza sativa
  Clone ID: TFbOSC400603j.C1.o12.fg
atgtcgagtttcttgaacgaagaattcagctccggtcccttttcagacattttctgtgataatggcagtaacaaacatcaggatggacttgggaagagcaaagctttcatcgattcaagccgggaagaaactgctcagctagcaaaaaagtttgaatcaaacctttttggtgccaaccagaaatcaagctcaaatggctgtctgtcagagaggatggctgcaaggacaggttttggtgtcctgaaaattgatacatctcgtgtcggttattctacaccgattcggtctccggtgacgatcccgcccggtgtgagtccaagggaacttcttgagtcgccggtttttcttccgaacgccattgcacaaccttctcctaccactggcaaactgccatttttgatgcatagtaatgttaaaccatcgatccctaaaaaaactgaagatgaaacacgccatgatcgtgtattcttctttcaacccattttgggatctaagccaccaacttgtccagttgcagagaagggtttcagtgttaatcatcaaaaccagccttcagtgacggataatcaccaggagctcagtcttcagtctagctcaactgcagccaaggatttcacttcagcaactattgttaaacctaagacatctgattccatgttagacaatgatgatcacccttcccctgcaaatgatcaagaagagaatgcaacaaacaaaaatgaagagtattcttcagacctgatcattacccctgctgaggatggatataactggaggaaatatggacagaagcaagttaagaacagtgagcatcccagaagctactacaaatgcactttcacgaattgcgctgtcaagaaggtggagcgttctcaagatggccaaataacagagatagtctacaaaggttctcacaatcaccctttgccgccttccaaccgccgaccaaatgttcctttctcacacttcaatgatctgagagatgatcactctgagaaatttggttccaagtctggtcaggccacagcaacttcatgggagaatgccgcaaatggacacctccaagatgtcggtagtgaagttctgacaaaactgtctgcttctcttacgacaacagaacatgctgaaaaatctgttatggacaaacaagaagctgtggatatctcatcgacgctctccaatgaagaggatgatagggtaacgcatcgtgccccgctttctctgggctttgatgcgaacgatgactatgttgaacacaagagaagaaagatggatgtttatgccgctactagcactagcaccaacgccatcgacataggagctgtggcgtcaagagctatccgggagcctcgcgttgttgttcagaccacaagtgaggttgacatccttgatgatggttaccgttggcgcaagtatgggcagaaagttgtcaaaggaaacccaaatccaaggagctactacaagtgcactcatccgggttgctcggtgcgcaagcatgtggagcgatcatcgcatgatctgaaatccgtcatcacgacgtatgaaggaaagcacaaccatgaagttccagctgccaggaacagtggccacccaagctcaggctcagccgctgcaccacaggctaccaatggtcttcttcaccggagacctgaaccggcacaaggtggtggtggtggtagccttgctcagtttggctatggctcagctggtcacagaccagcagagcagtttggtgcagcagcagctggtttctcctttggaatgctgcctcgtagcattgcaactccggcgccgtctccggcgatcgccgtgccggcgatgcaggggtacccagggcttgtgctgccgagaggtgagatgaaggtgaacttgctgccacagtctgggaatgctggtgcagcagctagccagcagctgatgggcaggttgccaaagcagcatcctcagatgtaa

SEQ ID NO: 13141 - DNA, 1077 bp, Oryza sativa
  Clone ID: TFbOSC464j.C1.o1.fg
atggcgctgattgccactggtgctaccgctactgctactgcggcgccggtggctagcccggctgcttcttccatggcgtccgagctgatggcgcaggggcgggagtccgccgccgtcctggaagccctgctccatggcgcgtcgctcccgccggcgcacggcggtgcccacgccctcgccgccgagatccttcgctgctgcgaccgcgcgctcgccgcgttgcgcgccggcggcgatgccgaatcgtcgtcagccgacacgaagcgcaagccggcaaccgcccagccgtcgacgcgccggaggagaaggtatatatatatgtatgtctcctcccgttcttgcgatggcgcgcgcgatcgagcagcgactcagcaagagatcttttgcagagcgacggcgagcggcggcggagcggcggcggcggcggagccggcgagggtggagaaggcgcggacgtcggaggacggattcctgtggaggaagtacgggcagaaggagatcaagaacagcaagcacccgaggctctactaccggtgcagctacaaggacgaccatggctgcacggcgacgaagcaggtccagcagtcggaggaagacccttccctctacgtcatcacctacttcggcgaccacacctgcagctgccagacggccgccgccgccgccatggacgacgacgacgacgatgaaaactcgcagcatttcgtcatcaacttcgggccggccaccgcgagccgcagcggttcgccgcctctgctctacgacgacggcgacgacggcgatgtctggagggagacggcggccaccccaccgtcgtcgaggcagtccaggtgctcgccggagggagacggggaggaatccggggtgaagatgagcaaggaagagccagtggactcgtgtccggggccgtcagcggtgagttcgccggccgacgtcgtttcttgttcgtctccggcaatggagcccgatctgctgggctgcttgaactgggatgatgactttggagacagctcgttcgtcgacgccgatgagttcatgaatttcgatgagattgatctgtttcaaatctactcctag

SEQ ID NO: 13142 - DNA, 1320 bp, Oryza sativa
  Clone ID: TFbOSC400284j.C1.o39.fg
atggccgatcggcgccgcagcgacggcggcggcggcatgcagcagcagccgttcacgtcgccggggcaggagagggtgttcgacggcggcggtgttcctgggcaggtggcggcgccgtatgggagtgattttgatcagagctcttacatggcgcttctcgccgccggcgccgtcggcgtcggcgtcggggtccagccgacggcggcgccgtgggctgtcgaagaggacgtcgccgcggcgcctcctgggattagcttggcacctcagttctccatggcgaactatgcgccgccgccgtcgtaccaacaccctgcaaccctcgtctccccgccgctcgccgccggcctccacccctacccgccgtatctccacggagtcgacgcgccaccgccgcaatggcctccacgaccggcgccgccgcccagcttcagcgtcctcgacctcgccgccgcggctgctccgcacgagcagcgccacagcatgcaacagctgctcctccgcgccgcggcgttcggcggcggcatgcacgcggcggcggcgccggcgccggcggccgccgccgccatcgagcagccggcgaaggacgggtacaattggcgcaagtacgggcagaagcagctcaaggacgccgagtcgccgcggagctactacaagtgcacccgcgacggctgccccgtgaagaagatcgtcgagcgctcgtccgacggctgcatcaaggagatcacctacaagggccggcacagccacccccgtcccgtcgagccccgccgcggcggcgccgccagcagcagcagctccgccatggccgccggtactgatcacaatgccggcgccgccgcggacgacgccgccgccgccgacgaggacgaccccagcgatgacgacgacacgttgttgcacgaggacgacgacgacggcgaggaagggcatgacaggggtgtagatggcgaggtggggcaaagggtggtgaggaagcccaagatcatattgcagactcgcagcgaggttgatctgctcgacgacggctaccggtggcgcaagtacggccagaaagttgtcaagggcaacccacgaccaaggagctactacaagtgcacggcggacggctgcaacgtgcggaagcagatcgagagggcgtcggccgatcccaagtgcgtcctgacgacgtacaccggccgccacaaccacgacccgccggggaggccgcccgccgccgctaaccttcagatgcctggcccggcggccatgaggttggccggcggtggcacggctcatcagcaaccgagcggcggcgctcaccagatgaaagaggagacatag

SEQ ID NO: 13143 - DNA, 2445 bp, Oryza sativa
  Clone ID: TFbOSC401547j.C1.o17.fg
atggctgatcaaggattccgccccttctcagccttgatgtccgcgccatctactgcgcagcagcatgtgggttcttcattcagcacagcagtagttcaggtggccgcagcacagcagtcacacacagatcatggtaacatttgcctagctgatgatgatggctactattggaggatgaccggacagagtacaactcagggtgagtcgtctccaacgatattatcccactatcaatgtgcccaagcaaactgtgtggtccagaaaacagtggcatacactgcagatgttgaaacattttacaggggcagacacaatcatctacgacagtcagatagactggagccaatgtctcaagttggtgtgctagttgaggcatcagatgcagcaggggctgcggctggaccttcggtgcctgagacagaaaatggagatgatcaatcgtctggttcaagtgataggaatgaagacgatgctggtgatgtagaaatggacgaggatgcagctgctggtgatcccaatgcaatgcaaaggagaaaacttaagtccaaggtgtggaaggaatttaaacttgtgtttaaggatggaaagctccatactgccatatgtaatcattgtaaactcaggctcgttgcagagactagaaatggaaccagccacctacgccgacatctgaagatctgtcctgaaaaggctggaaccagcagggtgcagaaaaagcgaaggagttcaacttcgcagtcacagcctgatttacctgtttcagagaacttggaaaatggtcaagaaaatccttcacagaacttggaaaatggtcaagaaaatcctcttgaagagtttatgagggctacggtcctgaaactttgtcccttccctgccatgtaccgtgcaagctttgcgtcatttctggcgggtagaaatccagctccgaatatggttccacaaactacagttgaggacaagtttattagtgtttacgagaaggaaaaattgaagctgaaggagaaaataatagctacacctggcggagttttcctgtcagtgaataagtggtactctgggagttatgaaacaggaattgtttgtttaacagtgcactttattgatgaagagtggaagattaatagaaaaacaataagatgttgtctttcagaatcggatggtttagacttgaacttgttcccacactggcaatccgaaattgctaattatgaggatgatgacaagatggtgttgaagaaggtagttcgagattggtgtcttgagccgaagcttttaggagtgacattggagggatcagtggataagaaagccacaatatccttggaggatgaccttacgactggaaagaactaccttgttgccaaatgcaagctattaactatcccttgtatggtagatggcctcgatgatcttatgcaatacaccgttgggagagaggtgcgatcgatgtggtctcgttacatgacaaacactcccgagcgtaagctgaaatgtcaggaagttgtatcacagctgcagctagaccgtccctcttttggatcaaaataccggtacttaacattctattggtgtgaggctgctttgcagttcatcaaatcatttccactttcaaatggcagtgaacgtccatcattagatgatctggaagcaacagagaacttttgcaagattgcaagggcaatctatcatgcaacgaaagctttttatgaaccttataacttgacttttaattcatattttcatgtgatatggagcttaagagcaaccctacaagaattacctagaataaaaaacatagagagggttattaaagtgaagaatatgcaggagaaatttgataaccattggaagaagtggtacttgtggttgtcgatagctgtggttctagaccccagatataagctcgctttcattgaacttcgtttcagagaagcttttagtcaagatgctggaacctatatctctgaggtgcgtgcaaagttttatgagctctatattcagtactctcatgttaatgagcaaagtaatgagatactgaatcaaggcaacaatggttcaggtacacaaattagtgctccattacataaacagagaacgaattacaccatagcacaagctgcacttgaggaattcaaagagctttttgagtatcttggaggggggctctgtcctcaaaacgattcttttgatattctgaaatggtggaaggataattcagcagcgtacccatctcttgctaaaatggcacgggatattctagcaatacctggatgtgcagtttccgctgaatctgcattcaatgacgatagtgatcatcgggcagagctatttaacggaaaattgggccctgagacaactgaagcacttatctgtgctcaaagttggattattaaatcatctggaacagctgatgcagataatggaaataatatcacattatcttaa

SEQ ID NO: 13144 - DNA, 1659 bp, Oryza sativa
  Clone ID: TFbOSC401772j.C1.o3.fg
atggaggaggagctctgcggcaacaactgggacctcgacgccgtcgtccgcctcggctgctgccgacggaggatctctccggcggcggtggcgcagcaggtggatccgttcgcgtcgttcttgcagcagggggtggcgatggaggttgcggcggagaaggaggtcggggtggaggctgcgtggagcttcccggagctgacggtcagggacggcggcggcggcgggctcggccgcgacgccgacgagctcctcaaggcgttctgcgccgcctttccttcttcttcctcgtcgaagtcgtcgcctctgccgacgcctcctcctcctcctccgacgcagccgcagccagagcagcagaaaccggtgacggtgcaggagaatctaccggctccgacgacggctccggcgagggcgtcgcagccggcggcggcgaggcaggtgccagctggcggcgtgcctagatccaagaggaggaagaaccagcagaagaaggtggtgcggcacgtgccggcggacggcgtgtcggccgacgtgtgggcgtggcggaagtacggacagaagcccatcaagggctcaccctacccaagggggtactaccggtgcagtagctcgaaggggtgcccggcgaggaagcaggtggagaggagccgctccgaccccaacaccttcatcctcacctacaccggcgagcacaaccactcggcgcccacccaccgcaactcgctcgccggcaccacccgcaacaagctcccttcctcctccgccgcctccgccgcctccgcgcagccccagccgccgccgccgtcggtggtggtggtcggcgccgggggtggtggagccgaggcggcggggctctccccgaccacaccgctgcggacgccgtccatggaggaggacgaggaggaggaggaggaggaagagctgctcgtggaggacatggagatggccggcgaggacgagctcctcttcctcaacggcggcgacgacaacgccgcattggatggcacccccatcaggggtgctttgctcttcttggctcttcctttctctgttcaacaacctaacctttctgcatgtagctcccttgggatgtttgattgggatctcaattctcatcactcatcactcttcttgcatccccaactattgatggttggagacgacggcggcattgcggatgtagccagtctcggtgatggcaacgcgattacgaccgaagatgatggcggcggcgcggatccagtccgcggcgatggcggtggcggcggctgctcggatgcggtccgtggcggcggcagcggctcgaatgtggcccgcggcggtggcggctgcgctgttgctgcctctggcggcaatgactgcactgttgtggcctacgtcggcgtcggtggtgttagtctgggtggctggatctgggatccttcttcctctttgtctccgggcagtggcatccacgctgggtgtgccattcgggttgagctcaagctcctcagattcaatggagaactccgtggtgaagtttggttgagtccgtttctgtggaggcgaccgaaggggattaacggttcgtcaagcggtctgcatgctaaaggagacccaaggttgcaattgtcatggctttgccgctgctccctgtcgattcgcgccttctgcactgtctag

SEQ ID NO: 13145 - DNA, 1545 bp, Oryza sativa
  Clone ID: TFbOSC16302j.C1.o3.fg
atgccgccttgcgtgtggggatcgcacacacctctctctcttctctcccccccggccgcttgggcgggcgagaggatggagggcgaccaggccggcggcgacctcaccgacatcgtccgcgccgggggaggggccatgccggggagcgtcgtcgtcgacctcccgtcgacggccgccgagtggcagctcccggctgagccgatgctcttcccgccgccgccgtcgttgtcgtcgacgacggacggctgtggcgccgggggagcggcaggcgccgacatcttcggcggtggcggcggcgaccttttctccggcctcgtggacccgttcagcagcgactactcgtccggcgcggacttcttggacgccatgccggacgcgatggcgaaggtcggcttcgacacagctgtcggcggcggctgcggcggcggcggcggaggtggtggtgggagcggtggacacctgttagacatgagcaggaagcctctcttgcccagagggatgccgatggcggccgtcggtgggctggcggcgccgagggtgatgccatcgccgctgtcgccgcgagccatacggccgtacccgccgatctccgcaggcgacatgatgaagctcggcatcacggcagggcaggcggccgggtgcgccatcgacgccgccgtcgccggcatgcagatgtcgtcgccgcgctccggcgggatcaagcgcaggaagaaccaggcgaggaaggtggtgtgcatcccggcgccgacggcggcgggaggaagacccagtggtgaggtggtgccttctgatctctgggcttggaggaagtacggccagaagcctatcaagggctcaccctacccaagaggctattatagatgcagcagttcaaaaggttgctctgcaaggaagcaagtagagcgcagccgtactgacccaaacatgctcgtcatcacctacacctcggagcacaaccacccatggccgacccagcgcaacgccctcgccggctcaacccggtctcaccacagcaagaacagcggcggcggcggcggctcgggttccaagggctctcagaacgacaagtcacagcagcagccaagcgttaaagaagagcagaaggatcaggcgacgacggcgacgacgacgaccaccagcacaatcactaccacgaatagtgcttctcctgtggttgtgaaggaggaagaggcggcactggcaggatcgtcggaagcattggagttggagagagtcatggacactactgcagctggagtagtagaccacagtgagctcatggatcatgttttcagtgagagctacaagccgatgataccggagactggccagccggatgatttcttcgcagacctcgccgagttggagtcagatcccatgagcttaatcttctcgaaggagtacatggaagccaagccaagtggtggcgatcatgcccaggagaaggcaatggccaaggaattggatccattcgacatgctagactggtctactactactaactcttcggcagggagctcatttgagcaagggaagagaggctaa

SEQ ID NO: 13146 - DNA, 771 bp, Oryza sativa
  Clone ID: TFbOSC409885j.C1.o4.np
atacacagtaatcctacggatattaccttataatattgaatttaaacgcaggaagaaccaggctaggaaggtggtgtgcatcccagcgcctgcagcagcaggagggaggaccagtggggaggttgttccttccgatctctgggcttggaggaagtatggccagaagcctatcaaaggctctccttacccaagagggtactacagatgcagcagctcgaaaggatgctcggcgcgcaagcaggtggagcgcagccggaccgaccccaacatgctcgtcatcacctacacgtcggagcacaaccacccgtggccgacgcagcgcaacgcgctcgccggctccacgcggtctcatcacgccaagaacagcagcagcaacagcagcagcagcggcgcctcctcagcctccaagaacaactcctcccacagcggttaccaccaccaccaccaccagaagccactcgtcaaggcggaacccaacgatcaatccgccgccgccacgaccgccgccacggtgccggtgaaagaggaggccgccatggagcacagtgatctcatgcagcagatgttcagccagagctaccggccgatgataccggaggcagcggccggcggccaccacgacgacttcttcgccgacctcgccgagttggagtcagatcccatgagcctgatcttctccaaggatggtggtcatgctggcaatgagcggaggagggcgactagagagacatttgtcgatttttcacgtcggccgatgctggccaaggtacc

SEQ ID NO: 13147 - DNA, 1875 bp, Oryza sativa
  Clone ID: TFbOSC18107j.C1.o12.fg
atgatcaagggagactcaaagcagctagcttctatgtacatgaaagaggagatgatcaagggagagaggcagcttggaacccatgaagatcggttaaaagacgaggttataaaagatggcgataaaatttcagatggcaattttttcaagtccttgcaaaacatatcaagcacaaaggaggaggtgtgttcaccaggcccaatagaaagatcatgtatggactcatcattgctaaacatgaaagctcaaaataagggtcaggatgataagcttgaatcaacaagggcagaaatgggtgaagtacgagaagagaacgagaggctcaagacgttgctgtcgcgcatctcacacgactatagatctcttcagacgcacttctatgacgttcttcagcaaggccgagctaagaagctcccagactctccggccaccgacatcgaggagcctgaactcgtctctctgagacttggaacgagcacgagcaaatgcaagaaggaagacaagagtaccaccagtagcgaagtcaaagggagtactgaagattttctgaagatcaaaggaggtctctctcttggattatcagactgcagagttgatgctaataacagtgagaaggtacagccggatgtgatgacgttgagccctgaaggcagctttgaggatgctagggatgacaccgcagagaccacagagcaatggccaccaagcaaaatgctgaagaatttgaggagcgtcggcgcggaagccgaggatgacatagctcctcagccacaggtcaagaaggctagggtttcagtgagagcgagatgtgatgcgccaacgatgaatgatggatgccagtggagaaagtatgggcagaagattgcgaaggggaacccgtgcccgcgcgcctactaccggtgcaccgtggcagcaggatgcccagtcaggaagcaggtgcagcgatgcgcggatgacatgtccatcctcatcaccacctacgagggcacgcacaaccacccgctctccgtctccgccaccgccatggcctccaccacctccgccgccgcctccatgctcatctccggctcctcctccacctctctcgccgcctaccccgccgccgccgcgtcgccggccctcgcattcgacgcctcctccaagccgcccctcatcggcggccgcccgttcttcctcccgaccgccgccgccgccgccatcacctccaccccttcctaccccaccatcaccctcgacctcacctcgccggccgccgccgccacctcctcccacgccgccttctccctcagtaacaggttctcgcacaccaggtacccttccaccggcttcaccttctccggctccggcccgagtagcgcgccatggccggggtacttgagctacggggcgtcgctatccgctcacccgtacaacgccggcggcggcaagagctcgtcgtcgttcgaggctgcgctgagcagcatcaacggaagcaggcagcagggcggcggcggcggtggcggctcggcgccgccgctctaccagatgcagcagaaggcggcggcggcggcgccgccgccgccgagcgtgatcaccgacacgatcgcgaaggcgatcacggcggacccgagcttccacacggcgctggcggccgccatcacgtcgtacgtcggcaagaagggctcgccgccggcgtcgggaggagaggacagcaaggtcgggctcaagtggggggagcacctcgggctcgggctgacccactcgtcgctgtcgacggcggcggcggcggcggcgagctcgagcagccagatgttcttgcagccatcgctggggttatcaggatcgacgacgagtgcgtcgacgtctcctgtggcgaacagagagcaagcacattaa

SEQ ID NO: 13148 - DNA, 900 bp, Oryza sativa
  Clone ID: TFbOSC400831j.C1.o20.fg
atgtgtgacagcttgttttggcagtcgtcggccgaccaaggggacctctcggatgtggtgagggccagccttcagctgcagacggcgcctcgccatcaggctgcatcgccgccgtatgtgcacctcttaggaggaggaggaggaggaggagaagaccagcttgcagcagtgagccaacacgctgagcagcagcagcagagcatggtggatgcttctgcagcttgcgaccttctccatgcgctgttgccaccaccaccagtagtgcaggtgcagcagcagggagcgtcgaggacgaggacgacgattgaggaggacaccaccggcgacggcgaggagttatttgctggtgctcattatgtcgttccgcccatcaagcgaaggaagagccagacgaagaaggtggtgtgcatcccggcgggggcgagtggcggcggcggcggcgaggtggtgccgtcggacctgtgggcgtggaggaagtacgggcagaagcccatcaaggggtcgccctaccctcgcgggtactaccgctgcagcagctccaaaggttgctccgcccggaagcaggtggagcgcagccgcgccgaccccacaatgctcgtcgtcacctacacctccgaccacaaccatccatggccaacccaccgcaacgccctcgccggctccacccgcccctcctcctccaactcatccaacatacgcctccaagacagtactccagttcatcatcagagtcagactggccacgatcgtcttacgaccactcacctcaagcaggaggacgtgatcatctccccctccctgctgcagcccgaccaccatcagctgtgtaccattattgacaccaagcaccacctcttgtttcatcaagactatcctcacagcttcggcttgttcgactag

SEQ ID NO: 13149 - DNA, 429 bp, Oryza sativa
  Clone ID: TFbOSC900386j.C1.o14.fg
atgaataacagaggggccggaggagggagaggccaaggcgacgacgaggagccgacgccgacgccgccacctgcgccgccgccggagacagcgccatccactgtcggcggcggcggcgacggcgttcagctagtgatgcccgaggacgggtacgagtggaagaagtacgggcagaagttcatcaaaaacatccagaaaaacaggagctacttccggtgccgggaccagcggtgcggcgccaagaagaaggtggagtggcacccgcacgaccccggcctcaacctccgcgtcgtctacgacggcgcccaccaccacggctccccctcgtcggccgccggcgaaggaggcacctccgctgccgccgccgccaaccagtacgacctcagcacgcagtacttcggcggcgccggcgggccccgctcgcagtga

SEQ ID NO: 13150 - DNA, 798 bp, Oryza sativa
  Clone ID: TFbOSC401716j.C1.o1.fg
atggttaagaggagcgacaacatggacagctccagtgaatgttctagaggagcccataaaaggcttctgcaggacagtaggagctatgaccaggagaacgctatgaaaaaggtttgcatcggaacaagaactgagtacacatatgcaccatatcatgatgggtaccagtggagaaaatacgggcaaaagatgatccggggcaactccttcccaaggtgctactacaggtgcacgtaccatcaggaccatggctgtccagcgagcaagcacgtggagcagcacaactcggaggacccgcctttgttccgggtgatctacaccaacgagcacacatgcggcaccagcaattctgcctccgattacatggcttcctccatgcaaatccagcagattgccgacgcctccttgagaaaggcacaggcggcggaaagactgagaaaggcagaggtggaaacacctcgcctgatgcattctcctcctcctcgctgcagcggcggctacaacatggcgatgaaagaagagaaggatgtgatcgtctcctcgctgctcaccgtcatcagaggctgtcacattgcagaatcagctggtaataatagcgccgctgctttgccggtaaacaggccgccgccggcggtggccagaagcgaccattacagctgcagctatgcgatttcgcctgaattgttgccggcgtccgacgacctgacactggacttcatgctggattcagtactggatccccactgggtcgagcctctggatttggcttggctcaaagaatccacgcacactggttga

SEQ ID NO: 13151 - DNA, 5649 bp, Oryza sativa
  Clone ID: TFbOSC401547j.C1.o22.fg
atggacaatcaatcaggacaaccgcagtacggcatggctgatcatggatttcgccccttctcagcctcaatctcggcaccatctactgcacagcagcacacgggttcttcgtcgaacactgcagtaattcaggtggcaaccccgccatcccacacagattatggtaacatatacctagctgatgatggctaccattggaggatgtgtgggcagaacacaattcagggtgagccatgccagacgatattctactatcagtgtgcccaagcaaactgcatggtccagaaatcggtcgcacgctctgcagacggacagaccactcaaacattttctatgggcgttcataaccacccacagagggggccaacgccgccaagaagtccctccgtcgacccacccgtgccgttctcttcgccgtcatgctcaccccctcggtcgccggttgaatgcgcggagcgtggctgcgcctctctgtcgccggcgcgcgcaaaccccccttcggagttcgagcatgttccacctggcgacccggagctccgggtaaacagggagatctgtgtgctgccgttctcggccgcgatgagggagcgggaggcgcagctccggcgggcggtggtggcggtggtggttggggcggctcgtacgccgtccgcggcccaggtgcacgacgagctatgctcggagttctctctgtctcctcacagcttctcggtacgccgtttcttcccggaggatttcctcgtcaccttccagtccgacgaaatcttcgaccgtgttgcgcgccgccgctccatccctctcggtcagttccgtctcttggtcgcgccttggtcgaggcagctgcatgcgagggaggggtcgatgcttttccgggtgcggctgcacctggaagggatccccggtcacgcctgggatgaggcgacggcggctgcggtgctcggttcttcctgccgtatcatctcctgtgatccggtcagttcctcagccagtgacatggcggtcttcaagctctacgcttggacctccgaccctgcctccatcccgaaggagaaatggctgcgcattgtcgaggatggtggcccggttgtcacgccgcagggcacctgtgagcgctacctcgactacgtcgttctcatccacctcaccgccatggaggatcacatctcgccgccggagccgtacctccctttcgcgccgtccagcggtgattctggtcgccctagctcggacgactcggacgacggccctcctcgacggcacttcttccacacctccagaggtcgacgagatggttccccccctccgccgcagtccggtcagggctcgacaggcggcggtggaggcggtgggcacagggccgctccggtggcggtgatgccggcggagctctgttccggccgccttcttcggcgggctggggcgctggcgccggagaagcctgtccgggctgtggccggcgcggaggcggccatggcgcggcggaggaggcctcgtggtcggcgacgtcagcaaaaggtgctaaagtggaaaagcaagttcttaaagcttagccctgttcgcagctgttgcaggtggcagccacgaaaaggacaagacacttctgagccggtctcggtcgcaaaggcaaaggagagttctgctctgcaatctctgtctcttggctctgtggtggggcaggaggacagggagtttgtcttgcctgtgagcgcggcgtctgaggctgattcggcagtctcttcgaggagagacatggttgggctggccgcctctccagttgggttggaggcccaacaaggcggtttggtgctatcgactgtcgctgggccggctgttgagtcagctgggtctcggcctgaggtgcagtcacagcccagcccgctagcaatggaggaggcccaccatgacgcttctaccttccttcaagggtctgtttcagcccatgcagacccgttcctctcggtcgttctggcagcaaagccaagcatggcaatggcagcgccgggtgagtcagcgcttccgccgcctgactccgtgccagacgcgacacttggagtggaggctgtctctgctcctttggtgtgcccagaacagcatttggcggcgtcctcgacgccgttatcacaagttttctctccggtctcggctttgccgactgcctccgcggtggtcgtggtagctgagatcggggggccgtttcccgatgaggtcgttccggtagatgagatggccgcatctccgcctgctccatctactgccgtgttcgcagcggctgtggaggaggcttcagctccgccgccgacgcttatcaccttctccaggagagccaagaaagcaatccccccggcactgcttcccccaccagcccctcagcagccgccgcaaccagcgccgctgcagacgccgcgtcgcagtgtgcgtcaagcgcttcaagcgacacatggcgccccaactttctcccgctgccagtcagtgttagctaagaagatgggggagaaggatactgctgtcccagctgcgcctgcaccgactgtgtgtactatccagcagtacaacgagctgttcgagaaggagctgtctcaggatcagatgttggcgctggccgacctctttggcatttgtctaccgcctcctgccagcgcggtggaaaccaaactggatgctatctctgtaccgttggctacccaatttttgggtcctaatctagcagacttttgctacctgccctccattcagacaagaggaggagtgctcttggcctgggatcgtagcgtcgtttcttgcgattcgcattctctaggagaattctctcttacagcgcgcctctccttttgcgatgggaattcctgttggatcacggtcgtttacggtccacaacccgacgcagataaggtgcgttttctgcaggaacttagggacaccagaagcacccgtgatgggccgtggatggtcgttggtgacttcaacttgatttaccaagatcaggataaaaataactccaacctgaacagaaggatgatgggtcgcttccggcgggcgatcaatgacctggcgctgaacgaacttcatctgaatggacgctctttcacgtggtcgaatggatgggaacatccaacgttggagcgtcttgacagaatattcgttacttcggacctagaagagctcttcccacaaagtttcctcaaagctcttccttcggtgatttctgatcactgtccactgcttctttcaacactgccttctcttccggcgaaagggaggttccggtttgagaatttttggtgcaaattggaaggttttgaggaggtcgttcaggaagcatggtcggctgattgtagactgcaggatccaatctcccggttggacttcaaactaagatcaactggtcgtgctctccaaagctggagtgacaaaaaggtcggcaatgtaaagttgcaattggagatggcccgggaactcatcggcaggttcgatcgcatggaagaatcgcggggcctttccggccaagagcgttttcttcatcgcgaattgaaaaggaagtaccttgctcttgcctcccttgagcgaactatggcaagacaaaggtcgcgcatctcttggctgcgagaaggcgatgccaacacgagattttttcatcaacatgctgcctggcgacgacgaagaaattttgtgcagcaactggagcatggctcacaggtcgctactgcccctgacgagaaggctgcccttgcccacgacttctttgatggagttcttgggtcagtgagccaccgtaatttctcggtgaaccttgatttcttcgaatctaggggacagcatatcgaggagttggaagatcctttcaccgaggatgaggtgcggaaggcaattgctgacagcccgcatgacaaggcaccaggcccggacggcttctcgggcatgttctaccaccgctgctgggtcatcatcaaggacgacccttgcctggtacacagcttcgtgaagcttttcaccaaaattctctcacgccgtctctcgccgaagctagactctttggtcgccaaaaatcagagcgcttttatcaagaaacgctgcattcaagacaactttatgttagtgcggcaatcagcaaaatacctgcatgatcgtagaactccttcggtgctgttgaagctggacatcgctcaggcctttgactccatctcatggcagttcattctcgaagtgctggagcataaaggtttcggcgttcgatggcgctcgtggattgctatgctctttcggacagccagctcgcgagtgctcatcaatggtgagccgggttgcccgatcatacaccgaagaggggttcggcagggagatcccatctccccgatgatgttcatcctagcaatggatgtgttgagttctatccttgcgaaggccgagaatgttggcttgctgcgaccgttggggattcctttccgggtctcgctctatgcggacgacgtggtcgcatttatccgtccggcagtagaggagatccatgtggcgacggaggttctctccatcttcggtgaagcatctggccttcgaacaaactttgctaagtgttcggctcttccaatccaatgtaatgaggcagatcttcagatcctccatgacgagttaccatgccaggtcgcatccttcccatgcacatatttggggctccctctttccatctttcgtctgaaaaaagaggatttgcaaccgctgattgacaaaatcggtcgtcgactgcctttctggatgtctcatttgatgactcctatcggtcggaccaccatggtgaaagcagtactaagttctatccccatctacttgctcatggcaatcaatgcgcctaagtgggtaattaaaggaattgataagatccgtcgtggttttctttgggccgggaaggccacggcaaacggcggtgtctgtcgcgttgcgtgggctcgagtttgctcgcccatagagtatggtggtctaggcatcctcgatcttgagagattgggtatagccttgaggtcgcgatggctctggcaacaaagaacctcgtcggataagccgtggcaaggacttaacatcccagtttcacagaaggaacgcaaccttgtctcgatttctttggtttgctcagtgggcgatgggaagctggtacggttctgggaggattgttggctgcagggctcttcaattcggtcgctggcgcccgcagtctacgcagctgttcccgctcggttccggaacagacgaacggtagctgaggctttgcaagacaggaggtggattcgagacatctgtgcggcactggggattcaggcaatcctggaatatctcaagctttgggacattctgcgatcgattcagctaggtgaggaaccggacacgatctcttggcgttgggaaagctcggggtcctactccgctcgctcggcgtatcgtcttctcttcgcgggaagaaccagccttgagcacaagccaatttggaagtctctagcgcccccgcgctgtcggtactttctgtggctggtcgcactgaatcgttgttggacagcagatcgtcttcggagtcgaggactgtcacacccggctcgctgccctctttgtgatcaatgcgatgagacgattgatcacttattggttgcttgctcggagtctcgctag

SEQ ID NO: 13152 - DNA, 213 bp, Oryza sativa
  Clone ID: TFbOSC4096j.C1.o6.np
atggacgccgccgccgaccggacgtgggctgcgagatgccgggtccgtgaactgcatcgtctgcagctggtgacgcgaggccattgtcctcgcgtgcagactgcagagactattttcaggcacacaaggattgggaagaggcaagcaaaactatggataagggttagtgataccatggagattatatatggtggagatggaggtcctacttca

SEQ ID NO: 13153 - DNA, 678 bp, Oryza sativa
  Clone ID: TFbOSC900242j.C1.o3.fg
atggaaaatcacaaggatcacacctgcaaaattgcaaccactactttagtaatagtgccattgctattatctcttcaccagctatatctcttcttcctccacctgctgccatatgcttgtgtagtcagtgttgcagaaatgacaaagatgagcagcatgaaagctgatggcagtgtccccaagagaaggaggcaggatgttcagaaggttgtggtgtctttgaaagatcataaggttgagcaagggccacctgctgacagttggtcctggaggaaatatgggcagaaaccaatcaaaggatctcctcatccaagaggctactacaagtgcagcagttacaggggatgcccagccaggaagcaagtagacaagtgcaggaatgatgcatctctgctcatcatcacctacacctcagatcacaaccatgacaactatgctgctactactacaaattcagtccaagaacaggcacataatcctgacacaagtgatcctctcagcaatggcatgtcccttgctgaggtagtaacagttgcatcctccaagctgtccggtgaagaggagagctgtgacttctttgatgagcttgaggagctcccagtgtctgcatctcccttgccaagcttatctttcatggtccaagagtgcagcttctctgatgcaagaacactgttgtag

SEQ ID NO: 13154 - DNA, 950 bp, Oryza sativa
  Clone ID: TFbOSC418164j.C1.o6.np
ttctccaaccacggcctcctccaggacctggcccgggacggcgacgcctccttcgtgggcgccgccaccaccgcgccgggcctcccgctggtttgcgggccctaccgcgtccccttcctcctcaacctccccggcgccggacaccgcgtctccggcgagctctacgcgtattcacgtccagtgtcagtacttattaacataacaaaaatctacaagcggaaaactatttgatataataagaacatgctagcaataacaacagcttgcatagagagaactgacttttccaaagttcaaagtttctgatcatacaggctttcacttggctgcaacataaaggcaaaggtcagtccttaatgttcacatcatatagatagaagagaggaggtatattaaatattaactgtgggaaggaaccaaacacatgcatacatagcgctaatgatccacagtgttacctttgtggtgagctttttaacaccaagccctccagtcttgccatatactacaggaagaatgaggtgaagaaagtggtgtgcatcccggcgccgccagcgacgagtagccgtggaggtggaggagaggtgatcccgtctgatctatgggcatggaggaagtacggccagaaacccatcaaaggctctccttatccacggggttactacagatgcagcagctcaaagggatgtatggcgaggaagcaggtggagcgcagccgcagcgaccccaacatgctggtgatcacctacgcggcggagcacaaccacccatggccgatgcaacgtaatgtgctcgccggatatgcccgttctcatcacagtactcatgctactgcctccagcagccgccacaagcaacagcagcagcagcagaccaaccagctgcagcctgcactgatcacaagctcatggtcttcttcctcctccccattcaatctctacgccgacgtc

SEQ ID NO: 13155 - DNA, 431 bp, Oryza sativa
  Clone ID: TFbOSC418197j.C1.o1.np
gcatccttagcttcagtaagctcatcaatggatcataattttctgcatatatactacaggaagaatgaggtgaagaaagtggtgtgcatcccggcgccgccagcgacgagtagccgtggaggtggaggagaggtgatcccgtctgatctatgggcatggaggaagtacggccagaaacccatcaaaggctctccttatccacggggttactacagatgcagcagctcaaagggatgtatggcgaggaagcaggtggagcgcagccgcagcgaccccaacatgctggtgatcacctacgcggcggagcacaaccacccatggccgatgcaacgtaatgtgctcgccggatatgcccgttctcatcacagtactcatgctactgcctccagcagccgccacaagcaacagcagcagcagcagaccaaccagct

SEQ ID NO: 13156 - DNA, 1692 bp, Oryza sativa
  Clone ID: TFbOSC900002j.C1.o20.gm
atgagggaattgaaggaggtcgacgacgacgcggctcgaggaggacacggacgcgacgcgacagaaactagaaagagcgagcacgccactatggatatgatggaggaggaggctgccaacgccgccactgctcaagctgctgctgctggcgacctcgccgacgtcgtggcccgtgccaatgcacgcgcattcctcgtctccacccctcaccatcacccctcacctctgcatcctcttcctcctcctcccatgcctcaggcgcctcaccaatactatcccgccccccagatcaccatcccttaccaccaccaccaccacggagagcttcggcgccctaccaccatcgcttacaccgacgcacctgtgccgttcgagacggcggggccgccatccacggtcgtcgactcataccaccacctcacacccggcgacgccggctacgggatgccgcggccgcttgctctccagatctcccagcacgccctctgtggcggcggcgacgtggtgatgggcggcggaggcgcaggcgctgccgatgatggagaagaagccatcaggatctcgccactgacgccgtctgctcatcatcaaatgatgaaaaggaagaatgaggtgaagaaagtggtgtgcatcccggcgccgccagcgacgagtagccgtggaggtggaggagaggtgatcccgtctgatctatgggcatggaggaagtacggccagaaacccatcaaaggctctccttatccacggggttactacagatgcagcagctcaaagggatgtatggcgaggaagcaggtggagcgcagccgcagcgaccccaacatgctggtgatcacctacgcggcggagcacaaccacccatggccgatgcaacgtaatgtgctcgccggatatgcccgttctcatcacagtactcatgctactgcctccagcagccgccacaagcaacagcagcagcagcagaccaaccagctgcagcctgcactgatcacaagctcatcgtcttcttcctcctccccattcaatctctacgccgacgtcgtgctcggtggccaacaggccaacatgatgatgacgacggagggcgccggcgctggacttggcatccaaccttcagcagctgatgaggtctttgcagagctggaggagttggagcctgataatcctactatgatcaatgcaaacatgcaggtgtactccaccaccagcaggccaggggcgtccgtcgatactcgcacagggtgcacgaatatcgggacgcaactagatggttacaaggggacatggctcaagatgttcaaagcttcacggctcgcggtggaacgcgcgcacggggaggggctgaccggggtcggctcgacccggccgagctggcgcctacgtggcgcctacgtggctgccacgcgggctggcgggaggaagacgaaggcgccggccgcgaatggaccgcgggcggcggcggtttctccgggacgccttgcgacgatgaggggcgacggggcgtacaccgggatgacgagggagaataagagcgagcgagccaacggcttggattcgccggagggagtccgtcggcggcggattgcggcggcggcgcccggcggagggaaaagggggaaacggcgacgaggtcacgaggggccaattcccggcggcgagagcatctacgcggctacgggaatccgatgctag

SEQ ID NO: 13157 - DNA, 1878 bp, Oryza sativa
  Clone ID: TFbOSC413566j.C1.o5.fg
atggagtcctacgtgggtgtcaaggggaagaatgtcgtcgggggcggcgacgtcggcagggagatgccggtggcgccaccgtcgtcgtcgtcggcggcggtagggatggtggagttcccggcggcggcggcggggctggggtacgccgggatgacggcgaaggaggccgggggtggttaccaggagaggagggtggtggtcggcgagatggacttcttcaagacggcggagaagcgtggggagaggaaggagccgccgccggcgacggcgacggcggcggcgagtggacacgccggtgcctcgccggatgacctcagcctcaacaaggacgacctcaccatcaatatgggattgctcgtcggccggaggaggaacagcggcagcgaggaatccatcgtcgacgatggcggcgtctcctccaacgacgaggagcaccgcgaggccaaagctgcgctggcagtaaccaaagctgagattgggcggctgagtgaggagaacaagaggctcaagaacatgctgagcaacgtgaccacgaaatacaactctctccagatgcagttcgtcacactgatgcagcagaggagatcagtcctagccgctccgatccaccagcaagagctgcttgatccggagaagaaggagcaagaggggagccagcagcagcagcagcagctgatcccgaggcagttcatcagcctcggctccgcgtcgctgcagcccgacgtcgaggcgccgcactccgtcgtcgtcgtcggcggcgatgtctgcgcgccgtcgtcgagcaaccccgacgcggcggtgccggcgatgatgccgttgccgcatttcgaccaccacaaccaccaccaccccatccatggtggaagggagagggggagcagcccggcggaggccgaccaccaccgccaccatcagcaagagcagccgccgccgccgccgcagcagcagcagcagttgccgccgagctggcttcccgccgacaaggtgcccaggttcctccccggcaaggggcccgagcccgtcccggaggccgccaccatgcgcaaggcccgcgtctccgttcgagctcgctccgatgcacccatgatcagcgatgggtgccaatggaggaagtacgggcagaagatggcgaagggaaacccttgcccgcgcgcgtactaccggtgcaccatggccgccggctgcccggtgcggaagcaggtccagaggtgcgcggaggacaggacggtgctgataacgacgtacgaggggaaccacaaccacccgctgccgccggcggcgatggcgatggcgtcgaccacggcggcggcggcgtccatgctgctgtcgggctccatgccgagcgcggacggcagcctcatggccgggtccaacttcctggcgcgcgccgtgctgccgtgctcgtccaccgtcgccaccatctcggcgtcggcgccgttcccgacggtcacgctcgacctcacgcagacggcgccgccgccgccgccggcgtcgtcgacgcagccgcagccgccgcgcccggagcccgcgcagctccaggcggcgctcgccgaggccgcgcggccggtggcgctgccccagctgttcgggcagaagctctacgaccagtccaagctctccgccgtgcaggccgtggccggcaccaagggctccgacggcggcgcgctcgccgacacggtgaacgccgcgacggccgcgatcgcgtcggacccaaacttcaccgccgtgctcgccgccgcgctgacgtcgtacataggcagtagaagcggcagcggcggcgccggcgccggcgggagcagcggcacggtgcagccgctgatgagcggcggcggcgatagctgtagtagagacgacaagataggagagcaaaacagctaa

SEQ ID NO: 13158 - DNA, 1008 bp, Oryza sativa
  Clone ID: TFbOSC419984j.C1.o2.fg
atggcagttactgaatcagcttgtttgagttatgagcaagaagcggtggcagtgagggaggtggcgcaggtgtacgagctgatcaagacgcagcagcctctcctcctcgtacaccagcagccgcagcagctagcgcacggcctcctcaaccacgccctgcgagccctcaacgtcgccctctccgtcatgaaccaaccacatgcttcttcttctgctgctgctgctgccgttccggtgatgagcttgatcaaagcagaggcggcgactccagcgaacagtagttcccctgcagcagatgttgcagctgacaaccatgtcgttggaaagccaagaagatcatcatcggccgccaaaagaagaaggattaatggtgaggagtacaagtcgtcgtcatggtctcaattcacgcccgtgcctcatgaggatggctttcagtggagaaaatatggagagaagaagatccagggcactcacttcacaaggagctacttcaggtgtacgtatagagatgatagaggttgccaggccaccaagcaaatccaacaaaaggataagaacgacccacccatgttccaagtgacatacagcaacgaacacacctgcaccaccactaggcttattaacaacatcaataatcccgcagcattgcacaacttgacagccaatccaaatggtcaccatgattcagatgatgatgataccatcttcaccaagatgatcaagcaagaagaacaagctgcttggctgcctcctcctcctcctgctgatctagcaaccatttctaacaatttcgatgaaacgccaggattacatgtgtgccaagaggtgcctccttcttcttccaattcatctgtcatatctcactacgctgatgaattcgaccatcatcagatgttggagacgacggtgatggaggaagcattagggctaggagcagatctagatgatccttatttctacgatccaaaccttctcctcatctatgagagcctcatgaactgctactag

SEQ ID NO: 13159 - DNA, 798 bp, Oryza sativa
  Clone ID: TFbOSC400524j.C1.o2.fg
atgtcgtcggcgccggagacgttctcgctggaccacctctcgcagcatcagcagcagcagccgccgccgctcgccgagcaggagcagctctgctacgtgcactgcaacttctgcgacaccatcctcgcggtgggcgtgccgtgtagcagcctgttcaagacggtcaccgtgcggtgcggccactgcgccaacctgctctccgtcaacctccgcggcctcctgctcccggccgccgcctccaccgccaaccagctccccttcggccaggctctcctctcccccacctcaccgcacggcctccttgatgaggtgccgtcattccaagcgccggcgagcctaatgaccgaacaggcgagtcccaacgtgagcagcatcacgagcagcaacagcagctgtgctaacaacgcgccggcgacgtcgatggcgtcggcggccaacaaggctacccagcgagagccgcagcagccgaagaacgcgccgtcagccaacaggacttcagagaagcggcagagggttccctcggcatacaaccgattcatcaaagatgagatacaacgcatcaaggcaagcaatccggacatcacccacagggaggctttcagcgctgctgccaagaactgggcccatttcccacacatccattttggcctgatgccggaccagggcctgaagaagaccggcatacaaagccaggacggagctggggaatgcatgctcttcaaggacggtctctacgctgcagccgccgccgctgcagcagccacagcagcatctagcatgggtgtcactccattctaa

SEQ ID NO: 13160 - DNA, 822 bp, Oryza sativa
  Clone ID: TFbOSC400297j.C1.o6.fg
atgtcgtcgtcgtcctcgtcgtcggcgtcgtcggcggcggcggccgcgtttcggccggctgttgtgcagcgggagcagcaggtggtggaggagaaattccccgcggcggcggcggcgatgcgggagatggtcctcccgccggtggcggcggcggcggcggactccgagcaggagcagctctgctacgtgcactgccactactgcgacaccgtgctcgtcgtcagtgatctcagatcaaaccacgcacacttcctttccatttgtgttcatcttgctctcgactctcgagcttttcttgttcatccatggcggcgtgtgttgcaggatgagatatcgacggcgaactccccgacgcagctgctgctggagcagcacggcctcggcggcctcatggcgagcgcggcaagctgcaggaacaacaactccccggcggcggcggcggctccgccgccgccaacgtcgcaggggaaagcggcggcgaaagagccgtcgccccggacgaacaccgccgtcatcaacagacctccggagaagaggcagcgtgtgccatcggcgtacaaccgcttcatcaaggacgaaatccaacgcatcaaggctggcaatcccgacatctcgcacagggaggccttcagcgcggctgccaagaactgggcacactttccgcacatccactttggactgatgccggatcaccaggggctcaagaagaccagcctgcttcctcaggatcatcagagaaaggatgggctactaaaggaagggctttatgcagcggcagctgctgctgcggcggcggccaacatgggtgttgcaccgtactaa

SEQ ID NO: 13161 - DNA, 771 bp, Oryza sativa
  Clone ID: TFbOSC401780j.C1.o15.fg
atgtcgtcctcgtcctcgtcgtcggctgtcttcccactggaccacctcgcggcgccgtcccccaccgagcagctctgctacgtgcactgcaactgctgcgacaccatcctcgccgtcggcgtgccgtgcagcagcctgttcaagacggtgacggtgcggtgcggccactgcgccaacctgctctccgtcaacctccgcggcctcctgctccctgcgccggcgccggcgccggccaaccagctccacttcggcccttccttgctctcccccacctccccccatggcctcttggacgaggtggcgttccagacgccgagcctactgatggagcaggccgcgagcgccagcctgagcagcatcacgggccgcagcagcagcagctgcgccagcaacgcgccggcaatgcaaatgcctccggcgaagcctgtgcagcaagagcctgagctgccaaagaacgccccggcgtccgcgaacaggcctccggagaagcgtcagagagtcccatctgcgtacaaccggttcatcaaggatgagatccagcggatcaaggccggcaacccggacatcagccaccgggaggcgttcagtgcagccgcaaagaattgggcccatttccctcacatccattttggcctcatgccggatcaggggttcaagaagaccttcaagcctcaggatggttctgaagacattcttctcaaggatagcctgtatgctgcggcagccgccgccgccgctgcagccgcaaacatgggcgtcactccgttctag

SEQ ID NO: 13162 - DNA, 235 bp, Oryza sativa
  Clone ID: TFbOSC29392j.C1.o1.fg
ggaggaaatacagcgtatcaaagctgccaagccagatatccctcacagggaggccttcagcatggctgccaagaactgggcgaagtgcgacccccgctgctcatcgacggtttccacctccaacagcaaccccgagcccagagtagtagctgctcccattcctcatcaggagagggccaacgagcaggtggtcgagagcttcgacatcttcaagcagatggagcgcagcggctag

SEQ ID NO: 13163 - DNA, 585 bp, Oryza sativa
  Clone ID: TFbOSC400152j.C1.o13.fg
atggatctcgtgtcgccgtccgagcacctgtgctacgtgcgctgcacctactgcaacaccgtgctcgcggttggagtcccatgcaagaggctgatggacaccgtgaccgtgaaatgtggccactgcaacaacctctccttcctcagcccgcggccgccgatggtgcagccgctctccccaactgatcaccccttgggcccgtttcagggaccttgcactgactgcaggaggaaccagccgctgccgctggtctcgccgacatcaaatgagggtagcccaagagcacccttcgttgtgaagcccccagagaagaaacaccgcctcccatctgcttacaaccgcttcatgagggaggaaatacagcgtatcaaagctgccaagccagatatccctcacagggaggccttcagcatggctgccaagaactgggcgaagtgcgacccccgctgctcatcgacggtttccacctccaacagcaaccccgagcccagagtagtagctgctcccattcctcatcaggagagggccaacgagcaggtggtcgagagcttcgacatcttcaagcagatggagcgcagcggctag

SEQ ID NO: 13164 - DNA, 477 bp, Oryza sativa
  Clone ID: TFbOSC423581j.C1.o2.fg
atggctcaagcttctccaggcaaagagctagctaagctctcaaaagggagacacacttgggaaaaggtgaatgtgccaaacaattgttcctacaacattgtgactgttagatgtgggcattgcacaatggtgctctccatggatcttgctccttttcaccaagcacgcactgttcaagatcaccaggtacagaacagaggatttcaagcccctgagaaaagacagcgtgtcccatctgcatacaacagattcatcaattcaactattagggatgaatatacttatatattcaaaggcaggagaaaacctcaattaagaatggggttagtggaggagatacagaggattaaaaccagcaatcctgagattagccacagggaggcattcagtgctgctgcaaagaactgggctcatcttccccggctccattttggcctcagcgtcgccgacggcggcggcggcggcggcagcaactaa

SEQ ID NO: 13165 - DNA, 1014 bp, Oryza sativa
  Clone ID: TFbOSC400415j.C1.o6.fg
atgcgggtgcagtgcgacgtctgcgccgccgagccggccgcggtgctctgctgcgccgacgaggccgcgctctgctccgcctgcgaccgccgcgtccaccgcgccaaccgcctcgccagcaagcaccgccgcctcccgctcgtccacccgtcctcctcctcctccggcgacggtggcgccgccgccgcgccgctgtgcgacgtgtgcagggagaagaggggcctcgtgttctgcgtcgaggaccgcgccatcctgtgcgccgactgcgacgagcccatccactccgccaacgacctcaccgccaagcacacccgcttcctcctcgtcggcgccaagctctcccccgccgcgctcgccgaacagccgctcccgtcctccgactgcagctccgacgacgacgccgccgccgccgccaccgaggaggagtaccactcctccgccgcatccaccggcgccgcagtgagcgcgcctcttgacgcctccagcaacggcgccggtggcggaggaggagtaggagggagcagcatctccgactacctcaccaccatctgccccggctggcgcgtcgaggacctcctccccgacgacgacgccttcgccgccgccgccgcggtgagtactaccaacccatcgctccgccgtgttcttgctacgtctccatcgatgaagccgagactaacctacgattccttggagcagcaggcggggaaagagaaggacgagcgcgtgccgttcctcgacgccgacctgttcgacgtggtcgccggccggccggagaagaagggcggcgcgtgggcgccgcacgtgccgcacctgccggcgtggtgcctcgacgaggtgccggtcgtcgtcgccgcgtcggcggcgccagcggcgacacctgtaaaggcgaagcagggacacgtgcgggacagccactggagcgacagcgacgcgttcgccgtgccggagttctcgccgccgccgccgccggccaagagggcgcggcccagctcgcagttctggtgcttctga

SEQ ID NO: 13166 - DNA, 753 bp, Oryza sativa
  Clone ID: TFbOSC101266j.C1.o1.fg
atgaaggtgcagtgcgacgtgtgcgcggccgaggccgcctcggtcttctgctgcgccgacgaggccgcgctgtgcgacgcgtgcgaccgccgcgtccacagcgcgaacaagctcgccgggaagcaccgccgattctccctcctccaaccgttggcgtcgtcgtcgtccgcccagaagccaccgctctgcgacatctgtcaggagaagagggggttcttgttctgcaaggaggacagggcgatcctgtgccgggagtgcgacgtcacggtgcacaccacgagcgagctgacgaggcggcacggccggttcctcctcaccggcgtgcgcctctcgtcggcgccgatggactcccccgcgccgtcggaggaagaggaggaggaagcaggggaggactacagctgcagccccagcagcgtcgccggcaccgccgcggggagcgcgagcgacgggagcagcatctccgagtacctcaccaagacgctgcccggttggcacgtcgaggacttcctcgtcgacgaggccaccgccgcctcctcctcctcagacgggctatttcagggtgggctgctggctcagatcggtggggtgccggacggttacgcggcgtgggccggccgggagcagctgcacagtggcgtcgctgtcgccgccgacgagcgggccagccgcgagcggtgggtgccgcagatgaacgcggagtggggcgccggcagcaagcgacccagggcgtcgcctccctgcttgtactggtga

SEQ ID NO: 13167 - DNA, 1155 bp, Oryza sativa
  Clone ID: TFbOSC28112j.C1.o11.fg
atgctgaagttggagccggagttccccggcctgccgcagcggtgcgactcgtgccggtcggcgccgtgcgcgttctattgcctcgccgattcggcggcgctctgtgccacgtgcgacgctgacgtgcactccgtcaacccgctggcacgccgccaccgccgcgtaccaatgggcgtggtggctgcccccggcgccgggggagccttcgtcgtccgccctgcaggcggtgtcaactcctcctggccaatccgagagggcaggaggtgcgactacgacgatgacgacgccgacgccgctggggaggaagacgaagaggcgacgtcgtggcttctgttcgacccgctcaaggactcctcggatcaggggctgccgccgttcggcgacgcgctggtggccgacttcctcaacctcggcgggggcgccggggagaaggaggacgcgtcgtcgagcaaggactgcagcagcagccacgggaagagcagcgagggcagccacgagttcgccgtgcccggcgagcccgtaccggagcgccagggcttcggggcggtgagtatggacattaccgactacgacgcctccaatttcaggcgcgggtacagctttggcgcatcgctcggccacagcccgccagcgacgacgaagctcgtggcgcgcgcatcggtcgacgggcggagcactggcggcttggttgacgggcggagcaccggcgactcgcggggcggcggatccggcggaggcgactcgcggggcggcggatccggcggcgacgactcacggggcggtggatccggcggaggcgactcgcggggcggcagatccaacggcggcgactcgcgggggggcgtcgcccagcggcggcgactcgcggggcggcgcggtgcggcgagtccggcgacggtgacaaggagaaggggcgactcgtggggcggcgtcgcccgacgaatccaacggcggcgactagctttgcgaggcggcaggtctgattcgcaccggtggatggcagctcggcgacgaggtgcagtggctgggctctacggcagtgacccacctcctcgtcgaccttgggcctccctgtcgccggcgatggaggatgggcacgccggtgattttgattttttttttcaaaatctggattccaattttcttcttttttaa

SEQ ID NO: 13168 - DNA, 1098 bp, Oryza sativa
  Clone ID: TFbOSC900353j.C1.o17.fg
atgctgaagttggagccggagttccccggcctgccgcagcggtgcgactcgtgccggtcggcgccgtgcgcgttctattgcctcgccgattcggcggcgctctgtgccacgtgcgacgctgacgtgcactccgtcaacccgctggcacgccgccaccgccgcgtaccaatgggcgtggtggctgcccccggcgccgggggagccttcgtcgtccgccctgcaggcggtgtcaactcctcctggccaatccgagagggcaggaggtgcgactacgacgatgacgacgccgacgccgctggggaggaagacgaagaggcgacgtcgtggcttctgttcgacccgctcaaggactcctcggatcaggggctgccgccgttcggcgacgcgctggtggccgacttcctcaacctcggcgggggcgccggggagaaggaggacgcgtcgtcgagcaaggactgcagcagcagccacgggaagagcagcgagggcagccacgagttcgccgtgcccggcgagcccgtaccggagcgccagggcttcggggcggtgagtatggacattaccgactacgacgcctccaatttcaggcgcgggtacagctttggcgcatcgctcggccacagcccgccagcgacgacgaagctcgtggcgcgcgcatcggtcgacgggcggagcactggcggcttggttgacgggcggagcaccggcgactcgcggggcggcggatccggcggaggcgactcgcggggcggcggatccggcggcgacgactcacggggcggtggatccggcggaggcgactcgcggggcggcagatccaacggcggcgactcgcgggggggcgtcgcccagcggcggcgactcgcggggcggcgcggtgcggcgagtccggcgacggtgacaaggagaaggggcgactcgtggggcggcgtcgcccgacgaatccaacggcggcgactagctttgcgaggcggcagtaagtggatgattatggatgcttacactggaaatttgaaggactgggtgcttgccgtggtatatctgactggatgtagatgttgccaatatgaccggaggtccacacttgattgcccatga

SEQ ID NO: 13169 - DNA, 1383 bp, Oryza sativa
  Clone ID: TFbOSC401426j.C1.o7.fg
atggatacttttttcccccttatatgctttacagagaacatgcgcttacagtatcctggtaggatcccactgaattcaactgttgaacaaaaagccaggaaggtggctgttcttgtggcactcagtgctagtggaagtgctccagtactgtacaggaccatggatgctctttgtgatttctgcagggagcaaaggtcaatggtctattgccgatcagatgcagcatccttgtgcttgtcgtgtgatcgtaatgtgcattcagccaatgccctttcccgacgccatacaagaacccttctttgtgatcgttgtgttggacagcctgcagcagtccgttgtcttgaagagaacacctcactttgccaaaactgtgactggaatggacatggggcagcatcctcagctgctgggcataaaaggcagaccataaactgttactcggggtgcccatcgtcggcagagctctcgagaatctggtcctttagtatggatatcccaactgtagctgcggagccaaactgtgaggaaggaataaacatgatgagcattaatgacaatgacgtcaataaccattgtggtgctccagaagatggccgcttgttggatatagctagcacagcactcatgagtgatttacctacaggagacaagttcaaacctttaataggttcttcttcaggagatgggatgaatcttctgccacttaattcagatcagccagctgagccagtttcaacgacgcctaaggcaccctgtgtcacagacaaagatatgttcaatgatgggagcgtatatggagacttctgtgtggatgatgctgacctaacatttgagaattatgaagaattattcggtacctctcacgttcaaacagaacaactctttgatgatgctggaattgacagttattttgaaatgaaggatgtgccagcagatgaatctaatgagcagcccaaacctgtgcagccagaatgtagcaatgtcgcatctgttgattctgggatgtcaaacccagctgcaagggctgattccagccattgtattcctggtaggcaggctatatccaacatatccctttccttctctggtttgactggtgaaagcagtgctggatattttcaagattgtggggtatcgtcaatgatccttatgggtgagccaccctggcatcctcctggtcctgaaagttcatctgctggaggcagcagagataatgctcttacacggtacaaggagaagaagaagagaagaaaatttgacaagaagataaggtatgcttctcgtaaggctagggcagatgtgagaaaaagggtcaaaggacggtttgtaaaggctggcgaagcatatgactacgatccgctgagccaaacaagaagctactaa

SEQ ID NO: 13170 - DNA, 1347 bp, Oryza sativa
  Clone ID: TFbOSC401365j.C1.o4.fg
atgagcagcacggcgaaggcggcggccgccggggcggtgggtgccaagtcggcgcgggcgtgcgacggctgcctgcgccggcgggcgaggtggtactgcgcggcggacgacgcgttcctgtgccaggggtgcgacacgtcggtgcactccgcgaacccgctcgcgcggcgccacgagcggctgcggctgcggccgtcgtcgccgccgccgctggtgccgccgtcggggtcggggcggcgcgacgaggccgtccccgcggcgtggttcaagcgcaaggcgcggaccccgcggtcgcacgccgccaagagcgccgccgccttcgggcagctgctgtcgaggcggctcgtcgtcgttcccgaggcggcggctggtagtggaggggactcgccggaggagcggaaggacgagggggagatcgtggaggagcaggagcagctgctgtaccgcgtccccatctttgacccggccctctcggagttctgctcgccgcctcccctcgaggacgcggcggccgccgtgtcctgctgcaatgaggacggcgccgtcgagaacccgacgaagccgtccatgacgacgacgacggctacaacgccaccgctccagttcttccccgacggccaagccaatttcgggccgaccgacgccgagctgagggagttcgccgccgacatggaggccctcctcgggcgtggcctggacgacggcaacgacgaggactccttctgcatggagacgctggggctcatcgagccggtggacgacgacgccgggcgggtcaaggtggaggccgacggcgacgccgggatgaccctagcgtggtgccacgagctggacacggagacatcgtccggcgagatgctggacatcgacttcgactgcggctcacctcaggcggcgacgacacccgacgagaaggtcgggagcagcgggcccgccgccgccgacgacgacgcgcagctccagcagagcaacctcgccctcagcctcaactacgaggccatcatcgagagctgggggacctcgccgtggaccgacggcgagcggccgcacgtcaagctcgacgactcctggccccgcgattactcgggggtgtggatggcggcggcaggggtgttcgggcacggcggcgaggagcaggcgctgacgccgaggctggggatggacggcggcagggaggcgcgggtgtcgaggtacagggagaagcggcggacgcggctcttctccaagaagatccggtacgaggtgcgcaagctcaacgccgagaagcggccgcggatgaagggccgcttcgtcaagcgcgccgccgccgccgccaccgccgccgtcgccacggcgtgcgtcgcgtag

SEQ ID NO: 13171 - DNA, 1359 bp, Oryza sativa
  Clone ID: TFbOSC401751j.C1.o9.fg
atgagctgcagctcggagaaggcggccggggccgtgggcggcaaggcggcgcgcgcgtgcgacagctgcctgcggcggcgggcgcggtggtactgcgcggcggatgacgccttcctgtgccaggggtgcgacacgtcggtgcactcggccaacccgctcgccaggcggcacgagcgcctgcgcctgcgcgtctcgtcgcccccgccgctgacggcgcgggcgtcggtggaggaggaggcggcggcggcggtggggacgacgacgacgacgacgtcgaagagagagggcggcgtcacgccggcatggtcgaagcgcaaggcgcgcacccggcgcccgcaggtcaagagcgtcgggcagctgctctcgaggcggctcgtcgtgccggagatggcggtggagtcgtcggacgaacggaaggccgacgaagacggagctcacgaggagctcgaggggcagttgctgtaccgcgttccggtctttgacccctccctcgccgagttctgctcgccgcccccgatcgatgacgcggcggccgcatcctcatcgtgcttcaaggaggacgccgccgacggcgccgtggaagacgcaaagtatccggcagctgcggcgtcgtcgcccgtgcagcagctcccggatagctttgtcaacttcgaaccgacggacgccgagctgagggagttcgccgccgacatggaagccctactcggacaaggcctggacgacagcaacgagctgcaggactcgttctacatggagaccctagggctaataacgccgccggtagaagaatccggccgggtgaagatggagctcgacggcggtgttgcctccaacagcagggtatctctcccatcatgccgcgctcatccgaagccggaggacgtcgaatccgccgacgtgctggacatcgatttcaactgcacctcgccggacgaacagaagtcgtcggcgagcaacggcgccgcagccgattcgcagttcttccacaggagcctggatctcaggctcaactacgaggcgatcatcgagagctggggcaactcgccgtggaccgacggccggccgccgcacggccagctcgacgacttctggcccaacgaccaccattactcggggttgtgggctgcgggagggggcgggcatggcgcggaggtggggatgatgacggtgaggccgcggatggacggcccggggcgggaggcgcgggtgacgaggtacagggagaagcggcgtacgcggctgttctccaagaagatacggtacgaggtgcggaagctgaacgccgagaaacggccgcggatgaagggccggttcgtcaagcgcccctccgccgccgccgccccgtgcgccgtcacctag

SEQ ID NO: 13172 - DNA, 1074 bp, Oryza sativa
  Clone ID: TFbOSC401367j.C1.o31.fg
atgaaggtgctgtgctccgcgtgcgaggcggcggaggcgcgggtgctctgctgcgccgacgacgccgccctctgcgcgcgctgcgacctccacgtccacgccgccaaccgcctcgccggcaagcaccaccgcctccccctcctctcctcctcctcttcttcctcctctccctcccccccgacctgcgacatctgccaggacgcccacgcctacttcttctgcgtcgaggaccgcgccctcctctgccgcgcctgcgacgtcgccgtccacaccgccaacgccctcgtctccgcccaccgccgcttcctcctcaccggcgtccacgtcggccttgacgccgccgccgacgacgacgacaaacaccccccacaccccttgtcgtcgtcgctgccgcgcaacacggcaccgcccccgcagccgccgccgaagcgcagcccctcgccgatctacagcgatgacgacgtcatcgactgggccaccggtggccacgacatcggcatcaccggcaacctgcccgactggtcgctcgtcgacgagcagttcaacacccctgcgctgccgccggtggtgaccaagaccccgccgaagcgggcctcccgtggccccgtcacggccggcaccgccgcggcggtgttcggcaacctcgccggcggatcgccggactggccgctcaacgagttcttcggcttcgccgacttcagctccggcttcggcttcgccgagaacggcacgtccaaggcggacagcggcaagatcgggagcatggacggctcgccgaacggcggcaggtcgtcgtcgtcgtcctcctcctcctccgccgccgccgccggcggcggcggcggcggccaggacttcttcggccaggtgccggaagttcactgggccgtgccggagctcccctcgccgcccacggcgtcagggctccactggcaacgggacccgcgctacggtggcggcgccaccgacgccagcgcggtgttcgtgccggacatctcctcgccggagaaccccttccgttgcttcgccgccgccgccgccggtgaccataccatgaaacgccggaggagatgctaa

SEQ ID NO: 13173 - DNA, 831 bp, Oryza sativa
  unsure (1)..(831): unsure at all n locations
  Clone ID: TFbOSC419638j.C1.o6.fg
atggcaagcgacggcagcgcgagcccggccagctgcggcggcgcggcgtgcggggtgtgcggcggcgcggcgacggtgtactgcgcggcggacgcggcggcgctctgcgtgccgtgcgacgccgcggtgcacgcggccaacccgctggcgtcgcgccacgaccgcgtgccgctcgcggtcgccatggcggcggcgagctccggggtgggcaggggcaggggagccccaacgacagctcgtcgagcttcaccaacgacagcgccggcggcggcggcngcggcggcgccgaaaggagcctctttgacctgctctccgacgtcgacatcatgtcctgcggcggcggcggcctcgcgtcgtcgttcgacggcgccgccgcgccgncgctggggcttgcacccaggccagctcgccgcgttgacgccgtggtcaccggccgactccgtcgtcgtcccgacctcggcggccggcgcggtcgccgcggcggcggcggcgagggaggagagggtgaggcgctaccgggagaagcgcaagaaccgcaagttccagaagaccatccgctacgcctcacgcaaggcctacgccgaggcgcggccgaggatcaagggccgcttcgtcaagcgcgccaccaccgccgccgcctcctcgtcatcggacgacgacagcacggccgccgccggagtcagcggcgccggcggcgccggcgccgccgccacgaaggaggccaagttctggctctccttctccgacgacggccgcgccgacggcgtagggttctacatggacagcaccaccgctgccaccgcggcctacggcgtcgtgccaaccttctag

SEQ ID NO: 13174 - DNA, 999 bp, Oryza sativa
  Clone ID: TFbOSC401179j.C1.o19.fg
atggaggcggtggaggacaaggcgatggtgggagtgggaggagcggtggcggcggggtactcctcgtcgtcgtgggggttggggacgcgggcgtgcgactcgtgcggcggggaggcggcgcggctctactgccgcgcggacggggcgttcctgtgcgcccggtgcgacgcgcgggcgcacggcgccgggtcgcgccacgcgcgggtgtggctgtgcgaggtgtgcgagcacgcgcccgccgccgtcacgtgccgggcggacgccgcggcgctgtgcgccgcctgcgacgccgacatccactcggcgaacccgctcgcgcgcaggcacgagcgcctccccgtcgcgcccttcttcggcccgctcgccgacgcgccgcagcccttccccttctcccaggccgccgcggatgccgccgcggcgcgggaggaggatgcggatgatgaccggagcaacgaggccgaggcggcgtcgtggcttctccccgagcccgacgacaatagccacgaggatagcgccgcagccgccgacgcgttcttcgccgacaccggcgcgtacctcggcgtcgacctggacttcgcccggtccatggacggaatcaaggccatcggggtaccggtcgcgccgcccgagctggacctcaccgccggcagccttttctaccccgaacactccatggcccacagcttgtcgtcgtcggaggtcgcgatcgtaccggacgcgctgtcggcgggctcggcggcgccgcccatggtggtggtggtggcgagcaaggggaaggagagggaggcgcggctgatgcggtacagggagaagcgcaagaaccggcggttcgacaagaccatccggtacgcgtcccgcaaggcgtacgccgagacgcggccgcgcatcaagggccggttcgccaagcgcaccgccgacgccgacgacgacgacgaggcgccatgctcgccggcgttctccgccctcgccgcgtcggacggcgtcgtgccgtcgttctga

SEQ ID NO: 13175 - DNA, 1143 bp, Oryza sativa
  Clone ID: TFbOSC411062j.C1.o12.fg
atggcgcgggatgacgacccggccaagaaattagctgtggatggcggcgtcgcggcggcggcgcggtgctgtgacttctgcggcggcttgccggcggtggtgtactgccgcgccgactcggcgaggctgtgcctgccgtgcgaccgccacgtccacgccgccaacacggtgtccacgcgccacgcccgtgcgccgctctgctccgcctgccgcgccgcgcccgccgccgccttccaccgcggcgacggcttcctctgctccagctgcgacttcgacgagaggctccgccgcggcagcatcggcggcggcggtgacgagctgccgctcgacgaccgcgccgccgtggaagggtacacgggttgcccgtcgatcggggagctcgcggcgatcctcggtgtcgtcggcggcgattccgacaagccggccgacgacggctggtggtccgcgagctgggaggaggaggcgccacaggtgctgagcctggatgacatcatcgtgccgaccacctcctgccatggcctccgacctctcctcacaccaccctcccctgagaatcagagttcgccggacaacggggagctggacggcgaggttgtccggcagctaggggagcttgccaggtcagaggcggcggcgcaggccacctttgtagccggcgatcagctggcttcatgggcatcaccggagttcacttctgggcatggtgattttggcattgaggcagcaagcactacagtaccttcttgtgagaatgaaacatggatcatgtcaaccgattgcactgaccctaccgatgcaagcaagacggacatcgcacgcgaggaggctccagcaagctcatctgccgagccatgcctctcttcgctcgtcgagatttcagagatttgccgcagcatgagctacagcggcagtggcatcgacaatggcggccatgatccatcaaccctggcaataatgccaacgcaagctctgcccaagaagggagtctatgacatcgcctaccctgacaggggcacggtgatttcgcgctacaaggagaagaggaagaacagaagattcgacaagcagatccggtacgaatcgcgcaaggctcgtgccgatggcagattgaggatcaagggacgcttcgcgaagtcgaactag

SEQ ID NO: 13176 - DNA, 1083 bp, Oryza sativa
  Clone ID: TFbOSC415950j.C1.o4.fg
atgaagatccagtgcaacgcgtgcggcgcggcggaggcgcgggtgctgtgctgcgccgacgaggcagcgctctgcacggcgtgcgacgaggaggtgcacgccgccaacaagctcgccgggaagcaccagcgggtgccgctgctctccgacgacggcggcgccgcgcccgccgccgccgccccggccgtgcccaagtgcgacatctgccaggaggcttctggatacttcttctgcctggaggaccgtgcacttctttgcagagattgtgatgtttctatacacacagtaaactcctttgtttcagtacaccaaagattcctactaacaggtgttcaagttggccttgatcctgctgatccagttccacctgttgctgacaagcatgttaagagtgctggtggttcagtggattcagcaactaaacatttgcaaaggaatcctacagacttatctggtgaaaacagtgcatctttgcccagccaaaatgtaatcaatggtaattattctaggcagagttctgttacaatggccaagacaggacaggtcaattggactatgagcaacaacacaattagatcaatagaccctccacccaagtattcatcagaggaaagtccagcacttctgctagctagccacactagcaccatggcagcgtactccagtcaaatcagtaaggatagtgatcggatctacaacttaccattcacaggtggtaatgggtcagatagtctacatgattggcatgttgatgagttctttagtaactcagaatttggctttgctgagcatggttcttctaagggtgacaacgctaagccagggagtgctggtggatctccgcagtgccgtctggctgaaggcctgtttgtcgaaggacttctaggtcaagtgcctgacaatccatggacagtgcctgaggtcccctcgccaccgacagcctctggtctctattggcaaaataatttgctttgcccttcgtacgacagcaccatgttcgtccctgagatttcctccttggagaactctcagaacaacttcactgtatctgctggtttgaagcgccgaaggaggcagttttga

SEQ ID NO: 13177 - DNA, 1515 bp, Oryza sativa
  Clone ID: TFbOSC400903j.C1.o13.np
atggacagtagccgagattctgaagaagaaaggcctcaaaggaaggacaatggcgaagaaactgaaaatggggaagatggtggaaatgctttgagcctcaaggatgttgccaatgagcttcttggttgtgttgtccataggcaaaagatggaggcggagtggcatatcccgtcttctccaccgaatccaaaatccgcctcccgtctcctcccctccctatccatcaccacccctcgcccaactccaaaccaaacaccttgtgggcgcgacctcgccgcgctcgccatgccgcctcccctctccttcctccacctcgccgccaaccccacccccctccacgcctcgccgcttcgccgcgcccgcctccgccaccgcctctccctccgcacggaccacccgtcccggcgcgccgtggcgtcggcgtcggcgtcggcgggcgagaacccgtccaccccggggggtcctatagccgacgtcgagatggtccgtggcaaggacggcgtgtggacggcgcggccgccgacggtggtggtgctgtgggacctcgacaacaagcccccgcgcgggccgccgttcccggccgccaccgcgctccgcgacgcggcgtccctcctcggccgcgtcgtgtccgtctcggccttcgccaaccgccacgccttctcccacgtccccgcctgggtcgccgacgagcgccgggagcgccgcgccatggaccgcgccgagcgcgccggcgccgcgtccccgcccgtcccttactcctgcgccgtgtgcggccgccgcttccccacccgccccgacctcacccgccacttccgccagctccaccagcgcgagcgcaacaagaagctctcgcgcctccgctccctcaagggcaagaagcggcagaagttccgcgagcgcttcatctccgggaacaccaagtacgacgacgccgcgcgggagctcctcacccccaaggtcgggtacggcctcgccgccgagctccgccgcgccggcgtccacgtccgcaccgtctccgacaagccgcaggcggccgatcacgcgctcaagcgccaggtgaagcattccgtggcctgcggcgttgactggctcgtgctcgtctccgatgactccgatttcaccgacactgtgcggaaagcgcgcgccgccgacttgagaacggtcgtggttggcgatggttgccgtgctcttggaagtgtggctgacatttggttgccatgggaccgcgtcgagaatggggaggttgatgaggacatgctgcggaatgggacacatatgggattcagagatgaagaggaagatgagcaagatgatgatgagttcatagtggattgggatacgagtgatttggatggtgttgtcgatgacattgtcgcgacgaggaccaagttgttcggtgctacaacgatgtctgcatttgctgatgaggaaattatggatggcatattgggtgttgggataaatggcggtgacatgttatggagtagcgacgacgaggatgaggatggttatttt

SEQ ID NO: 13178 - DNA, 675 bp, Oryza sativa
  Clone ID: TFbOSC402699j.C1.o3.fg
atggcgatggcatttttgggacaaagtcgtttgtacgatggcatttcttggaactcacacttgtcgatggcatttctggtcccacctgtcagcgtggccacgtcagcaccctctctctctcttccccctcctctcccttcctcatctctctctctctcactcttctcggcaagccggccggtggctggggcgaaggccgccagggtgaggcggcggcggcaggtcgcgaatggcgagacggaagcgctccacgccgcggtgctcaaggaggaggagcagcagcacgaggtggaggaggcggcggtcgtgacgagcagcagcgccacaagcggggaggagggcgggcacctaccgcaggggtgggcgaagcggaagaggtcgcgccgccagcgatcggaggaggagaacctcgcgctctgccttctcatgctcgccctcggcggccaccaccgcgtccaggcgccgcctcctctctcggcgccggtaggtgcggagttcaagtgctccgtctgcggcaggtccttcagctcctaccaggcgctcggcggccacaagacgagccaccggttcaagctgcctactccgcccgcatctcccgtcttggctcctgcctcctccgaggtccagagccccctcgccttctcaccgcgtaattcagcagctgcacggatctga

SEQ ID NO: 13179 - DNA, 2142 bp, Oryza sativa
  Clone ID: TFbOSC100644j.C1.o16.gm
atgtcccgctatcacctcgacgcggcagctggaggagccttcttctctaaaatggttcaaggagccgttgaactaatagagaagatggtctccaatatgggttggaacgaggaacgacttcagatgcgtcagcgaggcatgcacaccgtcaaggagtcggagttacttgctgccaagctggacctcctcatgaaatgcttggacgaccacgagaaacggccacaaggcaccgtcaaggccttggactctcacgtcacatgtgaggtctgcggcaacacaggtcattctgggaatgactacccggaaacccgtgaggaggcgatgtacatgggcaacaacaatgggtatcgttcacaaggaggaactaacgggatatcaaaacaagcgccatctagtgactcggctgacaaagaggttcagccagagaagaccgtgccgcaggaatactgcgacacacggttgctgccgtttccccaacggtgtaggaaaccgtcagtggacgagcaattcgctcgttttgttgaagtaatccagaagatccatatcaacgtgtcgttgttggatgctatgcaagtaccaacatacacccgttatctcaaggacatagtcaacaacaagagaccgctcccaacaacagaggtggtcaagcaatgcagcaacgtgatactccacaagctcccggagaagaagaaaaatcagggcatcatgccgaaagacgtcttcgatagactcaacttcacagtgttggcaccaacaccgatgcgccttcaactggctgattcgtcagtccgttacccggcagggatagcggaggatgtgtcagtcaagacacgggatttctttatcccggttgacttcgtggtgctggacatggacacgggaaaagagacgccgctcatcctggggcgcccgttccacgtcaacggcaaggaagagaagtttgagtttcaaccgaggacggaacaatactccatgaatttcatggagaaggaaacaactatgcctaagaaccgttattggaagatgccggtagaaccacccatactggccaagaaactagagcagccggctcagaagaagccgccatccgcaccaaaaccaaagaaggtgtggaggaagaagccaaagacgcccactccatcacctccggagacggatgttttgatggaagacgccgaagctccgcgacgactcctgaacgacaccgacctcgaccttgtcagtgatcggaagagacaagcctactacatgctgagcgaccgggagtatgctcacacgcgagaatactcaccggagctgctgaaaaagataggtggaacatatagggagacgcgcaacatgataaggaacgaacaagaaagttcatcatcctcaacacccgtgcagatgtatgaggcagcaaggtactggatcttggccaggaggaagctgggagatcagaaggcgcctctcttccccacccctcacatcaccatcggcgccggcggcagctccacctcctactacgagtcatgggaggaacgtgccttcgcggaagactccgcagggcatctcgggggctgcatctggccgccgaggtcctactcctgcagcttctgcggccgtgagttccggtcggcgcaggcgctgggcgggcacatgaacgtccaccggagggaccgggcaaggctcaagctctctggggttgtggaggacggcaccggcggcgaaagccacggcatgccgccaaaccaaaactacatgatacaaccatgccctccccaaattggcaccctgcagcacgcctacagcccaaaccctagaagtggcagtattctcgctgctgacactaaccctaattccatatgtgatgttgtcgcgtaccctgctagatccttgcttcaagttgcagctgctagaactgccttgggcaaacaagtcctgaacgcccctcttgtctcatcgaagtcgccgtcggctggtagagaacatggtaagagggagacgttgtttcttggtgctgttcgattggcacaggatcatgacacgcaagatggtggtgatgaccaacatcatgaaaagatactaaaactttatcgtagctcctcggttgaagaactagatcttgagcttagactcggggaagccccaaaagaacagtag

SEQ ID NO: 13180 - DNA, 947 bp, Oryza sativa
  Clone ID: TFbOSC102397j.C1.o1.fg
caaggtactggatcttggccaggaggaagctgggagatcagaaggcgcctctcttccccacccctcacatcaccatcggcgccggcggcagctccacctcctactacgagtcatgggaggaacgtgccttcgcggaagactccgcagggcatctcgggggctgcatctggccgccgaggtcctactcctgcagcttctgcggccgtgagttccggtcggcgcaggcgctgggcgggcacatgaacgtccaccggagggaccgggcaaggctcaagctctctggggttgtggaggacggcaccggcggcgaaagccacggcatgccgccaaaccaaaagtacatgatacaaccatgccctccccaaattggcaccctgcagcacgcctacagcccaaaccctagaagtggcagtattctcgctgctgacactaaccctaattccatatgtgatgttgtcgcgtaccctgctagatccttgcttcaagttgcagctgctagaactgccttgggcaaacaagtcctgaacgcccctcttgtctcatcgaagtcgccgtcggctggtagagaacatggtaagagggagacgttgtttcttggtgctgttcgattggcacaggatcatgacacggtgagttctaatcttgacctgcgtgttgggaaaaatgaattgaagataactactgttttggggtgccgatcaagaagggactttatgtacgataacgaccgcgcggatgatgaaaagactgttgaagcaagtcacaagaaaagaagaatcgatttggaggtaaaccccctgattctaacttcttcaaccagtaatcatcaacagcaagatggtggtgatgaccaacatcatgaaaagatactaaaactttatcgtagctcctcggttgaagaactagatcttgagcttagactcggggaagccccaaaagaacagtag

SEQ ID NO: 13181 - DNA, 312 bp, Oryza sativa
  Clone ID: TFbOSC416211j.C1.o3.fg
atggacggcgagggggcgccggcgaggcgggcgccggcggcgtcctactacgagtgcaccttctgcaagaggggcttcaccaacgcgcaggcgctcgggggccacatgaacatccaccgcaaggaccggagcgccggcggcaagtcgcagggcggcggccagcaccacgaaggcggcggcagcggcagcggtggcggcggcggccagcagcacggcagagatgtccacctgggcctcaccctggggaggaacgaggaagagagggacggcgtcgacctggagctcaggcttggccatgcccactatccttga

SEQ ID NO: 13182 - DNA, 390 bp, Oryza sativa
  Clone ID: TFbOSC900062j.C1.o12.fg
atggatcggtacaacggcggcggcggcggcggcgaggagggggatgagcagctggacctcaacctgtcgctgcagccgtcgcaggcgaacgagccgccggggtacttcacctgcacctactgcgacaagaagttctactcgtcgcaggcgctgggcggccaccagaacgcccacaagttcgagcgcagcgtcgccaagcgcacccgggagctcgccgcggcgcgccgccagcaggccgccgacgaggaggcgcggcgaggggcagggaccaccaccaccagggagcccacgggcaatgcctcgtcgtcgtaccagagggcgtcgccgccggcggaggctcgccgccgggacctcctcaccgacgacatcgacctgtccctgaagctatga

SEQ ID NO: 13183 - DNA, 1251 bp, Oryza sativa
  Clone ID: TFbOSC400899j.C1.o35.fg
atggccccttcccggatctcctcatcggagtcggagcgccctgttgggagctatcgcttccacatcccccgccaaccaccacgcatccaagctgagggaggcaagcgccacatgatcataggtgaccgccgccatgggggcactgcactttggcgccgtggctcgatgttgccgccttcacttcctcgttggggtgtggaagatggccatgggcatgtggatggaagcagcaggcaacatccatcggaattgggcttctcctctgccctttcagtgccgataggcgggtggatctggaggttggcggctgcacaagctcatggggaagtgattgatggtggccgatgtgaagatgaagctggcgatcacatgcagccacctccagcatcctctgcttctatggcaatgttgtccgaagagcggatctcagcctcaggaattgtggtgcgagaacggcagctgcatggatacggggagcggcccttccagccatgtttggcaaccatggcagcaaaggggacagcaagagagatctcaactaagaaaattgccaagaaggatcatggggaagtgggtgatctcactatggctgtgctgatgcccagctggacctccactggcaaccacagcagtaggaaccccacccgatgcctggaacagttaccggagccgtcgaagcgggctcacagcgaggcgtatggcaacatgcagctggctactggggacctcatcgttggcctccacaagcaggccaccatcactgtccccccacccaacatttctgagattggtggtcatctgactgcacacaagaataatgagatgactatgggcaagggagtgcagcacaccatagatgtctccgttgccaaggaggcaacccgctcattggtcagcagtgccaggcagagcaggagagggccatatgagtgccgcaagtgtggaacgatgttcagcagtggacaagcacttggttggcacatgaagagtcacaactcagacgagcgatggggtgacaagagggttcccagtgcctttgttggatcatttttatcccttatcactccaatagatgtcagtaatgtttctgttcctagcagccgcaaccctcatacatcctccatccccaacaaagaggaggggagggtgctggtgatgggggctgcacctctcaacggcgtacccaagggtagtttccgtctctttggtgaaaacattgctgaagctcccaaggaagaaccaatggagtag

SEQ ID NO: 13184 - DNA, 645 bp, Oryza sativa
  Clone ID: TFbOSC20529j.C1.o3.np
ggctaggagccctcagattgatatctgtggttcgaataagaccttgggctggcaccctagtgttaggtgatcatttggacagagagctgttcgcggtagcgtagcgaccaccataaccataggcgatgggaagacaacaggcttctagagcactcgcattgattgcgccggcaatctacacagcctccataagcaagaatagatctgtctgtgaggccctcctctccaacaagtgggtcagagagacatccagttgtaccatatcacgacgagagagcatctttgctgatacgtcgagctttggaccttgatatgcaatgctctcctgctagctagggcaacaacgcgacaacatcgtctggaaactcaccacaaatagggaatacaaggcaaaatcagcttaccagctcctattcctgggggcggcaaggtcaactttcaatgagacaatatggaaatgatgggcatcgccgaagtgcaagttcttcacatggctggtcatacaaagcagagtctggacagcaaacaggctaaaaaaagttggacaaatcagcaaatatgcccctctactacaccacacaggaaatggcattgcacctctttgcacgttatagactctcctgccgaatctgggtagtgattcag

SEQ ID NO: 13185 - DNA, 738 bp, Oryza sativa
  Clone ID: TFbOSC900003j.C1.o8.fg
atggaggagcaaagaggcgaggaggagtgggtgatgtggggatcggcagggagaagacgaatcatcaggcaatcggcgtcgtgggaggagcaggcgttcgcgcgcgatgcggcggccaacgccaacctcggcggctgcgtgtggccgccgcgcttctacacgtgcagcttctgccagcgcgagttccggtcggcgcaggcgctcggcggccacatgaacgtgcaccgccgcgaccgggctcgtctccgacagaggcagacctcctcctcctcctcccccagccaccaagaagaagaagctgaagcaccccaagatcagcaagctggcccttactatacctctttctctaaacctagcaccacctccaccgataatactacttgcagtaacgacatactactgctagcaagagatcaagaaaccatcaagaagagggtaccgagacagcaagtacaagtagttgcagatcaggacgaggacgaaccggccgggagaaggtacaagaggaggaggcttggtttggtggatcagctgccgtcgtcatgtgaaggaggagatcatcatcatcaggtactgatcatcacaccaacaacagccgccgcaagccctagctctataattgcttctgcttctgcccttgtggttggggatcagcagcatcaacaagcaggatcagtactagatctagagcttaggcttgggactagtactcctcctaaagctgttgtgcacgcttaa

SEQ ID NO: 13186 - DNA, 1332 bp, Oryza sativa
  Clone ID: TFbOSC33060j.C1.o2.gm
atgaggtcgaaggccataagatcaggtgtccctctgacctcgggaaggctggatctgcgattcttagggcagcggaccatgcttaggagtagagccagaatgcaacgccattggtgctcaacaacggtggtggagatgacactggcgaggctcttggggataaaggagtcgacaccggtcattactaacgtgttaaaaaatactctcatcacagatgagtacctcatccgtgacggcgatgtgtggccgccggcgacgaagcggccccgcacgggcgggcgccgcggcgttggccacggaggtggaggcggggaagggcgccgcggcggtggccgcggaggtggagccgtggaggcggggtcgagcaccgtggagctggactcggagccccggcctgctctcgcgccgcatcctccctttctcagcgtcgggagcgtcgtcgtcgtcgtcgggcggcttgcgagcaaggcgggcagcgacctcgctctcgcgtgcggcgtcggcgtcgtcttcatcctccgcagcgagctcccaggcgacgaggctgctcatcacccggaggcgctcggcgtcgccgcgacgaggctgctcatcaccctatcagcgcacatggggcacaccatcgccgagaggctctgcaagacgcagggccagccgaggagcgccggcttgtcgccgcgggctggggatgagagccaacgccagcggaggaggcgtacgaggggcggagggccgcgctgctgcgggcggtggtcgtgggcgcgacatgtgaaaggattttttagctcgccattaaggaataaacgcgctgctctcactgtcgtcacccgcgtggccacgtcgatggcaccgacgtcgtcgtcgacgccggcgggcagcagggcgctggcggcggagggggtgttcgagtgcaagacgtgcaacaagtcgttcccgtcgctccaggggctgggcgggcaccggacaagccacacgcggctgcaggcgaagctgctgagcgaccccgccgccgcagcggccgagagggacagggcacgcatccacgagggcgagacgggcacgacgaccgtcgtgctcacggccgccgacgtcgacgactcgggcggcgccaccgtgccgcagccgccggaggccatgctggacctgaactacccgccgccagtggcagttcctccctcgccggccgctgcccgcgcccgccgctcggccgcgcccatctgctctctgccagccgcctgtgcttccgctgcggccctgcctgcctgcctcttgaaccgcgtggcgccgccgccgccgccgggattcacaaaaccaacggagcatacggactag

SEQ ID NO: 13187 - DNA, 954 bp, Oryza sativa
  Clone ID: TFbOSC400622j.C1.o29.fg
atgtcactggcgtccacgtcgtcgacggagatcgagatggatgagaagaaggagatgacgaagaagacggagcaggagaagacgctgacgtcgtacgtgttgcgcgagaatcccaagaggagctacaaggtgagcgccggtgaattctccggtggtggtggtggtggtggtggcggcggcgagtcgtcggtcgtgcaggacggcgagagcgacacggagtcgtccccgccgcgcggcggagcggggtcgttcttcgccgtgagccggaggcggtcgaagcgggcgcggcggcggcgtcgcgcgccggatcccgaaccggcgagcagcgtctccgacgcgacgacggaggaggacgtggccatgtcgctcttgatgctgtctcgggactcgtggacgcgttccagatccgagcacgagacccaccaccggggggcgagctcggaggccgagcagaacaacaacaacgtcgtcaacgtgttcgacgaagaagacgaggacgcccgcgacgtggccggcgaggatcacgacgaggagctcagctacggcggcggcgaggcggcggcggcgcgccaccgcaccagcaggttccagtgcggcgcatgcaggaaggtgttccggtcgtaccaggcgctcggcggccaccgcgcgagcctcaagagaggcaagggcggcggctgcgtgccaccgccacgtccggcgccggcgagctccgccgccgcgccggccatccacgagtgcccattctgcttccgcgtgttcgactccggccaggccctgggcggccacaagcgcgcccacatgccatccggcggcgcgcggccctcgccctcgccgtctccggcgaaatgcggcgagagctccggctccatcgatctcaacatgccggcgacaatggaggacgacttcgagctctccgccgtgtacgacgccgagttcgccagcacgagacagtga

SEQ ID NO: 13188 - DNA, 2574 bp, Oryza sativa
  Clone ID: TFbOSC400502j.C1.o32.fg
atggggaagaagaagaagcgcgtggagaaggtgttctgctactactgcgaccgcgagttcgacgacgagaagatcctcgtgcagcaccagaaggccaagcacttcaagtgccacgtctgccacaagaagctctccaccgccggcggcatggccatccacgtcctccaggtccacaaggagtccgtcaccaaggttcccaatgcaaagcctgagagggaatcaacagagattgagatctttgggatgcaagggattcctccagatgtgttggccgcccactatggagaagaggaagacccttcatcgaaggtagccaaagtggaagtgccatcgctaaggcctcctgttatgcccaatccagcgggcatggtatatcctccacgaccggcctatggtgtagctccacctatgtataaccctgcactgaatccattgatggccagacctccaatctggcctgctccacctccgcaaccttggtttacacaaccagtagtttcggttcctcaaatggcttctgggcttgcaccacaacagccactatttccaattcaaaacatgcctgctcctatgacatcagcacctgcaaatttacttcagacttcgttccctatggcccatgttggagtaccttcacctgttacccctcaggtgtcacaacctctctttcctgtcagtacatctgctggaaacggtgcagtaagttctccatatgtagcatctgttgcacctggaagcatcccaacaagctctccatcagttgctcctgcaggagtaggatatgcagctactaaccaaggtacaggaggtccagcggctgtacctccacccgcttctaataataaagcaccagccacccaacctggtgcaaatgaagtctatctggtgtgggatgatgaagcaatgtcaatggaggaaagaagattgtcgctacccaagtatcaggtgcatgatgaaactagccaggagttccaagtaggtatttacattgttctacctgctagagcaagagtgttaaggccagatgagctactactcgatcactactactaccactcgtcgtcgtctgatccatactacagcacaccgatccttccaccctacggcgacgcattctcaccgccgaaccctcctccccctcctcctccgatgtcacccagctgcctcctccctccgatcattccggcaccaacattcacatacagttctcctccaccgccgccactctactaccctccaccgccggatataagcccaagcccgccaccgtctgttacaccattgccacctgtagtctacccgagtccaccggaagtcacacctagtccaccggaaattgcaccgtatccaagcccacctgaaattgttcctagcccaccagagatcacaccgtacccaagtccacctgaaatcgttcctagcccgccggagatcacgccatatccaagtccacctgaagttgttcctggcccaccggagatcaacccgtatccaagcccgcctgagattgttcctagcccaccagaaatcacgccatatcctagtccacctgagattgttcctagcccaccagagatcacgccatatccaagtccacccgaaattgtgccaagcccacctgaaatcgcacctagtccaccgatcgttacaccgatgccacccataatctacccaagcccaccggaagtcacacccagcccgccagaaatcacaccttatccaagcccaccggaagtcacaccaggcccgccagaaatcacaccttatccaagcccacccgaaatcacacctagcccgccagagatcacgccgtatccaagcccacctgaagttgtacctagcccaccaaagatcaccccatatccaagcccgccggaagtcacacctagcccacctgagatcaccccatatccaagcccacctgacatcgtccccagcccgccaagctatgagcctagcccacctagctatgaacctagcccaccggagtacgcgccagaaccaccggtgtacgcgccgtatccaccggggatcttcccgagtccaccggagtactcgccggagccgccggcatacgtgccaagcccaccgcagtacgcgccgcagccgccgtcatacgtgccaagcccaccggagtacgcgccggagccgccggtgtacgcgccgtatccaccggggatcacaccgagcccgccggagtacgcgccggagccaccgccgggcccgcccggcggtggtggcgggtacctgccgccggtggtgttcccgccgccgtacgcgtcgcgggggccgccggggaggcgcgcggtgtggtgcgtggcgaagccgtcggtgccggaggggataatccagccggcgatggactacgcgtgcggctccggcgccgactgcgactccatccagccgtcggggccgtgcttccggccggacaccatgatcgcccacgcctcctacgccttcaacagctactggcagcgcgccaagtccaacggcgccacctgcgactttggcggcaccgccatgctcatcaccaaggatccaagttatggtggctgccattacagtacgatgtga

SEQ ID NO: 13189 - DNA, 459 bp, Oryza sativa
  Clone ID: TFbOSC401614j.C1.o1.fg
atggcttccagctcgcagaccaccgtgtccatggaggtggcgatgaaggttgaggggagtggtggtggtggtggtgatggggaggaaggcgaggtggtggccaagaaggaggaggaggtggcggcggcggcggcggcgatggagctcgatcttcttggcgcgctgcgagcggaggaggtcatgccggcggagaaagggaaggccgccgtcgtgatggtgggcgaggcggtggccccgtccgtggaggagagggcttctgctgtggcggcggcggcggcgaacggtggcggcggcggcggcgaggcgaggcgccggctgttcaagtgcaactactgccagcgcaagttctacacgtcgcaggcgctgggggggcaccagaacgcgcacaagcgggagcgctcccctcgccaagcgcggcgccgccgtggcggccgcggcggcggccgccgggcgcggcct

SEQ ID NO: 13190 - DNA, 1437 bp, Oryza sativa
  Clone ID: TFbOSC401275j.C1.o67.gm
atggagagcaggagcgcgagagagcatggccatggccaccttcatcagcagcatcagcggccatggagctgcagcttcggcttctcatggccgccgctgcagaggtcgccgccgccgtcgtcgtcgtcgtcgtcgtacacctgcggctactgcaggagggagttcaggtcggcgcaggcgctgggaggccacatgaacgtgcacaggagggagagggccaggctcaggcaattccccaaccctagacctcatccccttcccaacctcaacctctcgccgccgccgccaccgccgccgccgccgccgccgccgcagcagcagcagcagtgctactgccccggcgatcgtccggccatcgtctacagcttcttctccacggcggcggcggcgatggcggcgacgaagggtttggaggtggatttggagcttggagtcggtggtgaccctctcgacggctgcgcgcatgacgctgacgagctgtggcatgaagcattcagccagggcgcccgggccgcagccaacgtgcagctccgtggcggtccaatcccgtcgggctcccaggcccaggactcacgcacttgcatggccggtcgatctcgcctccagcggcgccggcgccgacctccgtggcagtggcgagctcagctcccgtcgccgctccagcccgtgctccccgcggccgcgtgggagtacggcgaggagaacgtacgaggaggagaaggtcgagccgatgcgatcgactacgttctctacatcgacgcgcgctacttcccgagagttccttcgacttctcagcgtcttcttccgctgcgcggcgcgtcgagtgctcctacaccatccaattttaacttgcggtctattcttgagaaagagaagttgactggaacaaacttcatggattggtatcgcaacctgagaattgttctcaggcaagagcacaaagagtttgtgcttacacagccttttccagttgacttgcccaacaatgctattgctgctcaatgtagggagcatgaaaggcgatgcaatgaataccatgatataagttgtctcatgcttgctactatgtcccctaagattcaaaggcaatatgaggcattggatgctcatacgataatcacgggactacgtaacatgtttgaggaccaagcaagagctgagaggtttaatacctcaaagtccttgtttgcgtgcaggcttgcagaagaattgcatgggatgctaaagactgccgaggaaagcattaagaaaaactccaaccatgtgatggttatgcataagcgcaagcccaacaacaagaagagtggtcaaaagagaaagctaaactctgatgagatcatgagtactagcaactctaagaccaaggttcaaaagacaggacccgctaagaatgcagagtgcttcttctgcaaggagacaggggctgaaaagaagtag

SEQ ID NO: 13191 - DNA, 245 bp, Oryza sativa
  Clone ID: TFbOSC32420j.C1.o2.np
ataggggggaggcaaaaatcgccctcccccagggcggcaagggggccgcctgcaaaattccatgccccatcgccgcccatttgcaggcggccccccccacagtacaaaatcgccctagcggagggtggcaagggggccgcctgcaaaattccatgcccccctcgccgcccatttgcaggcggccccccgcacagtataaaatcgccctagcggagggcggcaagggggccgcctgcaaatttcgt

SEQ ID NO: 13192 - DNA, 1814 bp, Oryza sativa
  Clone ID: TFbOSC401200j.C1.o51.np
atgcatgaagcaagtgaagtgaaaatcccggctaggcctaggagtaatactatatgcaatccgaggctcgacgtgatcgtggcggccaaccacagcgtcttcatcaagggagtactttcgctagctatatgcatgcaggtgtccactgccgttggcagttgcgactacgcctcaaccgtgccggccgctatagtgtctagtggtagtggagtagtaaatcacactagttactgtacatgcagatccatagacatcatgctgcaactgccgctgccatggccactagctctgcacctgaactgcacaaatggagtggagtagtagtactctgctccagcaacatccaaagcataaggaagcaacaagctaagaagcagcatcattcactccacgagctagcaaaaaggatagcaatggtggaaccggggagagcgcgggagacgaaggtcaccgcctcagcctcaagctctgcaggctcagacgccgctgtcatgaagaagaagaagaagaagaagaagaagctggtggtagcaagcaggaaggtggatgagaaagacaagaagcaggtggattacaagtgcagtagaagcagcggcagagacgagtgctgcaaggtggagagccgtcatcagcagtgcacagagccggagagcccttcctacagaaacagcagcagcagcagccacgccggccaccaccaccaccgcgccgccgacggcaagaagctcggctgcaattccgcctccatctgcaaggtcaagcaagacaacccgatgcagcagcacatgcgcagggcggaggatgagctcaaggtgaaggacaagccgccggtcgccgagccgtactgcaagcgcagagcttcggtgagcgcgtgcaacatcagcagcgagcggtcggtgaagaagtcagtgaagcagcagcagcaggaggcgagcagcagcttgcagtcgtcggcgtcgatatcggcgtcgtcgtgttcgtcgacggcgggtggtggggggtcgttccgggggatgcagcagttgagcctgaggcggctgtcggggtgctacgagtgccacatggtggtggatcccatcagcggcgtcttccgggacagctcctccatgagggccaccatctgctcctgccccgactgcggcgagatcttcgtcaggcccgactccctccacctccaccagtccatcaggcatgcagtgtcggagctgggggcggaggacacgagcaggaacataatatcgataatattccagtcgagctggctgaagaagcagagccccgtgtgcgccatcgaccgcatcctcaaggtccacaacgccgcccgcaccctcgcccgcttcgacgactaccgcgccgccgtcaaggccaaagcaatggcccaccgccaccctcgctgcaccgccgacggcaacgagctcctccgcttccactgcgccaccctctcctgcgacctcggcctccacggcgccacccacctctgcgaccacctctcctgcgccgcctgcgccatcatccgccacggcttcaggccgcccgcgccgggggccggcatccgcaccatggccaccagcggccgcgcccacgacgccgtcgtctcgtccgggtcggagggcgaccgccgggcgatgctggtgtgccgggtgatcgccggccgggtgaggagggaggaggcggcggcggcggcggcggaggaagaggaggaggagtacgactcggtggccgggacgacgccggggctgtactccaacctggacgagctggacgtcttcaaccccacagccattctcccttgctttgtcgtcgtctacagggcc

SEQ ID NO: 13193 - DNA, 375 bp, Oryza sativa
  Clone ID: TFbOSC407914j.C1.o1.fg
atggagtacgcggcgccggcaggggcaggggcagggggctactactactacccgccgtcgcagcagcacaagcctcgccgtcccccgcggcccgccgcccgctgggtcaagcactggatcccgcaggatctcgccacctcctccggcaaatgcgccctctacaagtgggtcagggaggatgtgtacaagaatctcaaggacggcaaggccgtgccggagccggaggcggtgaagcctgaacccaccacggagatcctcttcctctgcagctatgaaaactgtggcaaaacctttgtcgatgtcgccgccttaaggaagcacgctcatgtgcacaacgagaggcagtatatttgtcaggagcctggctgtgggaag

SEQ ID NO: 13194 - DNA, 1536 bp, Oryza sativa
  Clone ID: TFbOSC400103j.C1.o2.fg
atggcgctctccactctcctcctcccctcctcctcctcttcctcctccaagacggccactgccaccgacacctccgaccgccgccgccaccaccaccaccacaaccacaccaagcgcaagaagaagccgccgccgccgccgctctcaccgacgccgagaacgccgccgcctgcagggagtggaagccaccgcgccatggccgcgtcgtccaagaagagcaccaagcaggtcgtcgtcgcggccaagacgacgaccggccaccgccccaagaaggcggcggcggcgccgacgacgccgtctcgtggtgcgccgtcggcgtcggccgcgccggtgtcgtcgtcgtgggagcagctgaagagcctgctgagctgccggagcgcgacggcggcggcgcgcgtgcacgaccccgccgcgccgtcgtccgcgttgtcgcggctccgcagccacggcgccggcgcgtgcggcgcgtcgctctgcgccatccgcgacgtggtcgacgccgccagctccgcctccgcggcgtccaccgccgccgcgtccctcgaccgcgacaccaccccgctcacccgctcctcccgccgcgcccaccgcgccgccacctcctcctccggcggcggcggcggccaccacgcctccctccgtggcctctccggttgctacgagtgccgcgccatcaacgtcgagcccatgtcaaggaggtatccgaggccacgggagctgtgcgcatgctcgcagtgtggggaggtgttcaacaaggccgacagcttggagcaccaccaagccattcgccatgctgttaagattggatggcaaaaatacatcaaaaggtatctgtgcctagccatcttttgcatgcttgcagtcgcatctgcatctccatttgttgaagtgtcggagctggggccggaggactcggggcgaaacatcgtggagataatcttcaagtcgagctggcagaagcgcgaccgtccgatctgccagatcgaccgcatcctcaaggtgcacaacgcggcgcgcaccgtggcgcgcttcgaggcctaccgcgacgccgtccgcacccgctgccgcgccaccgccgcccgcgccgccgccgacggcaacgagctcctccgcttccaccccgccgccctcgcctgcccgctcggcctcaacggcgccacctcgctctgcgacgacgacgacgcctgcggcgtgtgcgcggcgatccggcacgggttcgcgccgtgggcgggcgcgcacccgctcggcgtgcgcaccacggcgagcagcggccgcgcgcacgactgcggcgcggcggcggcggcggcgcagcaggcgggcgggtgccgggcaatgctggtgtgccgcgtaatcgccggccgtgtccgccggaacgacgacgatggcggtgcggaggaggaggagggagcgttcgactcggtggccggcgacgaggcggcgagcagcgtgtacggcaacctggaggagctgttcgtggcgaacccaagggccatactgccgtgcttcgtcgtcatctaccgtgttgtccccgagtga

SEQ ID NO: 13195 - DNA, 1215 bp, Oryza sativa
  Clone ID: TFbOSC409369j.C1.o1.fg
gccgcgccggtgtcgtcgtcgtgggagcagctgaagagcctgctgagctgccggagcgcgacggcggcggcgcgcgtgcacgaccccgccgcgccgtcgtccgcgttgtcgcggctccgcagccacggcgccggcgcgtgcggcgcgtcgctctgcgccatccgcgacgtggtcgacgccgccagctccgcctccgcggcgtccaccgccgccgcgtccctcgaccgcgacaccaccccgctcacccgctcctcccgccgcgcccaccgcgccgccacctcctcctccggcggcggcggcggccaccacgcctccctccgtggcctctccggttgctacgagtgccgcgccatcaacgtcgagcccatgtcaaggaggtatccgaggccacgggagctgtgcgcatgctcgcagtgtggggaggtgttcaacaaggccgacagcttggagcaccaccaagccattcgccatgctgttaagattggatggcaaaaatacatcaaaaggtatctgtgcctagccatcttttgcatgcttgcagtcgcatctgcatctccatttgttgaagtgtcggagctggggccggaggactcggggcgaaacatcgtggagataatcttcaagtcgagctggcagaagcgcgaccgtccgatctgccagatcgaccgcatcctcaaggtgcacaacgcggcgcgcaccgtggcgcgcttcgaggcctaccgcgacgccgtccgcacccgctgccgcgccaccgccgcccgcgccgccgccgacggcaacgagctcctccgcttccaccccgccgccctcgcctgcccgctcggcctcaacggcgccacctcgctctgcgacgacgacgacgcctgcggcgtgtgcgcggcgatccggcacgggttcgcgccgtgggcgggcgcgcacccgctcggcgtgcgcaccacggcgagcagcggccgcgcgcacgactgcggcgcggcggcggcggcggcgcagcaggcgggcgggtgccgggcaatgctggtgtgccgcgtaatcgccggccgtgtccgccggaacgacgacgatggcggtgcggaggaggaggagggagcgttcgactcggtggccggcgacgaggcggcgagcagcgtgtacggcaacctggaggagctgttcgtggcgaacccaagggccatactgccgtgcttcgtcgtcatctaccgtgttgtccccgagtga

SEQ ID NO: 13196 - DNA, 786 bp, Oryza sativa
  Clone ID: TFbOSC400700j.C1.o5.fg
atggccgcgccgcatggcatgcatggcgtcgccgcggcggcgccggacgccaccatccgcctcttcggccgcgacgtcgtctccaacgacgacgctgtcgtcgtcgtcgtcgacggccagctgcccaaggaggaggcggaggaggaggcaggcggcggcgcggcggcggcggcgggggagacgaggaggttcgagtgccactactgccgccgcaacttcccgacgtcgcaggcgctgggcggccaccagaacgcgcacaagcgggagcgccagcacgcgcggcgcgcgcacctcgaggcctccctcgccgccgcgcactacctcggccagtccgcccacctcgtctacggcggcgccgccctcttcggctacggcggccacgccgccgccgtgtcgccgcagtacggcccggtgtgggcgagctccgccgtggcgccgccggggctgtacgccacctccatgggcatggcgcggcctgcagcctacggcgccggcgtggacgtgtccgcgctgtggagagcctcgtcgtcgtcgtcgtcgtcgccgccgatgatggggagtggtggtggtggtgcttttggtacggtggccggcggcggtcggcacggcgaggcagcggcggcggcgttggtggggtgtcgagccggtaaggatgagaacgtggtgatgagcgttgtgacgtcactgccttcgctgccgtcgtggcagctgccggcgccggagaagatgggtaggtctgagctgggtcaggaggccggggttgtgagcttggaactccgtttgtag

SEQ ID NO: 13197 - DNA, 678 bp, Oryza sativa
  Clone ID: TFbOSC400939j.C1.o50.hg
atggcgccaacaagtagcactgaggaggtgaagcacctgacgcttcaccacttgttgaagcggcagcaccggctcaagcccgccgccgtggtgtggagatggccgacgtcggtggtgcccggcggcggcgccgggcggccgccggtgcccgacgagcagctggcggcggacgacgtggacggcctgggcgggacgtggccgccgcggtcctacacgtgcgcgttctgccgccgcgagttccggtccgcgcaggcgctgggcgggcacatgaacgtgcaccgccgcgaccgcgccaagatgcgcggccacggcctccacggcgccgccgggcagcagctcggcgcggcggaggcgcctgccgccgccgccgccgcgaggacggagtacgccgtggcgctgtaccccatcctgaactccggcgcgggcggcgcggcggtgcgcataccgcacggagacgtgctgctctccgcgcccgtcgcgctggcggccgcgcgccgtggccatgatcaccggtgcatcgatgtaggtgacgacgagaacgacaagaagattgacctggagctgcgccttggaatcctaatgacgattaaaatgagggacgacaggcaggccgtgaagcaaacgagcgaggcggttgccgggacttctagaaagagaagcagcaggcggggtgtatag

SEQ ID NO: 13198 - DNA, 588 bp, Oryza sativa
  Clone ID: TFbOSC101556j.C1.o17.fg
atgagtcaaaaaaccagcaaggacgaggtgatcggtggaaggtcgccgagcggcgacggagacaaggcggaggaggagctccgcgaggcccgcagcggcgacgacgacgacgacgacgaggccggcacgaggcagccgtacaactgcaccttctgcaggaggggcttcccgacggcgcaggcgctcggcgggcacatgaacgtccaccggaaggacagggttggaagagcgacgccgtcctcctcgtcgtcgacgacggcggcggcggcaaggcgaagcgtcagctacgatacgctcgtgaggttgtttcgtccgccggcgagcggaggaagcgaggatgcggcggcgtccacggcggccggcggcggcgcgagcctgaggtcccgtaccgccgagccggcgccgcaagagctaaggctgtttgggcgcggcgccggccgtcgggaagaaggtggtggtagagatcgacgagatcgctacggctgctgctccaaggatggggatggcaatggtggccatgatcatggggaggaggaggaattggatttggagctgagacttggtggttcaggctctgcaggctcatga

SEQ ID NO: 13199 - DNA, 1019 bp, Oryza sativa
  unsure (1)..(1019): unsure at all n locations
  Clone ID: TFbOSC400464j.C1.o1.fg
atggaagctagtgcagccaaggagaaagacaaggatggcaagaagatgagcagggttggaagctggggatccatggcgttctactcctcgtcttcttcctccagaagccaaccagtgtctgcagcagaaggcaagaatggtggcaagaaggagaagaggaggagcagcatcagcaggagcatcacgtgtgccggatcgatctgcagcaccaaggagagttcggtgtcgagcagggggagaggccggcgccgccggagcggcggcggcggcggcggcgatggcggcggcggagggagcacgtcgagcaggtcgctgatgggtcccgggtaccacggcgactccgcggcggctgtctccgcgtcgtcgtcgttcaacnctgtgatgacggcggcgacatccgccaccgcgaccaccaccaccaccaccaccagctcgtcggcaacctcgccgccgtcggcgctgtcctcgccgctgtcatccatcggcggctcgttcagggcgatgcagatcaggaagctctccggctgctacctccactgccactcggtgctcgacccgcgcaccctcgccgccgtcgtcttctcctgccccgactgcgacgaggtgttcgtcaagcccgactccctcgagctccatagatcaaccagacacgcagtttcagagctcggggcggacgacacgagcaggaacatcgtggagatcatcttccagtcgagctggctgaagaagaacgcgccggtgtgcaggatcgagaggatactcaaggtgcagagctcggacaagaccatcaagaggttcgagcagcacaaggaggcggtgaaggagaaggcgaggagcgccggcgacgaggccgggaggaaccccaggtgcgtcgccgacggcaacgagctcctcaggttccactgcaccaccttcgcctgctccctcggcctcgccggcggcaccgccctctgctgcgcctcctcgtcgccgccgccgctgcactgcaagctctgcagcatcatcaaagacngattcag

SEQ ID NO: 13200 - DNA, 1239 bp, Oryza sativa
  Clone ID: TFbOSC900002j.C1.o28.hg
atggcgttctactcctcgtcttcttcctccagaagccaaccagtgtctgcagcagaaggcaagaatggtggcaagaaggagaagaggaggagcagcatcagcaggagcatcacgtgtgccggatcgatctgcagcaccaaggagagttcggtgtcgagcagggggagaggccggcgccgccggagcggcggcggcggcggcggcgatggcggcggcggagggagcacgtcgagcaggtcgctgatgggtcccgggtaccacggcgactccgcggcggctgtctccgcgtcgtcgtcgttcaactctgtgatgacggcggcgacatccgccaccgcgaccaccaccaccaccaccaccagctcgtcggcaacctcgccgccgtcggcgctgtcctcgccgctgtcatccatcggcggctcgttcagggcgatgcagatcaggaagctctccggctgctacctccactgccactcggtgctcgacccgcgcaccctcgccgccgtcgtcttctcctgccccgactgcgacgaggtgttcgtcaagcccgactccctcgagctccatagatcaaccagacacgcagtttcagagctcggggcggacgacacgagcaggaacatcgtggagatcatcttccagtcgagctggctgaagaagaacgcgccggtgtgcaggatcgagaggatactcaaggtgcagagctcggacaagaccatcaagaggttcgagcagcacaaggaggcggtgaaggagaaggcgaggagcgccggcgacgaggccgggaggaaccccaggtgcgtcgccgacggcaacgagctcctcaggttccactgcaccaccttcgcctgctccctcggcctcgccggcggcaccgccctctgctgcgcctcctcgtcgccgccgccgctgcactgcaagctctgcagcatcatcaaagacggattcagggtggatggcaatgggaggatcacgacgatggcgacgagcgggcgggcgcacgacacggcggaggtttcgccggacggcgagaagagggcgatgctggtgtgcagggtggtcgccggcagagtgaagaagctccacagcagcaattcttcagaggatcatgactgtgactctgctacattggataccagtggaataaaaactgagggccagaaagatcgcaacacaaaaatgtcagcaacgctcaatgatgatgaggccagcaagatcctcctctcaccagagcctgactaa

SEQ ID NO: 13201 - DNA, 597 bp, Oryza sativa
  Clone ID: TFbOSC400555j.C1.o31.fg
atggcgccggtgatgagctcgccggggcagcaggaggcggtggcgtcgcccacggcggcgccgaccgctgccaggccgtactacgggtgcgtgttctgcaagcgcggcttcaccacggcccaggcgctcggcgggcacatgaacatccaccgccgccaccgccaccgcgccatgccgtcgcggcggcccacggccaccggcacaacgtcgatggtgtcccgggacgacgtggactgctataaccagcaccgctacctggagtactctcctcctcctcctaccccggcgccaccgccggtgacatctccgccgatgagcagcagcttcgccgccacgtcctacgccggcggcacggcaacggtggccggagtggacggggaagccatgcgcgctgcaggtagcagtgatagccatatcagggagctgagcctgcttggtggcgcagactctagtactgatcgtgatcatgacttgcacctgcgcctcgggcgccatggccgcggcggcgacgggtcgccgcgcacgccagaaggctcgccggagaggaagccggacctggacttggagctcaggctcgggcgccgtcctcggcattga

SEQ ID NO: 13202 - DNA, 804 bp, Oryza sativa
  Clone ID: TFbOSC400851j.C1.o59.fg
atgagcatgacgagccccaggctaaagctcttcggcttcgacgtctccgaggaggagacggcggagcacgaggagcagtactcggctgagccggagagcgcgccggtctgcgggggcaacggtggcggcggaggcggcggctcggactcgtcctcgtcgtctactacgaccaccacgacggccacggccggcggcgacgggcggaggtacgagtgccagtactgctgccgcgagttcgccaactcgcaggcgctcggcggccaccagaacgcgcacaagaaggagcggcagcagctcaagcgggcgcagctgcaggcggcggccgcggccgccggccgtgtcgcgggcggcgccgccgcgctctacccgcgcgccaacccgatggtctccgccttcgctccgaccccccacctcctcggcggcggcgaggcggggcccaccagctgggtctacttctccccgcgcgccgccgcggtggccggcggggcgcaaggccagcagttccacgtgtcccacggctgcgtcttccccgcccgcggcgccggccctgccgccgtcgccgccgcctcgccggctgtgttctcgtacactccggcgacgtctgccgccgccgtcgccgcggcctcggcaccctacgtgacgacggacgagcaccacgggcggaggatccacgcgagctcggcggccagccttgcgagatatcccggtccggcgatggtggtggcggagccggtggccaccgtgccggaggacacctgcctggggcttgacctccagctcagccttgcgcccgccggcttgtga

SEQ ID NO: 13203 - DNA, 504 bp, Oryza sativa
  Clone ID: TFbOSC900255j.C1.o9.fg
atggatccctcatcggcttcttggccggctccggcttctccgccggtggagctgtccctgtccctgccggcggcggcggcgaggaaccgcgacgaggcggcgccgacggcgatcgtcgacggcaagcaagtgaggctgttcccgtgcctcttctgcgccaagacgttccgcaagtcgcaggcgctcggcggccaccagaacgcgcaccggaaggagcgcgtcgccggcggcagctggaaccccaacgtctacggcgacggcggcggatcagcgtccatgcccatcgcctcccatggcgtcacggcggcggggagtagtacggcagccgacggccggtggtgcggcggcgctgccagcgacgacgacacaacggcggcgcccatgccttccctcggctcaggctcggcggcgctcggcgccggcgccggtttcgcttcgaccgaaaggggctcttccggcggcggcgtcgccggcgaggagcttgtcctcgagctcggcctctag

SEQ ID NO: 13204 - DNA, 723 bp, Oryza sativa
  Clone ID: TFbOSC401400j.C1.o15.fg
atgaagagcagcagccaagaagcgggagaggaggtgtccgagatcagcagccaggcggcgtccaacaacaacgagacgtgcaactcctcctccggcaaggtcagcctcgacctgtcgctcaccgtcgccgccgccgccgcggcggctgcctccgccaccgagtcgagcaccacggacagcggcggcacgcggccggcggcgacggcgacggcgacggcgcgcgagccggcgcgggtgttcacgtgcaactactgccagaggaagttcttcagctcgcaggcgctgggcgggcaccagaacgcgcaccggcgggagcgcacgctggcccggcgcgccgtgcggctcgacgcgttcccctacggctacgccgacgtggcctcgctgccgctgtacggcgccggcctgtaccccatcggcatccaggcgcacgcgtcggtgcaccaccaccaccctggcgtggcggcgccggcggggcgcgccgagttgaggtcggcgcgcgcgctgctcggcccgatgccgttcttcgtgcaggcggcaggcgatgaggatgccagcttcgggtggccgggcagcttcaggccaccgcccaccgccgccaccaccatccccgccgccgccgccgccccggtcgccgtcaactccggctcctccaactccaaccacggcggcagcgtcgtcgtgcaggccgccgccgacgagcccgacctcacacttagactctag

SEQ ID NO: 13205 - DNA, 729 bp, Oryza sativa
  Clone ID: TFbOSC400758j.C1.o29.fg
atggcgggcgtggtgcagaccgtgcagtgcgaccagccgagcaagcagcagctgacggaggcggcggaggcagcggctgcggctgcggcggcggcgtcgctgaggatatttgggtacgaggtggggggtggtggtggaggaggaggcgtggcggcggcggcgggtgcaaggcgggaggcggcggacgtggtcgtcggggcggggaggaggttcgagtgccagtactgttgccgcgagttcgccaactcgcaggcgctgggcgggcaccagaacgcgcacaagaaggagcggcagcagctgaagcgggcgcgtctgcagctcgccgtcgccgccgcggggacgccggcgggcatgggcttcgcggcggcacaggcgccggcgccgccgccggggcacgtgatcgccgtagggcatcacgcggggtcggttgcctcctacgcgctgcccaggtgggtctacctcgcggcgcaccacctgcagcccccggcggtgggcctgccgttccacgccaccgttcaggcagcagccggcgcgtgccacggcggcggcgacgtcgagacgcggttgctcagcgtcgccgccgctgggcggggcagcagcactgcaggcagcagcgctcactcgtacgaggtgtgtgctcctgcggctccggcggatgacagcgacgaggaagcctcggcgatggggttggacctccatctcagcctagctccggcgagctcggcatga

SEQ ID NO: 13206 - DNA, 431 bp, Oryza sativa
  Clone ID: TFbOSC401716j.C1.o200.gp
gcggccgcggcggcgtcggctgcctcccgaggcatagccccgcgtcgtcggcgccggcgccgccgccgagcgcgtgctgctgctgctgcctcggccgcttgtggctggcgcggtggcccccgagcgcctggaacgtcgggaactgccggttgcacgtcttgcactcgaacacgcggtcgtgcgcgccgccgcgcaccaccaccggctgcgcgccggcggcgaagccgccgccgcccagcaggccgtgctggctctgctgcgcgaggagcatcagcacgcgggccgtgtccacgctgccgacgaactcctgcatgtcccacatgctcctgctcctcttgctcatggctatagctagcttaattagccacgtaattaattaacccagctgatcactaacgtcgccgatcgaaatctgtatatccgctgcactg

SEQ ID NO: 13207 - DNA, 567 bp, Oryza sativa
  Clone ID: TFbOSC409799j.C1.o26.gm
atgggggagggaaggtggccggctgcgacggaggccgtcggggcgaaggaggttgcggccggcgtcggcgacctggtggcggcgcccaacatggcgcggcggtgccccagcgccgatgaagacgacgatgcgggtgaggttaaaacgccgaacgacggtttaccagagaaggtggtggtggacatgtcgtcgccggcgagcggcggcggcgggcggcggctgttcccgtgcctcttctgcgagaagaagttcgtcaagtcgcaggcgctcggtgggcaccagaacgcgcacaggaaggagcgcggcgccgccgccgccgccggctgcctgaacccctacgtcttctacggcgccggcgccggcgccgcccccgccccggcgacgctgtcgttgttgctgcaggtggacaactcgtacaccaccaccagctacatcgacgaacacggccgagcagcagcgccgccgccgccgaattccgaccacttcttctggacgacggccggcgccgcctcacgtggtggcgccggcgccggcggcgaggtcgacctcgagctgaggctcttctga

SEQ ID NO: 13208 - DNA, 1365 bp, Oryza sativa
  Clone ID: TFbOSC100047j.C1.o3.fg
atggcgggcggtggcaggtgcagctcgctgctccgtggcttcgtgtcactcttcttcctcctgttcatccacattggccatgccggttgctgcttctcgacgggatcttccacgcagacgctggaggaagatgacactggacatggggccgacgggaggggcggcggtggcggcggcagcaagaggaggaagatatcgccgctcgcgttctccccgtcggtgtcgtcttctacggtggctgacgagaggtccagagccaggcggaggcaggtgtcgtctctagccaccagcgtccgcttctacctccaccgcatcttctcctactcgtccggagccaagaacggcgctggcgctccagccgcggaggaggaagacgaggcggtgacgacgaccgtgtcgtcgccgctcgcgcagtcgtcgtcgtgcctgcctcagcgccaggcctcgtcgtcggtggtgctgtccacgccgtcgtcgccatgcgcgtcgccgttcctgtccccgctctcgccgcagtctctcagcattactcctgcggtgccgtcgtcgccgcacaacaggcagatccctcaggcgaccaccaggcagtcgtcgttcaggtcgttcgccgcccgcggcgacgtgttcccgtgcaaggtgtgcggcgaggtgctgagcaagccgcagcagctggagctccaccaggcgatgaagcactccctctccgagctctccagcctcgactccagcatgaacatcatccgcatgatcttcctcgccgggtggaagccggccgttatgcccggcgccggcgagccaccgtcggtgcggcgcatcctcaggatccaccacaacccccgcgtgctcacccgcttcgaggagtaccgcgacctcgtccgcgcccgcgccgcccgccgatgcgcgggcgccggcgcggcggcggtggaggagcggtgcgtcgcggacggcaacgagcggctgcggttctactgctccaccatgctctgcaccctgggcgcgggcgtgtgcgggagcccctactgctgcacctgcagcatcctgcgccacgggttcgccgggaagcaggccgacgtggacggcatcgccacctactcctccggccgggccgcgcacgcctctctccccgacgacgtggagcgcgagttcgcgttcctccaggtgcgccgcgccatgctggtgtgccgcgtcgtggccgggcgcgtcggccgcggcgccgcggacgacaaggtggcctacgactccatggttccactactgccaacctcctccttcgctgcagctacccgtggcgacgacgacgtcgagctgctcgtgttcaacccccgtgccgtgctcccatgcttcgtcatcatctacagttgctag

SEQ ID NO: 13209 - DNA, 951 bp, Oryza sativa
  Clone ID: TFbOSC25771j.C1.o3.fg
atggcttctgagtgggactcaccatgccagttttgtggcaagaacttcaagagaagaggtgatctgctaaatcatgagttgacttgcaagtacatttcggatgtgcatccgcaaacagaatcttcaggagatgctcaggctcgcaaggatattttgggatttcatataccaaggcaaaagcgaacagttcccgcattcccagcttctgattatgctcagggtggcatcaatggtgcaacaaacgatgaaccagctgctagtaataatccagatcaggtgctgaagatgtgctctgacaagggttcatctcctgtggaatgttatggaggtgatgagaggagggtcggtgcgtgcgccattgcgggggtggaggaggatgatctcagcccaaatgttggttgtcgaggggtcaccgattgtgttgatgagtctaatgtgattcaaaagcaaaaaagacagcctgatcttagcgttgccgatctcagggaccttgttgagatgaaacagcaaaacatgaaggctgataccaatattcatgaccaaggacatccttctgtgatgcagatgcaaaaaaatgagcttagtcttgatctactgcctcacaagaacagttcagatcacgaggtaccaacccttagtgtcagctctatggatgatcccgatggcctggtttccactgatacaaactcagataaggagacggagactgtcaatgttggtattgatatcaatattcctgagcagagagaatcttcagtgacgcggatgcaaaacgagaagcttggtctcaatctgctgcctcgcaatgacagttcaggtcatgaggtaccaatcctcagtgttagctctaccgatgatctcaactccctgattcccactgatacaagctcagataaggatacaaactcaaatgtagcagacaggttaggccactgtcctgcacaagagtag

SEQ ID NO: 13210 - DNA, 1083 bp, Oryza sativa
  Clone ID: TFbOSC900043j.C1.o16.fg
atggcttctgagtgggactcaccatgccagttttgtggcaagaacttcaagagaagaggtgatctgctaaatcatgagttgacttgcaagtacatttcggatgtgcatccgcaaacagaatcttcaggagatgctcaggctcgcaaggatattttgggatttcatataccaaggcaaaagcgaacagttcccgcattcccagcttctgattatgctcagggtggcatcaatggtgcaacaagtgaagtgaaagtggattgggatcccgaagaagagactgatgttttagaggctctcttgcttctcagggagcaacctgcctatcctggagaagagacattttctgatgatgaaccgggtgctggtaatgtagacgatgaaccagctgctagtaataatccagatcaggtgctgaagatgtgctctgacaagggttcatctcctgtggaatgttatggaggtgatgagaggagggtcggtgcgtgcgccattgcgggggtggaggaggatgatctcagcccaaatgttggttgtcgaggggtcaccgattgtgttgatgagtctgatgtgattcaaaagcaaaaaaggaagcctgatcttagcgttgccgatctcagggaccttgttgagatgaaacagcaaaacatgaaggctgataccaatattcatgaccaaggacatccttctgtgatgcagatgcaaaaaaatgagcttagtcttgatctactgcctcacaagaacagttcagatcacgaggtaccaacccttagtgtcagctctatggatgatcccgatggcctggtttccactgatacaaactcagataaggagacggagactgtcaatgttggtattgatatcaatattcctgagcagagagaatcttcagtgacgcggatgcaaaacgagaagcttggtctcaatctgctgcctcgcaatgacagttcaggtcatgaggtaccaatcctcagtgttagctctaccgatgatctcaactccctgattcccactgatacaagctcagataaggatacaaactcaaatgtagcagacaggttaggccactgtcctgcacaagagtag

SEQ ID NO: 13211 - DNA, 528 bp, Oryza sativa
  Clone ID: TFbOSC413151j.C1.o3.fg
atggagtttgggatggtggaggacgcggcggcggcggcgggggaggaagggctgacgctgagcctgtcgctgcagccgtcgccgccgaggttccaggcgctcttctcctgctgctactgcccgaggaagttccggagctcgcaggcgctcggcggccaccagaacgcgcacaagctgcagcgcaacctcgccaggcggggccgcgaggccgccgcctctctcgccgccgccgccgccgcggcggccgcggcggccgcttcctcgggggatcagcagcagcaaggcaggacgacggcggcggcggcggcggtgcttgccggcggcgagagcgcgccgcctgctgctgctcgcgccgccgcggatctcgacggcgccggcgtgtggggaggagctgggatgaggggccggccggcgcaccaccaccgcctgatgcagggtggttactcttccggcggctcgtcggccgccggtggcaggggcaacggggagctcgccgacgagatgattgacctgtccctgaagctatga

SEQ ID NO: 13212 - DNA, 403 bp, Oryza sativa
  Clone ID: TFbOSC101188j.C1.o1.gm
atggcgagccgccacgtgtacccgcgcctcccctccccggccaatcgggaggcctcgtccctctgggatccacctcggcgagcgagcgagatggactccccgtcgcctatggcggcgcaggcggccgacctgtcgctgacgctggcgccgtcgggagggggtggtgggggaggaggaggcggcggcggtggtgggtcgtcgtcggcgtgcatcgacggcaaggacgtgcggctgttcccgtgcttgttctgcaacaagaagttcttgaagtcgcaggcgctgggcgggcaccagaacgcgcacaagaaggagcggagcatcgggtggaatccctacttctacatgccgccgacgccgcaccccgccggcaatgccgccgccgccgccgcggcggcgacgcccg

SEQ ID NO: 13213 - DNA, 633 bp, Oryza sativa
  Clone ID: TFbOSC22205j.C1.o1.fg
atggaggctcccccttctctttccatcgtcgacgaagacggcttcgtcatcgacctctcgctgacgctgggcctgacatcgcctccgccctctccaggcggcgcgtctccttccattcctccgggaagaggcggcggcggcggcacgagtggtggtgacaacaacagaggcagcagaggtggtggcaatggtggtggtggtggtggtgtgaggctcttcccttgcctcttctgcaacaagaagtttctcaagtcgcaggcgctagggggacaccagaatgcacacaagaaggagaggagcgtcgggtggaacacccacctctacctcccggccggcgtcgccgccgccacgacgacgacgacgacgacgacggcgatggccgtccctgacatggtcggcatgcccacccaccagatgtcctccatggcgttgcactcctgccggcctcaccagggctcccatgtcaccgccgccgacatcgccacgctggctgcgccgccacattacaccgtcgaccatggcgttgccggcatcgccagcggcggtggtgacagctcggtggggtggcgccaaaggcaaagggaggccggcggcgagaagcagaggcaggttgatctcaacctgaagctctag

SEQ ID NO: 13214 - DNA, 903 bp, Oryza sativa
  Clone ID: TFbOSC409246j.C1.o4.fg
atgagcgttgagcgagatgggcgcgaccagcccaacatcgactcgttctcgcagctgccgttcatccgccaggcggcccgcgagaagccgccgtcgtcgtcgtccggcggctccgtcgtcgtccctcctgcgcccatccggctgttcggcttcgacgtgccgccggacgcgtccaccaccgccgatgtgctaggagagaacaaggagagcgccgccgccgtcgtcgccgctgaggggagtaaacaaacggcgtccggtctggacgcaatcggcggcggcggcgggagccggaagttcgagtgccactactgctgccggaacttcccgacgtcgcaggcgctgggcgggcaccagaacgcgcacaagcgggagcggcagcgcgcgaagcacgcgcagttccagacggccatggccatgcaccacggccacggtcagtactacccgctcccggacccctacgcggcggcgttcgcggcgtaccccggccaccaccaccaccaccgtttcgccgccaccgccgccgccgccatgcctccgccgccgcactacccgtcgtgggctgcaggctccaggtactacagcggtccaggatccatctcgcagccgatcaacgggagcccggtggcgccggccgggatgtggcggctccctgccgccgccagctgcgtcggcttggcgacgacgacgactacggcggcgccgctgcccgcgcggcgccaagagcggccggcggcgacaattccttcgctgctcggaggcggcgaggagcccgtggtgctgggaggagctggctccacctcgttctcgccgtcgacgtcctcctcctcgtcgtcggcgtcgccgcacgagcggcgcgcgcagccagcgcgtaaagagaatgtgagtttggatctgagcttgtag

SEQ ID NO: 13215 - DNA, 840 bp, Oryza sativa
  Clone ID: TFbOSC900375j.C1.o18.fg
atggcgaagccgcaggacatgcgcagcgtcgactcgttctcgcagctgccgttcatccggccggcgccgccgccgcagcagcaggcgcgggacacaatccggctgttcggctgcgaattctccaacgacctgcagctgcggcccacggaggccggtgcaggctcccccgacgcggccaacggcagcacggtcacgtcagagggcagcaacggcggcgacggcggcaccaagaacggcggcgccgcgacggcggcggcggagcgcaagttcgagtgccactactgctgccgcaacttcccgacgtcgcaggcgctgggcggccaccagaacgcgcacaagagggagcggcagcacgccaagcgagctcacctccaggcctccctcgccatgcaccgctacatgccggggcacatgtacggcctcttcaactaccaccaccacatcggcggccgcttcgaccaccacccgccgccgccgccgccgccgccaccgccggcgcactacccgatgtggacgagcgccgccccgggcgccttcgccgggccaggttccatggcgcagcccatcaacggtagccccgtgcaggccgggctgtggagcgtgccgccgccgacggagaatttcggcagcacggccggcaggcagggcgctgacaagctggctactacggtggcgggcacgccggcggcgggggaggtggcatgcaaggacgagatggtgccgatgagcttgctgtcctcgtcgccttcgttgtcgtcgtgctcgtcgacgtcgccggagatgctaggtaggtgtgaattggggcagaaggagggtgtcagcttggacctccatttgtaa

SEQ ID NO: 13216 - DNA, 408 bp, Oryza sativa
  Clone ID: TFbOSC900062j.C1.o13.fg
atggaggtgaataggggggaggaggaagacgtgaacctggagctcaccctctgctacacctcggcctcctcgccggagcccatcggcttcttcctctgcatgtactgcgaccgcaagttctacagctcgcaggcgctcggcggccaccagaacgcgcacaagtacgagcgcagcctcgccaagcgccgccgcgagatcgccgccgcgctgcgcgcccacggcgcgccgccgccgccgcccgcgcccggtggcgccggcgcagctgcagctcagaaggcggtgggcgtggaggcgcagcagaagcaccagcacgctcccgtggtcggcggcttcgcgcgcggcggcggcaagagctcgccgccggccgccgagtacggcgacgggctggacttgtccctcaggctttga

SEQ ID NO: 13217 - DNA, 1998 bp, Oryza sativa
  Clone ID: TFbOSC400992j.C1.o60.gm
atggaggagtttgagctgcagcagcagccgtattacagcaagctgctcctgggtagcccgctggagatcgccaatgtcgacgacagtgatctgcagcttgtcgccggagttccctcggatccgccgcctgcgccgccgacggccgtgaagaagaagaagaagagaagccttccagggacaccagacccgagcgcggaggtggtggcgctgtcgccgcggacgctgctggcgacgaaccggttcgtgtgcgagatctgcggcaagggcttccagcgcgaccagaacctgcagctgcaccggcgaggccacaacctgccgtggaagctgcgccagcgcggcggcgctggcggcggcggcggcggcgagccgccgcggaagcgtgtgtacgtgtgcccggaggcgtcgtgcgtgcaccacagcccgagccgcgcgctgggcgacctcaccggcatcaagaagcacttctgccgcaagcacggcgagaagaagtggaagtgcgaccgctgcggcaagcgctacgccgtccactccgactggaaggcccactccaaggtctgcggcacccgcgagtacaagtgcgactgcggcaccgtcttctccaggcgcgacagcttcgtgacgcacagggcgttctgcgacgcgctggcgcaggagaacaacaagctcgcgcagccgatgaacatggcggcggtcacctccgctctgcagggccagcagcaggctcaccaccccgtcgccgacgacgatgacgccgcgggcgtcaagagcccgcacctcaagatgttccccgacgtcgacaacatcgtcgccgccgccacggccggaaacccgctcttgccgccgccgcttagcatggcgggatgcatgctgtccagcctcgccgcgccattgtcgtctccgttcctccccgggtgcaagcttggcgtggacgcggcgcgcgacgccgccatggtgttcccgccgccgccgccgccggccgggtcagcggcggcgatcatgtccgccacggcgctgctgcagaaggcggcggagctgggcgccacgacgtcgacgggctgctacggcggcgtcgcgttcccggccatgggcattgccggcggtctcgaccggcttcccgccataggccatcatctcgcgccgtacgacgacgtcgtcgtgccggcggcgctgcaggggcagacggcgacgcagctggtcgggttcgacctgggcgggctgttgcccggccagctctacggcggcggaggcggcgcgatgacgagggccatcgggtcgctgatgcacggcggcgaccagcacgccgccctggatcacagagcgtgctcgaagattcccagattccgaatggaagacggcgggaagcacttcgtgttcgtccatggcctcggccacggcgcgtggtgctggtacagggtggtcgccgcgctgcgcgccgcggggcaccgcgcgacggcgctcgacatggccgcggcgggcgcgcacccggcgcgcgccgacgaggtgggctccctcgaggagtactcgcgcccgctgctcgacgccgtggccgcagcggcgcccggcgagcggctggtgctcgtcgggcacagcctcggcggcctcagcctcgcgctcgccatggagaggttcccggacaaggtcgccgccgccgtgttcctcgccgcctgcatgccggccgccggcaagcacatgggcatcacgctcgaagaggatctgacgctggcgacgatgctggtgaggcctggcaccaactacatcgatgatccgatcatgaaggacgagacgctgctcactgaaggcaactacgggtcggtgaagagggtgttcttggtcgccatggatgatgcttcgagcgacgaggagatgcagcggtggaccattgatctgagcccaggcgtggaagtcgaggagctcgccggagcggatcacatggcaatgtgctccaagccgagggagctgtgtgatttgctgctcaggattgcagctaagtatgactaa

SEQ ID NO: 13218 - DNA, 1380 bp, Oryza sativa
  Clone ID: TFbOSC401656j.C1.o8.fg
atgtcggtgggtgcagatccggaggcggaggtgatcgcgctgtcgccgaggacgctgatggcgacgaacaggttcgtgtgcgagatatgcgggaaggggttccagcgagaccagaacctgcagctgcaccggcgagggcacaacctgccgtggaagctgcggcagcggagcgggaaggagccgaggaagcgggtgtacgtgtgcccggagaagagctgcgtccaccacaacccgtcgcgcgcgctcggcgacctcaccgggatcaagaagcacttctgccgcaagcacggcgagaagaagtggaagtgcgacaagtgctccaagcgctatgccgtccagtccgactggaaggcccactccaagacctgcggcacccgcgagtatcgctgcgactgcggcaccctcttctccaggagggacagcttcatcacgcaccgcgcgttctgcgacgcgctggcggaggagacggcgaggctgaacgcggcgtccggggccgccgcggcggcggcggcggccacggccacgtcgctgtgcgggcagagctacctgttcgccgggtcgggtgggccggggatggcgggcatgcggccaaacatgatgatgccgccggcggcggcggcggctggagggcagctcagggcgggtcagatgctcggtccggcggcggggggcgtcggtggggacctgtgcgacggcggcgtggcgcggcacggcgggctgtcgctgtggggtggcgaggcgttgccgtccatgggccacattggcgtcctggccagcggtggcgcggcgacagtgccgccgcagctgtacgtggatctcttcgcgccgagctccggcgcgccgccgccgcagttcgacgcggcgcagctgagctggctgtacgggaacggcaagctctcgtcgtcgaatgccagcgagctgacgagcgccacggcggcggcgaaggaggcggagagcgtgccgtccgtgttcagcaaccagcagcacgcgaagcccgcggcgcccaccgacatgtccgcgacggctctgctgcagaaggccgcgcagatcggcgccgtgacatccaccgccgcgatgcccctagtgtccccgttcgagccgaccaagcccggcggcgccaccgcctcaccggccgacgagtgcggcaagttcgacggtgcagccctattcgccgccgcgagccatcacaatgccaacctcggcggcgcaatgagcgagctcacgggggccgccggcaacgtgccttacgacgtcttgtcggcggtgcgccaccatgccggcctgaaggacgccggcggcgtcgggagagaggaaactagggatttcttgggcgttggcgtgcaagcactgtgctcgtcgtcgatacatgggtggatttaa

SEQ ID NO: 13219 - DNA, 621 bp, Oryza sativa
  Clone ID: TFbOSC420432j.C1.o6.fg
atgagcaagcggcagtttggagagatggacggcggcatcgacacggcccgcgtcctcatgctcctctcccggcggcggcggcagcacggcgacgtcgggcacgcgcgcgcggcccgcgtgttcgagtgcaggacgtgcgggaggcggttcccgacgttccaggcgctgggcggccaccgcgccagccacaagcgcccgcgccacggcgccgagcgcgcgccgcggccagcaggcgacgacgacgtcggcgccggcgccggcgccgcgctccgcctcgtcggcgcggcgtcgtcgttgtcgacggacgaggcgcgcgcgggaggcggcggccgcaggacgaggggcgccggcgccgcgcacgggtgccccgtctgcgggctggagttcgccgtcgggcaggcgctcggcgggcacatgcggcggcaccgcgccgccgccggcgacgtcgcggcgccgcgtgtgaagaccgacgacgttgtcgttggagacgagtgcaccggcgggatttgcttggacctgaacctgacgccgtcggagaactgcgacaagtgccggcacgcccagctcggcgtcgccgtgaactctgtgcaaagaacgatactactggaccgtcccctttga

SEQ ID NO: 13220 - DNA, 1761 bp, Oryza sativa
  Clone ID: TFbOSC414116j.C1.o1.fg
atgacttatataccggtcagagatgggttatctgtgacgggtgtttcatccgtcacagagctggagagattggctaggttggaggaggaaggggaattcttggttgtaagggaagaggtgggagtggtcaccggcggtgcgcgcgcggaggcggacatcatgctgagttcttgcgcgccgacggccgtgccgccgcaggatgcgtccggtgcggcgacggagccgttccggtctctgcagatcgccaccgccggtgccgccgcgaagaagaagcggcggccagccgggacacctgacccggacgcggaggtggtgtcgctgtcgccgaggacgctgctggagtctgaccggtacgtgtgcgagatctgcaaccaggggttccagcgcgaccagaacctgcagatgcaccggcggcggcacaaggtgccgtggaagctgctgaagcgggaggccggcgaggcggcgcggaagcgggtgttcgtgtgcccggagccgacgtgcctccaccacgacccctcccacgcgctcggcgacctcgtcggcatcaagaagcacttccgccgcaagcacagcggccaccgccagtgggcgtgctcccgctgctccaaggcctacgccgtccactccgactacaaggctcacctcaagacctgcggcacccgcggccacacctgcgactgcggccgcgtcttctccagggtggagagcttcatcgagcaccaggacgcgtgcaacgccggcaggccacgcgccgccgaggcgtcatcgtccccgggacgcggcggtggcgtcgtggttggtgcgccggcggcagcatcgtcgtctcagcagcagcagctttttgcggtgccggcttcgttgtcgcggacggcgtccagcgccagcccgtcgagcgacctggtggtgagcccggtggcctggcctgctactggtggtggtggtccggcaatggtgagtccccgtgctgcggcgccggctcctgctggcggtagcatcgcggcgttccaccaccggttcactgacccggcgctgtcgccaccgacgccgtgtggtggccggcgaggaggatgccacactacccacagcctggagctgcagctcatgccaccgcgcaccaccaccacctgcgcaggcggcagcctcggtggtactccagttgccaccgccgttgggtactacgcttcctcttcgccgcattcgcctgctgctgctcttccgtcgcggcagccggtcgccgacgcaatgcggctgcagctctcgatcgggttcggcggcgcacgcgatgatggcaacaacaacagcagcagcagcagcggcgaggtgtcggcctcggcgacgaggctgaaggaggccgcccacgagcagctgcgtctggcgatggccgagaaggcggccgcggacgaggcgcgcgcgcaggcgaagcggcaggcggagctcgccgaccaggagctggcgaccgcgcggcggatgcggtaccaggcgcaggtggagctcagccgcgcgcacgtgctccgcgaccacgccatacgccaggtcgacgccacgcagctgcagatcacctgctacagctgcagccacaagttccgggcgagagcggccgccatgatcagctccgacgtcgccagctacgtctcgtccgtcgtcaccgagggcggcgacgccgaggtcgacaacgacggcaacttgcaccgccgccgcctcaacgctgacgatggcatgccaaggggccattctaggacgatggcaatggacctcaactag

SEQ ID NO: 13221 - DNA, 915 bp, Oryza sativa
  Clone ID: TFbOSC101118j.C1.o4.fg
atggcgcagcagcactcgccgcctccacctcctgccccgccgtcacctccgcccgcgctgccgtgtgatccgatgccgccgccgccgcgccatgacgacaccacgctcacgctgtcgctcgcgccgcccgccgccgctcgcccgctgcaggccatggtggcgcgggccaagtgctcgtcgccgaccggggacgcgccgccgtgcaccgagtgcggcaggcagttcctctcgtggaaggcgctgttcggccacatgcgctgccaccccgagcgccactggcgcgggatcacgccccctggcggtggcggcgcaggcgcggcgtcgtctaccgccgccagccagttcacgctcagggagcgcgaggtcgccgccagcctcctcatgctgtccggcgctcaccccgcccgctccggcgccggcaagggcaagggcaagaagcgccttctcgcccccgccgccgccgctgctcctcatcattccccggcaacctgcgccgaccacaagtgcgccgtctgccaccgcgggttcgccaccggccaggcgctcggcggccacaagcggtgccactggccggatcgttcctgtgccgatcaggcgatatcgatgctcgccgtctccaccgccggcagcagtagtaccactaccacgtcggcatcacctccgccggcgccggcgaccgccgccaccgcgctggacctcaacctgaacctgccgcctccattggcgctttggtgtatattgcttttgctagatttgtgtttgttaaattccattcgaggcataagcggctctctggaatggaaatctctgcaagttcttagctttggttacgtgtgcctggttcagataagagcgtttctaatcgttctgaacacagagataggtgtgctgattgatcagaagagcgctttctaa

SEQ ID NO: 13222 - DNA, 1596 bp, Oryza sativa
  Clone ID: TFbOSC401442j.C1.o12.fg
atggcagccgcctcgtctgcacactacttcggtctcggcgagccgcagatgcagcagcagcagcagcagcctcccctgcagaacaacgcggctgctccggtcgcggccacgccgccgcccaagaagaagaggaatcagcccgggaatccaagcaagttcgtgtgcgaggtgtgcaacaaggggttccagagggagcagaacctgcagctgcaccggcgagggcacaacctgccatggaagctgaagcagaagaaccccaaggagacgcggcggcgggtgtacctgtgcccggagccgtcctgcgtccaccacgacccgtcgcgagccctcggcgacctcaccggcatcaagaagcactactcccgcaagcacggcgagaagaagtggaagtgcgacaagtgcaacaagcgctacgccgtccagtccgactggaaggctcactccaagacctgcggcacccgcgagtaccgctgcgactgcggcaccctcttctccaggagggacagcttcatcacccaccgcgccttctgcgacgcgctggcgcaggagagcggcaggattatgccacccatgggcgccgccctgtacgccgccgccggcgccggcatggccatcggcggcctcaccggcatggccgcctcccaccagctccaaccgttccaggaccactcctccgccatcaccaccgccgccaacgccgccgcgcagttcgaccacctcatggccacgtcgtccgccgcggccggctcccctgcgttccgcgccgcgcagccgacgtcgtcgtcctcctcgccgttctacctcggcggcggcggcgacgacggacaggcccacacctcgctgctccacggcaagccggcgttccacggcctaatgcagctgccggagcagcaggggagcaatggcggcggcctccttaacctgagctacttctccggcgggaacggcggccaccaccaccaccaccaggagggacgactcgtcttcccggatcagttcaacggcgtcgccgccgggaacggcgcccgcgccggcagcggcgagcacggcaacagcggtaacaacgccgactcggggagcatcttctccgggaacatgatgggcggcggcggcggcttctcgtccttgtacagctcgtccgaccagaccgtcccgccgccgcagatgtcggcgacggcgcttctccagaaggccgcacagatgggcgcgacgacgagcagcggcggcgccggcagcgtgaactcgctactcagaggtctcggaagcggcggcggcggcggcgctctgaacggtaagcccgccggagcagccgggttcatcatgtccggggagagctcgtcgaggagcactgcttctcagacggcggagaacgagagccagctccgggagctgatgatgaacacgctctcggcgaccgggggcggcaccggcgccggaacggtgttcgtcggcggcggcttccccggcgtggacgacggcaagctgagcacgagggacttcctcggcgtgagcggcggcgcgccggggcttcaactgcggcacggcggcgccgccgggatgggcatggccggctcactggaccaagagatgaagtaa

SEQ ID NO: 13223 - DNA, 4050 bp, Oryza sativa
  Clone ID: TFbOSC422884j.C1.o2.fg
atgtcgctgcagccgccggcggtggagccgccggagtggctgcggacgctgcccgtggcgccggagtaccacccgacgctggcggagttcgccgaccccatcgcctacatcctcaggatcgagccggaggcgtcccgctacggcatctgcaagatcgtgcccccgctcccgcggccccccgaggacgacaccttccgccgcctccaggccgccttcgccgccgcggcctcctccaatggcgacccctccccgaccttccccacgcggctccagcaggtcggcctctccgccaggaaccgccgcgccgccagccgccgggtgtgggagagcggggagcgctacaccctggaggcgttccgcgccaaggcggccgagttcgagcccccgaggcacgccgcgccgcccaggaaccccacccacctccagctcgaggccctcttctgggccgcctgcgcctccaggcccttcagcgtcgagtacggcaacgacatgcccggctccggcttcgcctcccccgacgagctccccgacgccgccaatgccaccgacgtcggggagacggagtggaacatgcgggtggcgccccgcgcccgggggtcgctgctccgcgccatggcccgcgacgtggcgggcgtcaccaccccgatgctgtacgtggccatgctctacagctggttcgcctggcacgtggaggaccacgagctccacagcctcaacttcctccacttcggcaaggccaagacctggtacggcgtcccccgcgacgccatgctcgccttcgaggagacggtgcgcgtccacggctacgccgacgacctcaacgccatcagagtggcctttcaaacgttaaatgagaagacaactgtcttatctcctgaggtgcttctttctgctggtgttccctgctgcagattggttcaaaaagcgggagaatttgttatcacattccctggagcttatcattcaggctttagccatggatttaattgtggggaagcatcaaatattgcaactccccattggttacaagtggctaaagaagctgcaatccggagggcttcaactaattgtggtccgatggtgtctcattatcagctgctttatgagctagcactctcattgcgtccaagggagcctaagaatttctattctgttccaagaagctcacgtttaagggacaagaataagaatgaaggtgatataatggtcaaagaaaattttgttggaagtgtaaccgaaaacaacaatttgcttagcgcccttctggataagaattcttgtataattgttccaaacgctgatttcttcgttccatcctttcctgttgcactggaatctgaagttactgttaaacaaaggtttacagctggtccctgcagtattagccagcaaggagcagaaaatatggctgctgatcatgtggctgtagacaaggttacagagattcaggacatgagtggatccttatatccttgtgaaaccagtcttgtgggctgtagcaatagaaaactttatgaaacaaaatatggccaacgggatgctgctgctttgtgcttatctacttcagagattcagagcagaggaattgatacagcaagatcacatccagcaggcgggatcttagatcaaggacggttgccatgtgtacagtgcggaatactaagctttgcatgtgtagccatcattcaacctagagaagcagcagtacagtttatcatgtctaaagagtgcatctcatcgagtgcaaaacaaggaggaattggtgcatctgatgatacctcaaactggattgaccagagtcatgagattagtcctccaccaggtccagcatctggaacagatgataatgtaaagcatgccgtaagtttggcccatgtctctgatcggtgtagagaactatatgccagcaatacagatggatgcacctctgctcttgggcttctagcttctgcatatgactcatcagactctgatgatgaaacaactgaggatgtttcaaaacatagcaagaaaaatgattcagtaaaccaaagcacggatcctcaaatcttggaaacatcagctagctgttccagtacagttcagtgtcaaaagacaaattcacacttgcatgaagaggaatgtgaggcaagagccacatcattgatgaaacctgtaagccataatagtaggcccattagtcagtctaacagggatacagatatcgaccattttatagaactgggaaagtcaggaacacagtgttcaggttatcttgatttggttgatgatctaactacatcagttttaaaatcctcttcagatacttgtgtaagtgcagctaaagcctcaatggatccagatgttttgaccatgctcagagaaaaaaaaacatgtgtttacaactacatgagcaactacaccaagggcataaactgcaaataccctagagcagagtcagcagcaaaagtcatagcagaagaacttggtatcaagcatgattggaaagatatcactttcaaagaagcaactgaagaggacgttaaaaagattcagttggctttacaggatgaagatgctgaacccactggcagtgactgggcagtcaaaatgggtatcaacatatattacagtgccaaacagagcaaatcaccactttacagcaagcagataccatacaattccatcatttataaggcatttggccaagaaaacccagacagtttgacagattatggatgtcaaaagtcaggctcaacaaagaaaaaggtggctgggtggtggtgtgggaaagtttggatgtcaaatcaagttcatccacttctagctcgtgagcgtgaagaacagaacagtagcgtagtgtacggcaaagcaatgttcactactatttcccatggcaaagtacaagatgaagcgtcaacaagatgcaatacaagcaaccgaaccccatcaagaagaacatcaagaagaaaaaagggggtatctgctgagaaatctaaaccaaaaaacaagagatccactgcttctgatgaagctagtatgctttgcagtggccttggaatgaactctggagttatccatgaccaaactgaaaactctgatgattatgacaaacatggcaatggagatgaaattgaggaaggaacaaatcctcagaaatatcaacaacgtaaattgcaaaacgtgaccaggaaatcaagttctaagaagcggaaggatgagaaaagaacagatagttttcatgaactatatgacgaggataatggtgtggattattggcttaacatgggtagtggagatgatgccacactaggtaactctcgacaacaaagtcctgatccagtgaaagtgaaatctggaggcaaattgcaaggtaagagaaaatctagcaagtacaagtccaatgatgatttgttgaatgaagaaaataagttacaaaagatgaacaaaaaatcaagctctaagaagcaaaagaatgataagataaatagacaacttcaagaagatcaaaccgaagatgaccatatggaccacttagttgacgtagcggttgcagatgaagtcacactagacaatgaggataaaattacagaagacaaaattgatgacgtgaaagtgaaatctagaggaaaatcgcaaaatggtaagagaaaaggcagcaaacatcaggctaccgatggtttgcgcgctggaaataaagtggccaaatttccgtgtgatatagaaggatgtgacatgagcttcagtacccagcaggacttgttattgcataagcgtgacatttgtcctgtcaaaggatgcaagaagaagttcttctgccacaagtacttgcttcagcaccggaaggtgcatatagatgaaaggccacttaagtgtacatggaaggggtgtaagaaggcattcaagtggccatgggcgaggacggagcacatgagagtccatacgggggtaagaccttacgagtgccaggaacctggctgtggtcagacattccgattcgtttcagatttcagccgccacaagagaaagactggccattcctctgataagagaagaaagaacagtacataa

SEQ ID NO: 13224 - DNA, 1416 bp, Oryza sativa
  Clone ID: TFbOSC900043j.C1.o14.fg
atgcggtttttggttctttggtgttcgcgtctctgttcttggttggttggtttggtgctgttcgtggctaatttctcggtgttgcttccggtttcggttgagttttgcttcctctcgagtgaggatttgagtgttttgcaagctgaagaaacaatagccgagttcatgtttgctttatcttacaatgttcatagaatatccagtttggccactgtagaaacgattgagtcgtcatctttccctgagcaacccggagtgccccacctattctgcttcctcttctccacacggatcgtcgagacaagaagcaagaagcatccagatatggcaccaagaggaaagccttggaagcattgttgcaacaagtgcgacaagagcttccgttcagggaatgctcttggaggccacatgtcctgccacaggagtgttggtaatcagccaaagagcacgtcaagcccacccactgttgttgatctgcacatgccactgctgagttcctgtgatgataatcttttgcttttgcccccagaaacacaatgccagatgtgctcaaaggtgttctccacctccggatcgctgagggagcacatgatgatgcacggtggggagaaggtggtggtcaaggctgaggaagaagctgccgggctgattgaagcactgggcattgctgatagcatgcaagatgtaatggtgttttcttcagtgaagcgtaagcgatcattccgatcaaagaggcagacaccagcactcagtttggaggagatagaggctgcagatgctctcctactgctttcagggtgctttgacaagacttcagcttatgaggattgctatctgggagatatagaagacagtagcttgagatccattgtgctgacagaggttaacatgaatgccgtggatcgttgttcggttcgatctgttggctccaaggagccaataaatgataataactcaggttacaaggattgctatggacaaagtgacaaggaaaactgtttgatcgttcccaaggaggagatggatccaaatgattttgatcatgagctggttagagatgctgctctcaggaaaccaagaaccgacaattcagatgaggagatgaagtttggtgatcttccagctgctgctatgaaggacaacagccaccgttgcaatacctgcggaaagtcatttggatcagggcaggcactgggaggccacatgcgacgtcattatgttcggaagtgcaatcgtcaacggggggttgctgaccacgctggttctgttcttatgaaagtgcaaaagctgaagcttagattggaccccatcttgtttgatgtcacacttccagctctcactgatggagactgctgcatttctgtgggtgtgaagcctgaacctcagctgtggtgtgtcacgagcaatcttcagtga

SEQ ID NO: 13225 - DNA, 699 bp, Oryza sativa
  Clone ID: TFbOSC100181j.C1.o3.fg
atgaagtgtagtggcatcttccaaggcggccaccatctcagcaatacaaccgctactgctaaaaactacgcactggaccacatgatggtgagctcggtgtccgacgccacgtcggaggaggacgtagcgctgtccctcatgatgctctcccgcgacacctggccagccacgccgccgccgccgccgccctaccgtctccgcggcgcaggctacgacgacgggagcgacgggggcgacgcacctccggctccggccgcagcggccgcgcagaagcggacgcggttccagtgccccgcatgcaagaaggtgttccgatcgtaccaggccctcggcggccatcgcgctagccacatgcgcggcggcaggggcggctgctgcgcgcctccgcctaaccctcctccttctcccgctacgcctctccagccattgccggagtgcgacggcggcgaggaggagggcgcgaagccgcatccgcacgagtgcccctactgcttccgcgtgttcgcgtccggccaagctctgggcggccacaagcggtcccagctgtgctcagccgcggcggcggccgcatcgggcgacgatattccagccatgattaaaagcaacggcttcattgatctgaacctcccggcgccgttcgacgacgtggagctctccgccgtttcagatcctttcctctcctcgaagccaggttcttga

SEQ ID NO: 13226 - DNA, 745 bp, Oryza sativa
  Clone ID: TFbOSC400958j.C1.o2.np
gaagccacgagccaaaccctcacgttggaggagtcggagccccaggcgtcgcctcgtccggtccccccatgcaactgccccaaatccctcggcggcggcgccagatccgccgccgccgccgccgtggtcgtcgtcgtggtcgtcgtcgccgccagatccgccgccaccggtgctctctgccgccgagctcgcgccggagaggggaggggagcagccggtgagctccccgccaccagatccgcccgcggcgcctgaggagctccgcttccggtgcaccgtctgcgggaaggccttcgcctcgtaccaggcgctcggcggacacaagtccagccaccggaagccgccttccccgggagaccactacggcgccgccgccgcggcgcagcagctggcatccgctggtgactcgaaggaggactcggcgtcgtcagcggccgggagcactggcccgcaccggtgcaccatctgcaggaggagcttcgcgacggggcaggcgctcggcggccacaagcgctgccactactgggacggcacgtcggtgtccgtctccgtctcggcgtccgcgtcggccgcctcgtcggccgtcacggcttcggcgtcaggttccgggtcgtcgagcgtgaggaactttgacctcaacctgaaaccggtgccggagacggtggccgctggcgtcagaaggtggggagaggaggaggaggtgcagagccctttgccgttcaagaagcgccggctgtcaagccca

SEQ ID NO: 13227 - DNA, 1677 bp, Oryza sativa
  Clone ID: TFbOSC101382j.C1.o4.fg
atgcagccgtcgccgtcatcacctcgggcaccgccgccgacggcggcgcaggcgtcggggtacaagcacttctgcagagtctgcaacaaggggttcacgtgcggaagcgccctaggcgggcacatgagggcccacggcgtcggcgacggcgatgggttgggtgccgatgatgacgacgacgacgacgacgattcgctcggcgatgaggccgtgcggcgtgcgcgcggcggggcagatgatccttggaacgcgggcggcccgtcgtcgtcaggggcagcgacacacgtctacgagctccgcaccaatcctaaccgggtcacgaggagccgccaggtgtgcaagaactgcgggaaggagttcacgtcgtgggagcatttcctcgagcacggcaagtgcagctccggcgaggacgacgacgacgaggacgacgtggatcactcgctgcaaccgtggtcgccttcgcccgaggccgacggcgaagaggattctgcaccggccgccggttggttgaaagggaagcgctcgcgtcgctgcaagggcacaggagtcgatttgtcaccgacaccctcagcgtgcgctgccggcgaggaggaggacctggccaattgcctggtcatgctctcgtcgtccaaggtagatcaggcaggcgtcactgaagcagaacaacggtcatcttcttccgcgagtaaggaacataagagactgatcacgttcatggagccgacgacgtatgtactggatacagtgatggcgcttcccccgccggcgccggcgccacagtatgtctcgaccgtgcctcgaggcatgttcgagtgcaaggcgtgcaagaaggttttctcttctcaccaagctctcggcgggcaccgtgccagccacaagaaggtgaagggctgcttcgctgccaagctggagagcaacgccgcagaggtggctgagccatcacaccatgcagaggtcgctgatcggagcgaggacaatcccgccaaggccacttctgatgccaggaggaacgtgcacgcaagcatcgacggtgatggaaacgccggcacgagcgatgccgcggcagaactgtcgatggccatcgtgcccatagaaccgccggtcgccgcgctcgccgctgcaccgttgaagaagaagggcaagatgcacgaatgctcggtctgccatcgactgttcacctccgggcaggcgcttggaggccacaaacggtgccactggctgacgtcaagttcggcggatcacaccgcctcagtcccacccctagccgacgaccttgtcccgctctcgttccggccaatgttggacgcaccggagcccgctctcgacctcagcatcgcggcgaacccgccactgctggcctcggccgcaacagtccgtccgaaggtcggcggcagctcgtttcatctcgacgcgccaccaccggtatacatcccatcgtcgccggcgatacccagccaacggaacaaggctaccgcgacaaccggcagccagaacgccaacgacgcggtcgggttaagcaccgccgcagcagaggacgaggcggacagcaccaccgtcaagagagcgaggcttagcgatctcaaggacgtgagcatggcaggggagacgacaccgtggctgcaagtcggcattggctcctcgtctcgcgggggtgctgatgataacgacaaggagtga

SEQ ID NO: 13228 - DNA, 2181 bp, Oryza sativa
  Clone ID: TFbOSC400149j.C1.o10.gm
atggcgatggtcgtcgcggggagccatcggccgccgccgccgccgcagtcgctgcggctggtcccgccaccgccgccgcagcctcctcctcctcctctgacgtacaggcaccactgcaaggtgtgcaagaaggggttcatgtgcggtcgcgcgctcggcggccacatgagggcgcacggcatcggcgacgacaacgacacgatggacgacgacgacggccgcgatgatgatcattcgctgtcaccgtgcgatggtggtggcgagccgtcggaggcagccgggagcccgacgacgacgacgacgaaacgtatgtacgcgctgcggaccaatcccgggcggccaaggaactgcaggacatgcgagaactgcgggaaggagttcacgtcgtggaagacgttgctggatcatggcaggtgcggccttgacgaggaggacggtcgcctcgacgtctcgctccgttcgccgccgcttcacgacggtggcgacgaaaacgacggcgaggaggaggaggagggggacgacctcacactggctgcgggcgggtggtcgaaagggaagcgctcgcgccgtgctaaagtgatggccgtcgggaccggctccgtgtccgagctacagctgccggctccgtctaccgaagaggaagacctcgccaactttctcgtgatgctctcttcttcttcgtcatcatcgtcgcgtgttgcacagccagccatcgtcgtcgacgacgcggaccaagagtcctgcgcatcaggtagcaaggacgaggagaggaacaggttcttggtgccgcagccaatctcgatggcagcccccatgatggctcagatgacagtgatcgctccgcaagtggtgccacagcacatctcgaccgtgccacgtggcatgttcgagtgcaaggcatgcaagaaggtgtttacatcgcaccaggctcttggcgggcaccgtgccagccacaagaaggtgaaaggatgcttcgccgcgaagctcgagagcagccgcaacgagactagtcagactcagactcagcagcaacacgtctcagccgctcctcatgacaataccagggccaccacctctcatgtcatcaccagcgatatcagcatggatgcaaacacgatcggtgccagtgctgatgctgacggcaaggcagcggcaagcggcgttggcgcaggtgaaattgtcctcgccggagcttcgtcgacggatatggccatgatgatgtcggtcgaggacttcgcgccgacaccgttggcgccatccgccgtctcaccgttcaagaagaaggggaaggtgcacgagtgctccatctgccaccgggtgttcacgtcggggcaagcgctcggcggccacaagcgatgccactggctgacgtcgggcgcaacggacccgctcacgaagctccagcccgtcgcccaagaccacgccatgatggccgccatgtgccaccagctcacgctcgggcgcccaatattcgaccctaccgaccagcggatactagaccttaacgtgccgacgaacccactggcagaagcggtcgcggccaggcagcagcagcagcagcaggtcgccgctctcaacgacggcgcactctgcctcaacgcggcggcgtcggtgtacctgcagtcctggacagggcacagcaacgggagccacgtgaacaagaccaccgcgacgagcagccgcatcaacgacgcggccggcggcgtgaccacggaggacgatgaagcggacagcacgagcgccaagagagccaagatcggcgacctcaaggacatgaaagtggcaggggagtcgttgccctggctgcaggatcaaactgactggcacgcccgcatctcatcaatctttgtacctgcacaggagctaagcagatctcctaggccggagcaaactgactggcacgcccgcatctcatcaatctttggtcctgcacaggagctaagcagatctcctaggccgcgctactggatgactgatcttctccagaagcgtggcatcgatagtcacccggtctgttccttttgtgctcaggagcttgagatgacgaaccacattctgctcgactgcgtgttcgcttggcaagtctggctccgtgtgctgtcgtcttctggttgggctgccctctctccaccctgtggggttctagagtcatcctctcagaaggccatctatggtcgttag

SEQ ID NO: 13229 - DNA, 1803 bp, Oryza sativa
  Clone ID: TFbOSC4083j.C1.o1.fg
atggcgatggtcgtcgcggggagccatcggccgccgccgccgccgcagtcgctgcggctggtcccgccaccgccgccgcagcctcctcctcctcctctgacgtacaggcaccactgcaaggtgtgcaagaaggggttcatgtgcggtcgcgcgctcggcggccacatgagggcgcacggcatcggcgacgacaacgacacgatggacgacgacgacggccgcgatgatgatcattcgctgtcaccgtgcgatggtggtggcgagccgtcggaggcagccgggagcccgacgacgacgacgacgaaacgtatgtacgcgctgcggaccaatcccgggcggccaaggaactgcaggacatgcgagaactgcgggaaggagttcacgtcgtggaagacgttgctggatcatggcaggtgcggccttgacgaggaggacggtcgcctcgacgtctcgctccgttcgccgccgcttcacgacggtggcgacgaaaacgacggcgaggaggaggaggagggggacgacctcacactggctgcgggcgggtggtcgaaagggaagcgctcgcgccgtgctaaagtgatggccgtcgggaccggctccgtgtccgagctacagctgccggctccgtctaccgaagaggaagacctcgccaactttctcgtgatgctctcttcttcttcgtcatcatcgtcgcgtgttgcacagccagccatcgtcgtcgacgacgcggaccaagagtcctgcgcatcagcccccatgatggctcagatgacagtgatcgctccgcaagtggtgccacagcacatctcgaccgtgccacgtggcatgttcgagtgcaaggcatgcaagaaggtgtttacatcgcaccaggctcttggcgggcaccgtgccagccacaagaaggtgaaaggatgcttcgccgcgaagctcgagagcagccgcaacgagactagtcagactcagactcagcagcaacacgtctcagccgctcctcatgacaataccagggccaccacctctcatgtcatcaccagcgatatcagcatggatgcaaacacgatcggtgccagtgctgatgctgacggcaaggcagcggcaagcggcgttggcgcaggtgaaattgtcctcgccggagcttcgtcgacggatatggccatgatgatgtcggtcgaggacttcgcgccgacaccgttggcgccatccgccgtctcaccgttcaagaagaaggggaaggtgcacgagtgctccatctgccaccgggtgttcacgtcggggcaagcgctcggcggccacaagcgatgccactggctgacgtcgggcgcaacggacccgctcacgaagctccagcccgtcgcccaagaccacgccatgatggccgccatgtgccaccagctcacgctcgggcgcccaatattcgaccctaccgaccagcggatactagaccttaacgtgccgacgaacccactggcagaagcggtcgcggccaggcagcagcagcagcagcaggtcgccgctctcaacgacggcgcactctgcctcaacgcggcggcgtcggtgtacctgcagtcctggacagggcacagcaacgggagccacgtgaacaagaccaccgcgacgagcagccgcatcaacgacgcggccggcggcgtgaccacggaggacgatgaagcggacagcacgagcgccaagagagccaagatcggcgacctcaaggacatgaaagtggcaggggagtcgttgccctggctgcaggttggcatcggaatttcatcagagagcaaagaaaagaacactcaagagtga

SEQ ID NO: 13230 - DNA, 1026 bp, Oryza sativa
  Clone ID: TFbOSC408704j.C1.o4.gm
atgaccaagcatccgagggacggcgaggtgatcagcctctcgctgtcgctcacgctcggcgctgccgcggatagcggcgagcggaagaagccgcggcgcgggtcgtcgccggcggcgtccgggagtggggacttcgtctgcaagacgtgcagccgcgcgttcccgtcgttccaggcgctgggcggccaccggaccagccacctgcgcggccgccacgggctcgcgctcggcctcgccgccgccacggccaaggagaccaccaagaaggtgcaggagaagccggcggcggcggcgacccacgagtgccacatctgcggccaaggcttcgagatgggccaggcgctcggcggccacatgcgccgccaccgcgaggaggccgccgccgccgccgcggcgatagagattttaccattatctggtggagggcaccgcgcggggccaaatctggaggtcttcgagctcggacatgttagatctggcattggagccaccacccttgccgtcactaaagaatccgacacaagagggctggggataaacggggcctctagctgccaagcactagagggggggagggcgaacgcgacgtcgggtgtggcggtgagcgaggagtgcaaggcgaggttccaggagctgagggcggggcgggcccacaggttcgtggtgttcaagatcgacgacgcgatgcggcaggtggtggtcgacagggtgggcccacgcgacgccggcttcgacgagctcaccgccagcctccccgccgacggctgccgctacgccgtgtacgaccacgacttcaccgtcagcgacgccacggccacggcggccgccggcgagggcggcgaggcgccgcgcagcaagatcttcttcgtgtcgtggtcgccggcggcggcggacgtgaggagcaagatggtgtacgcgagctccaacgaagggttcaagaaggagctcgacggcgtccagatcgacctgcaggccaccgaccccagcgagctcaccctcgacgtgctcaaggaccacacctcctaa

SEQ ID NO: 13231 - DNA, 522 bp, Oryza sativa
  Clone ID: TFbOSC408704j.C1.o4.gp
ggcgcgtgcaccgccgcggcggcggcggcggcctcctcgcggtggcggcgcatgtggccgccgagcgcctggcccatctcgaagccttggccgcagatgtggcactcgtgggtcgccgccgccgccggcttctcctgcaccttcttggtggtctccttggccgtggcggcggcgaggccgagcgcgagcccgtggcggccgcgcaggtggctggtccggtggccgcccagcgcctggaacgacgggaacgcgcggctgcacgtcttgcagacgaagtccccactcccggacgccgccggcgacgacccgcgccgcggcttcttccgctcgccgctatccgcggcagcgccgagcgtgagcgacagcgagaggctgatcacctcgccgtccctcggatgcttggtcatggtcaagaaagaaaccgaacgaactggagatcgatcgaacacaagatgatcgacgagacgagttttagctagctagcttctgactcgatcgagagaatggttaatattgctgtgc

SEQ ID NO: 13232 - DNA, 1272 bp, Oryza sativa
  Clone ID: TFbOSC400255j.C1.o23.fg
atggatgcggggggagtggagctctctggcgtgatgcatcggtgtagggtgtgcgggaaggggttctcgtgcggccgctcgctcggtggccacatgcggtcgcatatctcgtttggggaggcggcggcggagctcggcgccaatggcggcgtggttgggtacgggctgagggagaatcccaagaagacgaggcggctgtctgagtttgatggtgatggtgatggtgaggaggtggaggtggaggagggtggcgatggcggcgagctcagggcgtgccgggagtgcggcaagctgttctcgtcgtggcgctcgctgttcgggcacatgcggcgccatgcatccggcggcggagggaggaatcacgacgacgacgacgatgacgacgtggatgtggaggatgagttcggcggcggggaggaggaggagattgtggcgccggcgccggcggcggtgactgtgatcgcggcgccgccgaggcggaggcggcggtcgatgcgcgtggcggcgcccgcgcccgcgcccgcgccgccgcggccggtgctgctgggcgggttcgagaaggaacaggaggacgtcgcgctcggcctcctgatgctctcgcgcgacaccggcgtgtggcgctcgccggtcaaggcggagacgttcgagaagccggagcagaagaagaagaaggcgacggcgaagcagccgccgccgctacccctcccaagaaacggctacggctacggctacaactccgacgaggattcagctctgctccagtacggcggcgacgtcgcgaagagcaggaagcgaagggctagctaccactctcccaattccatctcctcgaagaagaagcagcagccgcgcgcggcggcgccggcgaagcggacacggtacgagtgcccggggtgcggcaaggtgttcgcctcctaccaggcgcttggcggccaccgcgcgagccacaagcggatcaacactagctgcagcgcccccaaggtctcccccgccaccgccgcggcggcggcgcccgcgccggagccgagctcggagacgtacgcctcgctgagcaccctctccccctcggcgtcgccgggctcggcggccgccggcattggcgaccgcaaggccaacaacaagtcgtcagcggaggaggagaagttcggcggcgcgtgctcctccgacgagctctacgccgagctggagctggagcagcgctcgccggcggcggccgcggggtttcttgatctcaacttcccgccggcctcatcggaggttggcgtgaactga

SEQ ID NO: 13233 - DNA, 2517 bp, Oryza sativa
  Clone ID: TFbOSC401731j.C1.o37.gm
atgaatagaagcgtttgccaccaccttctcacccagtgcaaaaccataagagagctccaaagaatccacgcccaggccctcacacacggcctccaccccaaccagcagtccatctcctgcaaaatcttccggtcctatgccgagtttggccgaccggctgacgcaggcaggttgtttgatgaaatcccccaccctgacattatctccttcaccagcctcatgtcccttcatctcaagttagatcaccactggaaagctatatccgtgttctctcacgccattgcttctggccaccgccctgatggctttgctgctgtcggtgccctctcggcctctggtggattaggggatcagcgtattggtagcgtggtgcatggcctgatttttcggtgtggattggactctgagttggtcgtttgtaatgctttggttgatatgtattgtcgatgtggcaagtttgagcctgcacggactgtatttgatagaatgcttgtaaaagatgaggtcacttggggtagcatgctgtatggttacatgaagtgtgttggtgtggattcagctttgtcattcttttatcagatgcctatgaagagcactgtttcttggacagcactgatcactggtcatgttcaagacaagcagcctatccaagctcttgagctatttggtaagatgcttttggagggccaccgtcctaaccatattacaattgtaggggtgctatcagcttgtgctgatattggtgctttggatcttggacgtgccattcatggatatggaagcaaatctaatgccaccaccaatataattgttacaaatgctctgatggatatgtatgcaaagagtggaagcattgctagtgcattttctgtatttgaagaagttcagatgaaggacgcattcacatggacaactatgatttcaagtttcactgtccagggtaatgggaggaaagctgttgagctcttttgggatatgctaaggtctgggatacttccaaacagtgtgacattcgtctcagttttgtcagcatgcagccatgctgggttaatacaagaaggcagagagttatttgataaaatgcgtgaagtctaccatattgatccccggcttgagcactatggatgcatggttgatctgttaggacggggtggacttctagaagaagcagaagctctgatagatcatatggatgtcgagcctgatattgttatttggaggtcacttcttagtgcatgcctagctcatggcaatgatagattagctgagattgctggaatggaaattataaagagagaacctggggatgatggggtttatgtgcttctttggaacatgaagttcagtataaaggcaaatatgcaaaggcatgtaaaggaaatccatgaggatgaaactgctactaaaagcaaccggcagtttgtttgcaaggaggagggctgtaacaaggttttcaagtatgcttcaaagatgaagaaacatgaagaatcacatgtgaaattggactacgtggaagtagtctgctgtgaaccaggctgcatgaagacattcacaaatgttgaatgtttgagggctcataatcaggcttgccatcaatatgttcagtgtgatatctgtggggaaaaacacctgaagaagaacattaaaaggcacctacgagcccatgaggaggtgccatctactgaaaggataaaatgcagttttgagggctgtgaatgctctttttccaatgcgtcccatgatcaagtaaaacctttcgcatgtcgattcacggggtgtgaaaaggtgtttccatacaagcatgtcagggacaaccatgagaaatccagcgctcatgtatacactcaggcaaacttcacggagatggacgagcagttactctcgtgtccgagaggtggacggaagaggaaagctgtgactgtcgaaactcttacgcgcaagagggtgaccatgcacggcgacgcttcgtcgttggacaatggaactgagtacctgcgctggttgctttctggtgaatccggaagccgcataggccgtcgcagggcccatccaaactccatcacgcccacccttgcctggatgcgtcggctagaggaaagctacactacaagcccagccgttgcccacgctggcttgtgggctgacgtcagcacgggggaaagcggcgccgacatgcggggcccaccggtcagcggctcgggagagggaggaaggggcgccggcacgcggggcccaccggtcagcgactcaagggggagggcggttcaccgtggaccaggaccacgcgggtggtccaccgccggtccacggaaccgacggcccagatcgccctcggggccgatcggacgggcggcgatggaggcggccgccgggctcggctcggcatcaaagccgaccggccggccagggctagcggtgacggcacgcggccgacgacggcggcgaccggcggcatgggaggcggtggcggcggccgaaggcgacggcgcgcgacttgaagcggcggcgcggcactag

SEQ ID NO: 13234 - DNA, 561 bp, Oryza sativa
  Clone ID: TFbOSC408704j.C1.o7.fg
atgaagaggctgacattcggcgcggaaccggagatggtggacagcgcaagcatagctcaggaggtcatgctgctcctcgcgcggagcggcggcggcggcgccggctatgtcgtcggccacggcggcgaggctccgcgcgtcttcgagtgcaagacgtgcaggcgccggttcccgtcgttccaggcgctcggcggccaccgcgcgagccacaagcggccgcggggtggtggcggtggtggcgcggccgccgccgtagccgccgcggcgggcgagggggaggcgggtgtcgcgctctcgctcgcggcggggacgccggccgtgaaggcctcacgcgcgcacgggtgcgcggtgtgcggcgtggagttcgcgctcgggcaggcgctcggcggccacatgcggcggcaccgcatcgccggcgccgaggccgacgaggcggtgagcgcccgcggcggcgagccggcgcccgagcggaatccacgcgaggcgaggggtgtggttggcttggacctgaacgctgctcccgccgacgacacaggcctcctgctggtagactgcctgtaa

SEQ ID NO: 13235 - DNA, 654 bp, Oryza sativa
  Clone ID: TFbOSC5483j.C1.o4.fg
atgagcaagaggagcaggagcatgtgggacatgcaggagttcgtcggcagcgtggacacggcccgcgtgctgatgctcctcgcgcagcagagccagcacggcctgctgggcggcggcggcttcgccgccggcgcgcagccggtggtggtgcgcggcggcgcgcacgaccgcgtgttcgagtgcaagacgtgcaaccggcagttcccgacgttccaggcgctcgggggccaccgcgccagccacaagcggccgaggcagcagcagcagcacgcgctcggcggcggcgccggcgccgacgacgcggggctatgcctcgggaggcagccgacgccgccgcggccgcagccggcgaagccgagggtgcacgagtgccccgtctgcgggctcgagttccccatcgggcaggcgctcggcgggcacatgcgtcggcaccgcgcggaggccgaggcggcggcgacaacgacgacgacgacgacgaagaacggcgacgtaggcaaggcggcggccgtgaaggcctgcgacggcggcggtgtctgcctggacttgaacctgacgccgtcggagaaccgcgcaaagtgccggaacgtggtgggtctcggcgccggcgggcagggcgtacacaaggcgctcgccatgttggattgtttcctttga

SEQ ID NO: 13236 - DNA, 1320 bp, Oryza sativa
  Clone ID: TFbOSC900369j.C1.o21.fg
atggcctctgcagagagaagaataaggatgtggtggcgcacagctgggaggcctaagcatctatggggtcgccggagcatgctctacatgggccacagccgcatctacatggaccgctactacgaccccatcgagctccatgggcagccgccgccactgctcatgattccaggcggtggcggcggcggcggcggcggcggaattagcccttacttggtgcagagccagcatgggcatggtggcggcgtcgacggcatggagatggaggagggcggcggcttcatgggcgagcagccacagtgccacccgctgctctacaacctgtccgtgctcaaggacagggtgcagcagctgcacccgctcgttggcctcgccgtcgcccacaacgcccacgcccacggccccctcgacgtctccgccgccgacgccatcatccaggaaatcgtcgccgccgcctcctccatgatgtacgccttccagctgctctgcgacctcggcacggcgccaaccaccgcgccatcacaggagaccgccgccgcctccgccgttgttgtcaagaacaacgaccatgccgccgatgccggtcagatggaggacgaccatctcatgcagcagcagtggcagcagaacggcagccgccagcacgattacagcagccatgcccatgcgccgccggtgttccacagcgaaacggcggcaccggcaggcgcgacgtcggcgacggacacgatcatcgagctggacgcggcggagctgcttgccaagtacacgcactactgccaggtgtgcggcaaggggttcaagcgcgacgccaacctgcggatgcacatgcgcgcgcacggcgacgagtacaagagcaaggcggcgctgtccaatccgaccaagctgctcgccaagggaggcgacgagacgatggcggcggcggcgaggaagtactcgtgcccgcaggagggttgccggtggaacaggaggcacgccaagttccagccgctcaagtcggtgatctgcgcaaagaaccactacaagcgcagccattgccccaagatgtacgtgtgcaaccgctgcggccgcaagcacttctccgtcctctccgacctccgcacccacgagaagcactgcggcgaccaccgctggctctgctcctgcggcacctccttctcccgcaaggacaagcttatcggccatgtctccctcttcgccggccaccagccggtcatgccgctcgacgccccccgcgccggcaagaggcagcgatcgtcctcggcgtccgtcgccgggaacattgacgacaccaccggcattggcatgggcgccgcctga

SEQ ID NO: 13237 - DNA, 1614 bp, Oryza sativa
  Clone ID: TFbOSC29140j.C1.o1.fg
atggcggccgcctcgtccgcacccttctttgggctcggcgacacgcagatgccgccgccgcagaatcccaccaatccagcccttcaccaccaccccaaccccttccccgctcccgtcgacgccgccgcgcccgcgccgaaaaagaagaggaaccagcctggaaacccaagcaagtatccagatgcgaaggtgatagcgctgtcgccgcggacgctgatggcgaccaacaggttcgtgtgcgaggtgtgcaacaaggggttccagcgggagcagaacctgcagctgcaccggggagggcacaacctgccgtggaagctgaagcagaagaaccccaaggaggctcgccggcgcgtgtacctgtgcccgaagccgtcgtgcgtccaccacgacccgtcgcgggccctcggcgacctcaccgggatcaagaagcactactgccgcaagcacggcgagaagaagtggcgctgcgacaagtgctccaagcgctacgccgtgcagtccgactggaaggcccactccaagacctgcggcacccgcgagtaccgctgcgactgcggcaccctcttctccaggagggacagcttcatcacccaccgcgccttctgcgacgcgctggcgcaggagaacgcgcgcatgccgcccatcggcgccggcgtatacggcggcgccggcaacatgacacttgggctcaccggcatggccgccccgcaacttcccgccggcttccctgatcaggccggccagccgtcggcgtcggccggcgatgtcctccgcctcggcggcggcagcaatggcgcctctcagtttgatcacctcatggcctcgtcgtcgggctcctccatgttccgctcgcagggatcgtcgtcctcctcgttctacctcgccaatggcgccgcccatcatgctcccgctcaggacttcggcccggaggacggccagtctcaggccggccagggctcgctgctccacggcaagccggcggcgttccatgacctgatgcagctccccgtgcagcaccagcaaagcggcaatggtaacctcctcaaccttggcttcttctccggcagcaatggcggcgtcgaccagttcaacggcggcgctggaaacggcgggcagggcagcatcgttacttctagcggcctcgccggcaaccacggcggcggcggcggcggcttcccttctctgtacaactcgtccgaaccggccggtacactgccgcagatgtcggcgacggcgctcttgcagaaggctgcccagatgggtgcaacgacgagcagctacaacgccggcggcgccggtggcgcgagctcgctgctccgtggagctagctcccacgggatcagcgtcggtgaagggccggccaacgagaggtcgtcgtaccagaatctcatcatgggctccatggcgagcggcggcggtggcgcgggtttcgccggtagcttctccggcgcgtctggattcggtggcgccgtcgacgacggcaagctgagcacgagggacttcctcggcgtcggcgtcgtccagggcatcagcggctcggcggcaatggggccgccgcgccatggcgcggccggcctccacgtcggctcactggacccggcaaacatgaactga

SEQ ID NO: 13238 - DNA, 933 bp, Oryza sativa
  Clone ID: TFbOSC402101j.C1.o5.fg
atgtccgtggaggacaagcacgccggggtcgtcaagcgcaagcgcaccaagaggccgcgccaccacgcggcgccggcctcctcctccgagagcaccaccaccgaggaggaggacatggcgcactgcctcatcctgcttgctcagggcgccgccgtccctccggtgctcgccgcgcccgcgcccgcgccgccgccgccgcagccgccggtggtggtggtgaagagcgagaggtacacgagccgcaagtacacggaggcggccaccacggcggacggcgtcagggccgggttctacgtctacgagtgcaagacgtgcaacaagtgcttccccaccttccaagccctcggcggccaccgcgccagccacaagaagcctcgcctccccggcgccgacgacgacaacgttaacaacgtcaccaacaccaacgccatcgtcgtcaagtccaagccgccgctgacgacgacgacgacgccgtcggcaccgtctccaccgccgcctcaggcggacgccgtcgtggtcccggacgtcaccaccgtgctgagcctgaacaacgtggccgccgccggcagcataatcaacaagctgagggtgcacgagtgctcgatatgcggcgccgagttcggctccgggcaggcgctgggcggccacatgcggcgccaccggccgctgcacgcgccgccggagcgcgcggcgaccacggccgccaccaccgccgccaccgccaccgccccggacaccaagaaagagggaagcacgagcatcaacctggagctcgacctcaacctgccggcgccgtccgacgaggagtccgtgtctcctccgccgccgccgccgccgccggtgctcctggctctcggcgggcagttcaacgacggcaagaagccaattctgcagctcaccgcctccgccgcgctggtcggctgccattattga

SEQ ID NO: 13239 - DNA, 4416 bp, Oryza sativa
  Clone ID: TFbOSC19412j.C1.o20.fg
atgccgccccagcctccgccggcggcgtcggcgtcggccagtgccccggatcccgccgtcccggcttggctcagggggctcccccgcgcgcccgagtaccgcccgacggagtccgagttcgccgaccccatcgccttcctctcccgcgtggagcgcgaggccgccgcctacggcatctgcaaggtcatcccgccccacccgcgcccttcccgccgcttcgtcttcgcccacctcaaccgctccctcgtctcctcctgcgacgcccccgcgccctctcccgccgccgcctccgactcgtccattcctccatcctcctcctcgccgccgccggtctccgccgcggtgttcacgacacggcaccaggagctcggcaacccgcggcgtggacgcccgacgccgcaggtgcttaagcaggtgtggcagagtggggagcggtacacgctcgaccagtttgagtccaagtcccgcgccttctcaaagacgcacctcgctggactccacgaaccgactgcgctcgcggtggaatcactcttctggaaggcgtcggcggaccgtcctatctatattgagtacgccaatgatgtccctggctctgggtttgctgcacccgtgcagttgcaacgcaagaagaagcagaaaagagagactgccccgatggacgaatgggagaagagttcaggctggaggctgtcaaatagcccatggaacctgcaagcaattgcgcgggctcctggttcgctcacacggtttatgcctgacgatgttcctggggtgacttctccaatggtttacattggcatgctgttcagctggtttgcgtggcatgtggaggatcatgatctgcatagtctcaacttcctccacactggcgcacctaagacgtggtatgcggttcctggtgatagggctgttgagcttgaggaagttatccgtgtacatggctatggaggcaacactgatcggatcgcgtcactagcagtgcttggtgagaaaacaacactaatgtccccagaggtccttatagacaatggtgtgccctgctgtagattggtgcaatatcctggtgagtttgtggtgacattcccaagggcttaccatgtcgggtttagccatggattcaattgtggagaagctgccaattttgcgactccccaatggttgaagtttgctaaagaggctgcagttcgaagggctgtgatgaattatcttccaatgctctcccatcaacaactattgtacttgctagcagtttcatttatatccaggaaccctagagaactactgtctggaatccgaacttctcgtctaagagatcgtaaaaaagaagaccgagaactgttggtcaaacaggaattcttgcaggatatgattagtgaaaatgaacttatatgttcatttcttggaaaaaaatcggttgataatgttgttctatgggagcctgacttgctgccatcgcttaccgctctacacccctgctcgtcttgctcaaaagctcctgaaaagaagggtgaagatggtcccagaattggatctacccaatccagctcaaaagatgacagctcatctgatggtactgcatgtatgactgggacacaatctaaaggcttgtctatggatagcaaacaagctcctgagggagaaaagcttgataccgatgacggagatgacctgccttttgatttgagcattgattctggttcattgacatgtgttgcatgtgggattcttggctatccatttatggcgattttgcaaccttccagaaaagcactggaagaaatttcccttgttgataaggaaagatataaactgagttgtgaaaaagagatttgttcaaatgtgcttccgtgctctcctaatgatggtagctccggatgcccactcatcgccaatagatcgtccagccctgtggaaaatgctaacctcagtcatcaggatgtgaagccaattagaagtgacatttctttgatgggaaaggagtttaatggaaccctagggaaacatattggcacttcctgttcttgtagcagtgaaaataccattcatccttacggtgacacagaaacccctgagaagaaaataccaagtgattgccctggctcagagttgagtaaacaatcaggcagaggtgatgttaatgtaccagatgtcgaaggtagtgaggaaactatcagctggaatacaggctgtgcatttgcacggcctcggatcttttgcttacaacatgcccttgagattgaggagttgcttgcgagcaaaggtggagttcatgccctcatcatatgccatgcagattatgtcaaactaaaagcacttgcaatatcaatagctgaggaaattgagtttcagtttgactataaagatgttgcactagcaaatgcgtccaagtctaatttgcatctaattaatatttcaattgatgatgagggatatgaggaagagggaacagattggacatcacggatgggtctaaacctcaaacatagttccaagattaggaaagaaacaccagagagtcaagaacagcctcctttatcattttggggattattttccaagccatcacctatttcagttgtttcaaacttgaaatggctttgcaggaaagcacggactccatataaggtcattggttatgcttccagccctgatgttgtggcaactccagacaaagttaagcccgcagttacaaaaactcagatagacacttctggaaatgctcatgaaaacattggaagtgaacaaactctgcaacaagattgtgtcctgcaagaatccaatgatgtagctgatatgtgcaagcgtcccaaggtgaatgatcaggatggacattctcttattaatattccaattgctgttgctgaatatcctatgatgcatcaagtttgtgagcgtccagattcacccacaactgttgcagtgtcagctggcaaacctaccagagaacaatgtggtgctgaatcaactgagttgagtactgtaaaacagttcctggacaatgggcttatcgctgagggaggcagcatgaacttcataagtaatcatgagcacttagaatctgacaatgcaacttcagtgtgcaaagatgaacaattgcaagttcaacaagatcagttggccatggtactttgtaataatcccaacacagaattggttgcaggagaattacatgggggggcagcatcatcaacccttgaaaatgaggatagctgtggtaatacgtcttactgttctgacactgtattaaagaacagcgaacctgatacagatgatcaacctgaaacatgtgatcgtagtgttgttcttgtaacaccaaagtcgagctgtgaccagatgatttctagcagtgacagaagttgcagtctgaccttggactgccctgtctccactgatgctgccttttcaagcgaaaagctgtctatggctcatgatttgatgggcagtgagttgcaggcagtccataattcaaaggctgaggttgtggccagtttgactgatgtcaagggtgctaagctcaatagcattcataccacacaattacctcatgaatctccaagcagtgatttcatcatttcagaaggtgcgcaatctgcttcaacaactgcaattcccagaaaaaatggaacatccatgcacacagagtcaaattcaattgatattttacttggagttctagccgatgaatctaaggtctcttctggaaaggatgaggttggcaaagcttccttgacattgatgacactggctggcaatgaccaatctgcagatgatgtaactcaggatgaagttgcagagatcactgatccgtcgcatggcttctgctcatcagacatagtgtctagaagcattggaagttcaaacagaacaaatatcatatgttatgccagacgcaaacacaaaagaaagagcggatctgagttcaatattaatagtccccaaagcttggggagctttgtccgctctccatgtgaaagcttgagaccaaggactagacctgcgattgttgaagacatgacaaacgaaacaaaaactgcagaagcttcaactgcaaataagaggaagaaggcaaaggtggaagcatttcagtgtgacatagaattttgtgacatgacatttgagactaaagctgaacttcgtgctcaccaacgcaatatctgcaccgacgagtcttgtggcaagcgcttcagctctcacaaatacctgaagcgtcatcagtgtgtacacagagatgagaggccattcaaatgcccctgggatggttgtccaatgactttcaagtggttgtgggcgcaaactgagcatatcagagtccatacaggcgagcgaccgtacaagtgctcggctcctgactgtggccagagtttcagatatgtctcagattatagtcgccatagaaagaagtttaatcattattga

SEQ ID NO: 13240 - DNA, 1617 bp, Oryza sativa
  Clone ID: TFbOSC400277j.C1.o23.fg
atggctaatgccagagttatgcgtgatggcgagatgatcgatggcgacggtgaccgatcgagcgttcgttcgcgtggtggtgcagatcctgatgcggaggtgatcgcgctgtcgcccaagacgctgctggcgacgaacaggttcgtttgcgagatctgcaacaaggggttccagcgcgaccagaacctgcagctgcaccggcgcgggcacaacctgccgtggaagctgcggcagcggagcgggaaggaggtgcggaagcgggtgtacgtgtgcccggagccgacgtgcgtgcaccacgacccgtcgcgggcgctcggcgacctcaccggcatcaagaagcacttctgccgcaagcacggcgagaagaagtggaagtgcgacaagtgctccaagaagtacgccgtccagtccgactggaaggcgcacaccaagacctgcggctcccgcgagtaccgctgcgactgcggcaccttattctcacggagggacagcttcatcacccaccgcgccttctgcgacgccctggccgaggagagcgccaaggcgcgcgcggcgccgccgccgccggccgacgaggacgggacctcggcttctgccggtgcgccgccgccgcaagcgcctctaccaccacccgcgccggtgccggcgccagcaccgccacctcctccggccgcagctccggctcccgcggcgcaaccggagcaacgagatcgggatgctgcactggatcagttcgccacgccggcgccggcgccggcgccgccgccagttactgctcctccgccgccgccggttgccgctcctaatgattgtgtcagcagcagcagtagcggcgtggcgccgacgtcgcaaagcctccttagcagcatgtttgcaccgccgtcggtggcccaggcgccgcagtacgcggaccccatcggagttggagcgggtggccatcaggagcgcgcggtgcctgccaagcctccggcgctgtgcctcgcgcccaacgcgtcgtcgtcgctgtttacggcgcctgtaccagctgaccggcagcagttcgctccgccgccaccgccgtccccgtcgccgcacatgtccgccacggcgttgcttcagaaggccgcgcagatgggcgccacctcgtctagctcgtcctttctccgctgcctgggcctcgacatgtcatcgtcatcgtcggcgccgccttcgtcgtcagggcagcagcaacagcaccaccaccatcaccaccaagaaaccatgcaagtgccactcccggcgagttcgctgcccgaatggccgccgcggttacagccggagccatccccaatgctgtcctccgggctcggcctcgggttaccatacgacgcgacaggcggtccggtgagcttgccggagctcatgatgggtcagtccacactgttcagtgccaagccggcaacactagatttcttggggcttggagtgagcccgacaggcgcgtcgacaagcaggggcttcccgacattcatccaacccatcggcggcgctgtcagcttggccgggagtgccaccgtcgccgcggagaccttcggcgccgcccatggcggccaggcaaatccgtgggagaggaacccgagtagctcaccaatcctgtaa

SEQ ID NO: 13241 - DNA, 3618 bp, Oryza sativa
  Clone ID: TFbOSC400964j.C1.o10.fg
atgaggccctcgccgcctcccgccgccccggcggcggaaccggtgcccccgtggctgagatcgctgcccgtcgcgcccgagttccgccccaccgccgccgagttcgccgatcccgtctcctacatcctcaagatcgagcccgccgcggcgccgtacggcatctgcaaggtcgtgccgccgttgcccccgccgccgaagaaggccaccttctccaacctctcccgctccttcgccgcgctccacccggacgaccgctcgccgtccttccccacccgccaccagcaggtcggcctctgcccgcgccgcacgcgcccggggctcaagcccgtgtggcggtcctcccaccgctacacgctcccgcagttcgagtccaaggccggcgccacccgcaagtcgctcctcgccggcctcaacttccctgcctccaggcaactcaccccgctcgaccacgaggtgctcttctggcgcgcatcggccgaccgccccatcgtggtcgagtatggcagcgacatgtcgggctcgggattctccccttgcgccgcgcagccgcagccgccgccgcagcagcaaccgacggcgcgggcggcggcgcaccttggggagacggcgtggaacatgcgcggcgtggctaggagccccggatcgctgctgcggttcatgccggaggatgtccccggggtcaccacgccgatgctctacgtcgggatgatgttcagttggttcgcgtggcacgtcgaggaccacgacctgcacagcctcaactacatgcacctcggggccgccaagacgtggtacggcgtgccgcgcgacgccgcgctcgcgttcgaggacgtggtgcgcgaacatggctacggcggggagattggtgcagaatgcaggggaatttgtggtcacttttccaggatcttatcactgcggtttcagtcatgggaaccatccaatggtgaaatggagacacggagctctcgaataaaggagaagaagaaatgcgaaggggaacaactggtcaagaagatgttcatccaaaatgttattgaagataatgaactgcttagtcatcttctaaatgacggatcatcttgtattattcttccagcaaatgcccatgatggtcctggtctttctactttgcgctcaacagatcaatcaaatatgaattccagaatatcacataacctatgcagtagggaagaagctccagaagcctcaggatgcttatcgccgaacaggaatggtgataccagaaattgtatttcatcagatacgcataacatggaaggtgataagggagatataatgagcgctactggattgttagatcagggtctattatcatgtgtcacttgtggaattttaagtttttcatgtgtggctgtactcaaaccaagagattctacagcacgatacttgatgtctgctgattctaattcaattaataaccagctttctatttctggagggagtattctggcagatgcgccaacaaatgaaaggaatggtgtcatttctcgtccatattctgaacactgttgcaacgaaataatggccgatgatgcagaaatcgataagaattctgctcttgatctcttggcatttgctcatgggggtcaaccagatcctgaagaagatccactggagaaaatactgaagattgcacatggcattaacaaatcacaacctaatagttcaaataatgttggttgtgttggaacaaagctgtcctcaagtagcacagagcgccaagaaagaccatcttcccagaacgctcattgtaatggtagctcagttatttcaaatggaccgaaaggtgttcgcacgagaaataagtatcaacttaagatggtactttctgaaggttttcaggcaaaggatatctattctgcgaaggaaaagaaggttcaatcagaaccatcaagctcaaaaggggatgttaaggagacaattgatgttagtggcacagagaacgatgtcggatgtaaaagcactacaatctctgtcagtgaacacaggggttctacaaagaatatgtattcagtgaaggaaaagaaggttcaatcgaaaccatcaagcttaaaggggactgttaaagagacagttgatgtcagtggcacagagaacgatgctagatgtaaaagcattacaatctctgtcagtgaacacaggggttctacacctatgaccaatagtttagctgcatcaatcgtgaaacctgacaaggattcatcaagaatgcatgtattttgtcttgagcatgctattgaggttgagaagcaactgcatgctataggtggttctaatattatgcttatatgtcgtccagaatatcccaaaatagaagcggaagcaagattgttgggtgaagaaatgggactggtatatgactggaagggcattcatttcaaggaggccaacatggaggacaggcagaagatacaggaagttctgcgggatgaggaagcaatacctacaagcagtgattgggctgtaaaattgggtattaacctttattatagtgcaaatctggccaaatctcctttatataacaaacaaatgccatacaacagagtcatttatagggcatttggctgtgattctcctaatgactcgccagtaatgttcaatacttgcgaaaggaaacaaagccaccagaagaaaatagtggttgctggccggtggtgtgggaaagtatggatgtcaaaacaggtccatccatacttggctcacagagttgaaagccaggaagcggaagaagcagatagaatctgttcttatcattttgatgagaagcacaaagctgagccagttgggaattctagtagagtggaagcctccaaaagaaagagtagcagtttgacagacgtaacagaatcaagcaatagaaggggggaaatacctggtgaggaaacaaacaccaagaggcccaaacattctcaagagaacaatctcagagctttggaaaccgctgctgaagttgtggtgccctcaccagctggaacaggtctccgcgttagctccaggattgccaacagggcaaacaagctaaaatcaaagatggaaaaggaggatgtcccttctagccgtccaaagtctaacataaaggagaaaagcagtcatgctagcggtcagaaatcaaatgttcaagaggcgaatgctaattctgctagccatttgagagcaatgccaccaaaacagaaggctgaagcagaagcaaagaagcaaataagaactccaaaacctccaaagcaagcagtggagtactcgtgcgatattgagggttgttctatgagttttcgtacaaagcgggacttgtctctgcacaagagtgatatctgcccagtgaaaggctgcgggaagaagttcttctcgcacaagtatctgctgcagcatcgcaaggttcacacagatgaccgtccgctaacatgcccatggaagggctgcaacatggcattcaagtggccatgggcaaggactgaacatctcagggttcatacaggcgacaggccctatgtttgccatgagccaggttgcgcacagacattcaggtttgtctcagatttcagccgtcacaagcgcaagacaggtcattctgtcaagaagaagaagaaagcaaagagttga

SEQ ID NO: 13242 - DNA, 1515 bp, Oryza sativa
  Clone ID: TFbOSC400258j.C1.o6.fg
atggcaagtaatgcaacaaggaatactgatcctgaccaacagggtgttcgattcagttccatggaccagcctccatgttttgcaagacctggtcaatcgttccctgcttttcctccactctttggggttcagtcttccagcttgtatttacctgatgacattgaagctaaaatcggtaaccagttcgaatcaaatccttccccgaataatcctacaatggattgggaccctcaggcaatgctgagcaacttatccttccttgagcagaagatcaagcaggtaaaagacatcgtgcagtctatgagtaatcgtgagagccaagttgctggtggttccagcgaggcacaagcaaagcagcagcttgtcactgctgatctcacttgtattataattcagcttatttcaacagctggttccttgcttccttcgatgaagaacccaatcagcagcaacccggcactcagacatctcagtaacacactttgtgctcctatgatcctgggcaccaattgtaacctgcgaccaagcgcaaacgacgaagccacaattcctgacattagcaagacccatgactatgaggagctgatgaatagccttaatactactcaggcagaaagcgatgagatgatgaactgccaaaatccttgtggtggggaagggtcagaaccgattccaatggaagaccatgatgtgaaggagagtgatgatggtggtgagagagagaatctcccccctgggtcttatgtagtattgcaattagagaaggaggagattttagcaccacatactcacttctgcttgatctgtggcaagggttttaaaagagatgctaatcttaggatgcacatgaggggccatggagacgagtacaaaactgctgcagctcttgcgaaaccttcgaaagattctagcttagagtctgcaccagttacaaggtactcgtgcccatatgttggctgcaagcggaacaaagagcacaagaagttccagcctctcaagacaatcctgtgtgtgaagaaccactacaagagaagccactgtgacaagagctacacctgcagccgttgcaacaccaagaagttctcagttatcgcggacttgaagactcatgaaaagcactgtggccgcgacaagtggctatgctcgtgtggaactaccttctcaagaaaagacaagttatttgggcatgttgctcttttccaagggcacacgcctgcactccctatggatgatatcaaagtaacaggagcatcagagcaacctcaaggcagcgaggcgatgaacaccatggtggggagcgctgggtataacttccccggtagctcatcggacgacatcccaaatcttgacatgaagatggctgatgatccacgctatttctcgccattgagctttgatccttgcttcggtgggcttgatgacttcactcgacctggatttgacatctctgagaatcccttctccttcttgccctcaggatcatgcagcttcgggcagcagaacggagacagctga

SEQ ID NO: 13243 - DNA, 555 bp, Oryza sativa
  Clone ID: TFbOSC400311j.C1.o6.fg
atggccggtcaggtgttcgtccatcacctcggcggcggctccggcggcgacgaccccacccacccatggctgtccctcaagtcgtcccatgagatggacgacgccgtggcgagctggcgcgagaagctggcggacatggccgccgccgacgaacgcgccggcaggtacccgtgcccgctgtgcgaccgccacttccccacggagaaggccgtgcacgggcacatgcgcagccacccggggcgcggctggcgcggcatggagccgccccgcgagccgtcccccggcgacctcgccctcgccgccgacgggaagcggtaccgctacgtgtgcgaccgatgcaaggcgccgttcgagacgcggcaggcgctgggtgggcaccgtgccagccacagcaccaagaagggctgctcctggcacgccaagcagctcgccatggccaagccgcccaagaacgacttcgacctcaaccatctctcacttgaggccatccaggcggcggcgcaagaggaacaagctgctcaagaggggaacaaggatgaggagcctaagaattaa

SEQ ID NO: 13244 - DNA, 663 bp, Oryza sativa
  Clone ID: TFbOSC12817j.C1.o4.fg
atggcgctcgacgggaagccaccggtgccgccgccgtccacgccgccgatggactcgtgggcctgcggtggtcgccgctccaagcgccgcggcggcggcggcgggagcagcgggagtagtggcagctccggcggcggcggcggcggcgagtccaagaaggagtacctcgcggcctgcctcttgatgctcgcgcatggcgtccgcgacgaggccgaggtcgtcggcgtcgcggcggcgacggcgaagccacagcatgggtacgagtgctcggtgtgcggcaaggtgtacgggtcctaccaggcgctgggcgggcacaagacgagccaccgcaagccgccgtcgccggcggccgaaccggcggccggcgaagagccgtcctccggcggggtggccggcgaggcgaaggtgcaccgttgctccatctgcctccgcacgttcccgtccgggcaggcgctgggcgggcacaagcggctgcactacgagggcggcgccgtcggagacgccgtcaaggagaagaactccctgaagaccaaggcggcggtggcgacagcggtgctgaaggacttcgacctgaacctgccggccgcggcgacgacggcgggggacgaggccgagagctcaccaccggaggccaagagagcacgtctgctgcttctcgtctaa

SEQ ID NO: 13245 - DNA, 1137 bp, Oryza sativa
  Clone ID: TFbOSC400553j.C1.o13.fg
atggcgctcgacgggaagccaccggtgccgccgccgtccacgccgccgatggactcgtgggcctgcggtggtcgccgctccaagcgccgcggcggcggcggcgggagcagcgggagtagtggcagctccggcggcggcggcggcggcgagtccgaggaggagtacctcgcggcctgcctcttgatgctcgcgcatggcgtccgcgacgaggccgaggtcgtcggcgtcgcggcggcgacggcgaagccacagcatgggtacgagtgctcggtgtgcggcaaggtgtacgggtcctaccaggcgctgggcgggcacaagacgagccaccgcaagccgccgtcgccggcggccgaaccggcggccggcgaagagccgtcctccggcggggtggccggcgaggcgaaggtgcaccgttgctccatctgcctccgcacgttcccgtccgggcaggcgctgggcgggcacaagcggctgcactacgagggcggcgccgtcggagacgccgtcaaggagaagaactccctgaagaccaaggcggcggtggcgacagcggtgctgaaggacttcgacctgaacctgccggccgcggcgacgacggcgggggacgaggccgagagctcaccaccggaggccaagagagcacttcacttctggttgggcgatggagacgggtggcatgataaacatgccgtgtttagatggttggccagcagttctggtggaaataatataatggggccccatgattccccagctcgctgtgtcgaatactcctacagtcctacatgcagatacggcacatttgcaactggtggatgtgacagttttatggcctttgggatggcgctagcaaaagtgccccagccctcaaatacccatgtaacatcacttcttgtctttcagcaaggatggccatctgcttcgctgtcgcatccaggtgcacgttcgataagccttacctttctattgagatatcaatcatatgaaacccactgggtatccaccgggtataccatacccaacgggtatgggcatgggtatgaatttctacccgccaattctatcgggtatcaatcgggcgggcaaaagcgggtcaggcataagcctgacgcaatctttatctgtaatgtcaactaa

SEQ ID NO: 13246 - DNA, 681 bp, Oryza sativa
  Clone ID: TFbOSC400553j.C1.o12.fg
atggggctaaacgagaagccattggtgcctccgttgtctccaacgccggtggacttccgagcccatcaggtgttcccatccaagcaccacgattttgacactagcaagagtcgtaacatctctggtagtgtcgccatcggcagtgattctgaggaggagtacttggcgacttctctcttgatgctcgcacatggcattcgggacgagaccaaggacatccgagggatgggagacgtaaaaggtgtgggtgttgacactttggagctggtgaaaccaagccaacgggcttatgagtgctcggtgtgtggcaaggtgtactggtgttaccaggcgttgggtgggcacatgacgtgccaccgcaacctatttgcacaagtggtggccggtgatgagttgtcctccgataggaccatggtggttaaggggcacaagtgctctatctgtcgccttgagttcccatctgggcaggcgctaggaggacacatgcgggtgcactatgtgggtggtgttgaaggaggctctgtcaaggagaagaacgttgtgaagaccaaggttacaggagcactgaagctagtgttgaaagactttgacctgaacgtgcctgttgtggcaacgatggtgggagacgaggctgagagctcacattcagaggccaaagcgcggatgatgacactcccctaa

SEQ ID NO: 13247 - DNA, 1464 bp, Oryza sativa
  Clone ID: TFbOSC400431j.C1.o50.fg
atgatgctcaaggatctggccgaaattcagcagcagcagctgctcgccgccgccgaggagaacatgtcgaacctgacgtcggcgtccggcgaccaggccagcgtctcgtcccaccccgctcctcctcccgccaagaagaagcgcagcctccccggcaacccagatcctgaggcggaggtgatcgcgctgtcgccgaggacgctgatggcgacgaacaggtacgtgtgcgagatctgcgggaaagggttccagcgagaccagaacctgcagctgcaccggcgagggcacaacctgccatggaagctgaagcagcggaaccccaaggaggtggtgaggaagaaggtgtacgtgtgcccggaggccggctgcgtccaccacgacccggcgcgcgccctcggcgacctcaccggcatcaagaagcacttcagccgcaagcatggcgagaagaagtggaagtgcgacaagtgctccaagcgctacgccgtccactccgactggaaggcccactccaaggtctgcggcacccgcgagtaccgctgcgattgcggcaccctcttctcccggcgggacagcttcatcacgcacagggcgttctgcgacgcgctggcggaggagagcgcgagggcggtcacggcggcggcggcggtggcggggcagcagcagcatggcggcgggatgctcttctcgcaggtggcggatgtgcttgatcaccaggcggcgatggcgatgggggggcatgggctgatgcaagagctgtgcctcaagagggagcagcagcagcagcagcagcagttcgcgccgtcgtggctcacggcgcagcagcagcagcagcagctggaggcgatggccggcgcggggaatccggcggcgatgtacgggtcggcgaggctggaccaggagttcatcgggagctccacgccggagagcggcggcgcgcagcaggccggcctcagcttcgggttctcgtcgacgtcatccgcgccgccgcaccccgccgcctcctcggcgcacatgtccgccaccgcgctgctgcagaaggcggcgcagatgggcgcgacgctgagccgcccgtcgagccacgcccacatggcggcggcggcggcggcgagcacgcacaacagcagcagcagcgccgccaccaccaatgctccccctcctcctcctaccagcaacgtgtcgagcacttgcgtcggcgccggcggctacgggctcgccttcgaagcgtcccacttcatcgcagcagacgagagcagcaggggcgccaggtccgatcgtgacaccggcaatggcgtcgccggagccggcaacgacggcctcaccagggacttcttgggtctccgagccttctcccacggcaacataatgagcatggccggcttcgatccctgcatgtcgacgacgtcggcgtcgtcggcggcgccgtacgaccaccaccaccacagcaacaagccatggcatagctag

SEQ ID NO: 13248 - DNA, 645 bp, Oryza sativa
  unsure (1)..(645): unsure at all n locations
  Clone ID: TFbOSC403427j.C1.o1.fg
atgtggaacctgacgtcggcgtccggcgaccaggccagcgtctcgtcccaccccgctcctcctcccgccaagaagaagcgcagcctccccggcaacccagatcctgaggcggaggtgatcgcgctgtcgccgaggacgctgatggcgacgaacaggtacgtgtgcgagatctgcgggaaagggttccagcgagaccagaacctgcagctgcaccggcgagggcacaacctgccatggaagctgaagcagcggaaccccaaggaggtggtgaggaagaaggtgtacgtgtgcccggaggccggctgcgtccaccacgacccggcgcgcgccctcggcgacctcaccggcatcaagaagcacttcagccgccagcatggcgagaagaagtggaagtgcgacaagtgctccaagcgctacgccgtccactccgactggaaggcccactccaaggtctgcggcacccgcgagtaccgctgcgattgcggcaccctcttctcccggcgggacagcttcatcacgcacagggcgttctgcgacgcgctggcggaggagagcgcgagggcggtcacggcggcggcggcggtggcgggnccaccagcagcagggaggcgggatgctcttctcgcaggtggcggatgtgcttga

SEQ ID NO: 13249 - DNA, 744 bp, Oryza sativa
  Clone ID: TFbOSC423167j.C1.o3.fg
atggcggtggaggcggttcttgaggcgtcgagaagtagtagtgaggaggaggcggaggtgatcgtcacgcacggcggcggcggcggcggcggaggaggaggaggacaggtggaggggtgggggaagcggaagcggtcgcggcggcggcgaccgcagctgccgccctccgaggaggagtacctcgcgctctgcctcctcatgctggcgcgcgggcgacgcgacggcgacgacgtggcggcgtcggcgtcggcggcggcggcggcggtggagcaccggtgctccgtctgcggcaaggcgttcgcgtcctaccaggctctcggcggccacaaggccagccaccggaagccgccgccgcccgccatggtcgacgacgacgaggtggtggtggagacgaaaccggcggctatcgcgacgccgtcctcgtcggcgtcgggcgtctccggcggcggcggcgggagggcgcacgagtgcaacgtgtgcggcaaggcgttcccgacggggcaggcgctgggcggccacaagcgatgccactacgacggcacgatcggcagcgccgccggcgccggcgcgtccaagccggcggcgaagacgaccgtggcggtggcggcgagccggggcttcgacctcaacctgccggcgctgccggacgtcgccgccgccgccgaccagcggtgcgcggcggaggacgacgaggtgctcagccctctcgccttcaagaagcccaggctcatgatcccggcatag

SEQ ID NO: 13250 - DNA, 513 bp, Oryza sativa
  Clone ID: TFbOSC408704j.C1.o5.fg
atgaagcacccgaggcaggaggaggaggtgtcgctggcgctggcgctgagcacggactgctcgtcgacggcgtcggactcgtcggcggcggcggcgggcggcgcggcgaggaggaagagggcgcggcggaggagcgtggtggcgacgtcgggggaaggggagttcgtgtgcaagacttgcagccgcgcgttcccgaccttccaggcgctcgggggccaccggaccagccacctccgcggccggagcaacgggctcgacctcggcgccatcggcgacaaggcgatcaggctgcacagggcggccgacaaggagcacagggacaagcacgagtgccacatctgcggcctcggcttcgagatgggccaggcgctcggcggacacatgcggcgccaccgcgaggagatggccgccgccggcggtggatcctccgccgacgactgggtctggcgctgcgacgcgcggccggaggggatcgccgccgagccaccggtgttgctggagttgttcgcctag

SEQ ID NO: 13251 - DNA, 1605 bp, Oryza sativa
  Clone ID: TFbOSC401275j.C1.o27.gm
atgcctacctcctcccccgtggtggccactgtcacatgcgcctcgtctccacgctcctcccttgcatcccttcgcctcccgctccatgaccacgcggtcacgctcgtctgccgtgtccatccctctgtgtccctcaaggctacgctgcggatccacggcgtgggtaggggcggggctgggctcggtcgtagctacattcctaggagagagaggggagaggtggagagatggggaaagaggagagaagggaggaggaagaaggtcgagctcgtcagctcccttgcctccctcctcttctcctcctccaccatagaccaccgaagcctcctcatcgtcgacctctcactgccactgcccctctccccgctggagttccaattcttccagggggtggagcaagagatgctcttgctatcccatggcggtggcggcgcggcggcggctgcctcggacgacgtgctcgcctaccatgtcggggtgctaagggacaaggtgcagcagctggagccgctggtcggcattgtcgtcgtttcccccgccgcgccgcacggccagctccggcgcgacgcggcggcgatggcggcgtcgagcgcctgctccgtcctgcaggagataactgccgccggctccgccgtggcgcaccggctggagcaggccaacgccgcctcctccgcctccttcaggcgaggagtggctttcgccgacgacgcacacgccgccggtggcgtgcagatgttcgcggcgggcgcgcacggcggcggccaaggcggtgatgacgaagccggcgcctcgctgttccaccaccacgggccgccggccgtcggcgcgcccaccgtgttccgcgccggcgccacgacgacggcggccgcgtcgagcagcggcggcggagacgacgacggcgacggcgacggcgaggtggacgtggtggagctggaggcgtcgtacctgctggcgaggtacacgcactactgccaggtgtgcgggaaggggttcaagcgcgacgccaacctgcggatgcacatgcgcgcgcacggcgacgagtacaagacggcggcggcgctgacgagcaccggcgccggcatgagggcggcggcgaggcggtgcagctactcgtgccccgcggaggggtgccggtggaacaggcggcacccgcggttccaggcgctgaagtcggtggtgtgcgcgaagaaccattaccggcggagccactgcccgaagatgtacgtgtgcgggcggtgcggcggcaagcagttcgccgtgctctccgacctccgcacccacgagaagcactgcggcgagctccgatggctctgctcctgcggcaccttcttctcccgcaaggacaagctcatgggccacgtcgccctcttcgccgccggccacgcccccgtgcccgtcgcgccggaggcgtcgccgtcgacgacgaccaccggcaccacgacggacagatcaccggtggcgggcttcgctggctcgacgacctcgtgcggcgctgcggccgacgagaaggcggagcgggcgggcacgaggcgcggcggctccctctcatcctccactgccttcctcccgagtagatctggccgccgctccaccccacacgcgtag

SEQ ID NO: 13252 - DNA, 1020 bp, Oryza sativa
  Clone ID: TFbOSC20545j.C1.o8.gm
atgggagagcgtcccctcgccatcgccgccggccgtgaccccatgttcgtcaccgcctacgccgtgcacccggacggccacgacagcgacttcctcgacttcctcctcgagctcatggccgtcggcaagatgaaggagcgggtcaacgtgctcattagtttaccgacgatggaagtggccaccaatacggcgacacgatcgccggtgaagctaatgctggtgctgacactgtcgccggcgagcaaggtgatcgccaagggcggcggcggcgtgaagcgggtgcacctcgacggcggcgcgttccagtgccggacatgcgggcggcggttctccacgttccaggctctcggcggccaccggaccagccacaagcggccgcgggtgcgcgccgacggccttgacctcctcctcggcgcgcgccccggcaagctcggcgccggcggcgcctcgacgccggtagtgcaccggtgcgacatgtgcggcaaggtgttcgccaccggccaggcgctcggcggccacatgcgccgccaccggccgctggtgagtcgtaatggcacaatgtccacgacgtggacggcggcggcggcggcggcggcgacaatgtccggctcctcgtcggaagagcgtgacgacgacgacgacgacgacgtgcacaattataatttcatccactttttcgacgtcttcgtcgtcgtcaccgccatggaccagcaggaggactacactagtgatctgcagcttgagctcgaggaagaagaagacgataaccaacttagccagctcgcggagctcgacgtgcagctctcgctgtcgctggcgtgcggctcgacgacggcgatgtcatcgtccggcgatgaggaggacgcggagccacggcgtcgccggcgggacgaggaggcggcggcggcggcgttcgagtgccggacgtgcgggcggcggttcccgtcgcaccaggcgctcggcggccaccggaccaatgggccaggccctaggtggccacatgaggaggcatcggcctag

SEQ ID NO: 13253 - DNA, 546 bp, Oryza sativa
  Clone ID: TFbOSC100641j.C1.o1.fg
atggcgctcgccgccgcggcgcgcggggagagcaccgcgctggcgctggcgctggcgccgccgccgccggagctccacttccggtgctcgctctgcggcaaggcgttcgcgtcgtaccaggcgctcggcggacacaaggcgagccaccgcaagccatcggcggcggcggcggcgccgcccgcgcacagagacgtcgtcgttgctgctgctccggcatcatcaggccgcgtcgccgccgacgccgacgccgcctcggaggcggacgggcggcggcggcggcacgtctgctcgctgtgccggcgaggattcgccaccgggcaggcgctgggcgggcacaagaggttccactacttgcatggcccatcggtgtcggcgacggtctccagtgcagcgacggcggcgagcgtgggcgccgctttcgacctaaacgtggcgcccatcaaggagatcgccggcgagcaacgacggtgcggcgaggaggccgacgacgacgatgaggcggagagcccttcaccggccaagaagccacgacgccggccaggatga

SEQ ID NO: 13254 - DNA, 984 bp, Oryza sativa
  Clone ID: TFbOSC400255j.C1.o6.fg
atggagggcaagtccagcagccgccatgccgatccactggaagaggtcgagatgaattcggcttctgcgaccgaggacgacgacggctgccggtatgtgttccaatcccgccgcgacagcgacaacgacaatgacgacgaggagggcgtgctgccggcgacggcctgcaagcggcgccgccgcctcgacgacatcctcgcgctgcttccttcgccgcccacgccgtctacctcttccggttcggaggggacgatcagcgaccgcgaccacggcggcgacgtgatcggcgccggcgacgacgacgctgcccccgtggcggcgcgacgagaggcgtcgttcccgtgccacttgtgcaacaaggagttcggcagcaggaaggcggtgcacgggcacatgagggtccatcacgccgagaacgagaaggagccgatgtcgctgccgccgcaggtggcggcgcccgttcatccccaggctcggctacccacacgcggagcatcacgatcaggtggaccgtacaagtgcaagtacgagggttgcatcatggagtacgagtcgcaccaggggctaggtggccatgtcgctggccacatcaacagggacaagatggccaccgccagcggcagtggcggcgccggcaagccaaagggcaagcacccgtgcaacgtatgcggcaaagagtacccgacaggagtggcgctcggtggccacaagaggaagcactacaggaaggaccttgatcttaccctctccctcgcaccgcccggacaactcgccgcgccgcctacacctacacctgctcctgctccagcggccatcgccgcggtggaggcagaagcggaggtggctgaagatggagatggaggagagctagtgccgacaactccgccaaccggagctaggagaaatgtggtcgtgcggatttggggcgttgatttggagaagccggtagatgatgtagaggagcaagatagtggcagcaactaa

SEQ ID NO: 13255 - DNA, 597 bp, Oryza sativa
  Clone ID: TFbOSC416144j.C1.o5.fg
atgaagaggtttgcattcgaggacagcgatatggcgcgcgtgctgatgctcatgtcgtcgcacgggcagcaggagcaggcgctggctctgccggtgccggtgcagctgccgctcgccgccgcgcgcggcgaccgcgccccggagcgcgcgttcgtctgcaagacgtgcaaccgcgtgttcccgtcgttccaggcgctcggcggccaccgtgccagccacaagaagccgaggctcgacggcgacggcgacctctccctgtccaagcccaagctccacggctgctccatctgcggcctcgagttcgccattggccaggctctcggcggccacatgaggcgccaccgcgccatgaccggcggcatgccgcgggcgatcgtcgtcgacaagaagcccgacgtcgtcgacgtccacgtccacggccacgacgacgacggcggcatcaagcgcggcggcctgtggctcgacctgaaccatccaccctgcgacgacgccggcgacgacgacgccgagtgcggccacaatgccgccggcgccggcatcacgttccaccagttcttggataccggagccatggccgttgactgcgtcggctactag

SEQ ID NO: 13256 - DNA, 546 bp, Oryza sativa
  Clone ID: TFbOSC420432j.C1.o4.fg
atggcgagtgggcaacgagcggtcggcgaggggagcggtggcctccgcccgacgacgcacgtcgcgggcggcggcgggagcgcgcgcggggagtatttcaggtgcaagacgtgcagcaagacgttcacgtcgttccaggcgctcggcgggcaccggacggggcacacgcggatggcggcgcggcagcggcaggagcacggcgccgcgggggccgccgtcgtgggggctaccaacaaccagcggcgggtggtttccgcccaccagtggcacctgtgcgccgtgtgcggggtcgagttccgcatggggcaggcgctcggcgggcacatgcggcggcacagaggcgaggcggcagcggcgacgccgccgccggcggctgcggctgcgagcgccggcgccgtgtccagcatggagccgccggagatgatcgacttgaacagcccgccggcggtcgaggaggccggtgaaggtgatcagaggttgagcgtgcggaacaggagccccatctgcttaatctgctcgtgtagggtggtgttctctgtttggtga

SEQ ID NO: 13257 - DNA, 936 bp, Oryza sativa
  Clone ID: TFbOSC101382j.C1.o3.fg
atggccaagaacacatgcaagctctgctaccgccgcttcggcaacccccgcgccctcgccggccacatgcgctcccactcagtcgccgcctcgaggtcgcagatctcctcgacgtcctccgcgtccacatccgtcgcggtcggcgacgacgacggcggcggtgatgccaagaggcccatccagggatacgtgctgcgggagaagcccaagcggagggtccgcctcgccgagtccgacttctcggatcgcgagagcgagacggagtactactcctcgccgcctcacggcaagcgcgcgaacaccggatcgggcgatgtcgagcaggtgagctcggtgtccgacgccacgtcggaggaggacgtagcgctgtccctcatgatgctctcccgcgacacctggccagccacgccgccgccgccgccgccctaccgtctccgcggcgcaggctacgacgacgggagcgacggtggcgacgcacctccggctccggccgcagcggccgcgcagaagcggacgcggttccagtgccccgcatgcaagaaggtgttccgatcgtaccaggccctcggcggccatcgcgctagccacatgcgcggcggcaggggcggctgctgcgcgcctccgcctaaccctcctccttctcccgctacgcctctccagccattgccggagtgcgacggcggcgaggaggagggcgcgaagccgcatccgcacgagtgcccctactgcttccgcgtgttcgcgtccggccaagctctgggcggccacaagcggtcccagctgtgctcagccgcggcggcggccgcatcgggcgacgatattccagccatgattaaaagcaacggcttcattgatctgaacctcccggcgccgttcgacgacgtggagctctccgccgtttcagatcctttcctctcctcgaagccaggttcttga

SEQ ID NO: 13258 - DNA, 1414 bp, Oryza sativa
  Clone ID: TFbOSC14402j.C1.o1.gm
ccgcgcggcgcagccggagagcacgtgcagagagatggccgtcaactccggcgatcgcgcgcgcgcgcgcgggcaccacggagacgacgacgaggagggtgtggccgtcgtcggcgaggactacccctactgctctgactcggattccgacgacgacgacgacgtcgaccgctacgtgttccttgcacgccagcccgcgccgccggtggaccgcgacgatgccgaagccgacgccggggcggaaggaacgggttgttgcaaacggaagaggcgcgtcgtcgacgacgacgaccatgatgacggtttctcgccgcgccagccggcgttgctggatggcagcggcggccaagcggcggaggaggaggaggacgccgaggggagctctgatgatgatgacgcaatggcgccgcgtggggaggcaggaggcggcggccgcggccgcggggtcgggaaggtatcacgcaagaaggctcgactcgtcgacctgatcagatcgccattgttgccggccgagctggatggttcggataaggcggcgccgccacctccgcgcggcgtgtgtcccaagaagatcgcggtggtggtgcaggcgaagaacaggaagcgccgcaggttcgtcgacggtggcgaggagcaggagccgcagccgcagccgccggtgcgcggcaagagaagcagaggccctgacctcgaggcgagcgagggtttgcaaacggcttcggcggcggcggcggcggcggcggcagaggcggcggagagagcttccaagcgcttcgtctgcagcatatgcgggaggtgcttcggcagccaccaggcgcttggcgggcatgtcctcggccacaagaagaaagccaagaacgccgccattgccgccgcagcgcgcgacgccacgacgacggcggtcacggaggccgtggctccagcaagccaaaggcaaagcttcttcgccgccgacatcaacggacaagacgagcgtggatgcgatggcgccgagggcagccgctacgacgacgacgaggagaagagccccgtcgtcgttgacgacgttgcagcatgccatgacgcggacgtcgacgaaagccgcggtcacggtaaggccgagtcggcctctgccattgatgccggcggggacgcgggcaacaacaaggtcgcccatggtgacggcgaggagaacgacaagatcgccggcgtcgtcgttgcatcaagccacgacggcgatagcgacgtgggcaagatgaagatcgtgcagcacaagtgcgacgagtgcggcaaggtgtgcctcacggggcaggcgcttggcgggcacatgatcaagcaccggcggacgcgaccggcggccaacggcggcgaggggcctgcaactgcaacggtggcggacgggggagcccaaactgttcggctgatcggcgacgat

SEQ ID NO: 13259 - DNA, 741 bp, Oryza sativa
  Clone ID: TFbOSC407916j.C1.o1.fg
gccttctcattggattttaacctgcgttcgcatctaaaaacgcatgcgttggaaaactatcatgtatgcccatttccagcatgtggcaaaagatttacgagtgactccaaattaaaatcccatgtcaagggccatgaaaagactggaactccgatcacagcacaatatgtgccatcatcagataaaccacaaagcagcagtaagcctgcgacaccagcaacaactaagcctacaacaccagcagcaacgaagacgacaacacctgcatcaactaagcctacaacaccagcacccacaagctttgctgagcgaccatatgtctgcccatatgatggttgtgggaaagcctacattcacagttacaaattgaaccttcatctaaaaactcagcatcctgaacatggtcaagaagagaatggtaggattgctgcacatgcaagtgagcatgctgtaaatgatcgtgccaatcagtataactatgctgagattgtcgaccttgcaccgaatccaaaaaggagcaagacaaattcagggcataagaccccctcatctaataaagcctacaatgtcaagatttctagcgtgttgcctgctgatatcagtggagtgaagaatcagtggccaggtaagtatgaagatgacagtgaagagacagaagaagaccagggcaacaacattgaagatggctggagatatggtaaccagaatgccgatgatgaggaaacagaatatgaagattaa

SEQ ID NO: 13260 - DNA, 2235 bp, Oryza sativa
  Clone ID: TFbOSC410041j.C1.o2.fg
atggcacaagcagaaaagcagcgctggtgcaagctctgcaacaagagcttcccttcatattgttcacttggaggccacatgaacctccacagcaccaggcgcaggaagaagaagccgccgccgagcccgagaaaggctccaccgatcactggtgcctccggcagcaggtacgatttccgggagcggtgccgccagaggccggtggcgccgcagagccagccggatcacgcctccagcgacgacgagccatggacgctggcccccaaggccgaatgccagctgtgcttcaaggctttccactcctgcgacgcgctgtcgatgcacatgaaggcgcatggccaccatgggaggaagatggtgatggtggagcagagggcatcgagaaagacttcttctgctaatttctgcggtgttgatgatggtgaccatggttttgctgctgtatcttatgctcactgtaagagagcgaggtcgaagaggatccgcatggacgttttccctgccccggtagtggtggtgacacatgggacacaggtggaggatgctgcctgcattcttgtgatgctttcaaaagatgcttacaagggctcagattctctggatgaagatcctcagatggatggaagcttggaatgcggtccgcagaagactgagatggagccgagttcttatcgtcttggtgtaactggtgatactgagctgataaagccagaaaattcaagttcttatgaggagatcaagtttggcagtctttcaaatgtgttgaaggcaacagctatccatgagtgcaggctctgcggcaaggtcttggcatctggatctgcattgggaggccacatgaagtcccacagtgttcctgctcataaaaaggttgcaacatttcccaaaacttctgtgactccatcaagaaaacagctgcttgaagtgcaaaatgagttgcatgaactcaaccttccagctctcagtaacagggactgcagcagtacaaggacagagtctgaactgaacccatggtgggttgcaagcagcattcagattttacttcttcaatacttaaatgtcatgagaagtattaaaatgaaacatgacaagttatgggatcttacaaattttccggttaagctaccaaaagatcacagggaaacacctccatccagcatgcctcatggcagcgacggtgcccgctggcggcccgtcccgcacgaagcgcctcccctcccactgcctcgtctccgacgagaagacggacaagaaaaacggcgacggtggccattccgatccatcgctcgtggggtaaaactcatcgtccctgcgcctgcgcctgcgctcgcgctcgcgaggggcaacgtgctcgcggacggcggcgaacctggcggaggccgtgctcgcgacgtggcgcgggtggcggcgtggcaactggcagtctggcagccgctcccaccgccgtgtcgccgggtaggtcacgcagttgttgaccagcacgaggccgttgcagtggtcggtgatgttgatcgagggcatgtggcagtcgggcaaggtggacctgcgcctcgtgtagtcgacgttgccggagacggcgccgccgccgccgccgggtggcgtggtggtggggcaggagaagaactgcgtggggtagaagaggtcgtggaggttgaggaagatgccggcgagggagagcgggaggaggtcctcgcggaggcggtcgtcgatggccgcgcgccacgacgtgcagatgcggcggcatgcggcgaggctgcccagtgggaccgtgggagtcgccggaggacctccgcgatcatgtcgtcggttggcatgcaagaaacaagggatatccattcgagagatgaaatcactttcgcagaggatccaatctcgtggaagcccaaactcgtcatcgccgccgtcgcgaggaggagacaggtggagacacgagaaggaggcttacgggtgggaaccgcaggcagaggcggcgccggagagggcctcaagctccctggtagcggctgcagcgccatgaagatgctctttgcggagtggagcagaaggcaccatcgctggagagggctccgagatcgccggcagtggcagagccacacgaggggtaggctttgtggatgctgtgccgtgagcaggcttcgtgcgaggttgagcggaatgcgtcgtggccggagagagctccaagctagccggcagtggcagcaccgccgtggggaggctggacatgagacggggtga

SEQ ID NO: 13261 - DNA, 1902 bp, Oryza sativa
  Clone ID: TFbOSC400615j.C1.o24.fg
atgccacccaatccgacggggacggagggggagcccgggccggcggtggagccggctccggcgggggcgggggcggcgccggtggtcaagaagaagaggaatctccccggaacgccagatccggacgcggaggtgatcgcgctgtcgccggggacgctgctggcgacgaacaggttcgtgtgcgaggtgtgcgggaaggggttccagcgagaccagaacctgcagctgcaccgccgcggccacaacctgccgtggcggctgcggcagcgcggccccggtgcggcgccgccgcgccgccgggtgtacgtctgcccggagcccggctgcgtgcaccacaaccccacccgcgccctcggcgacctcaccggcatcaagaagcacttctgccgcaagcacggcgagaagcgctggacatgccagcgctgcggcaagcgctacgccgtccaggccgacctcaaggcgcacaccaagacctgcggcacccgcgagtaccgctgcgactgcggcaccctcttcaccaggagggacagcttcgtgacgcatcgcgccttctgcggcgcgctcgtggaggagacgggcagggtgctcgccgtgcctgcgccgccgtcgcctcgcccgcctgatttggaggccgaggagaatgtggataaggataaggataaggaggaggaggtgaaggagaaggagaaggagaaggagctggaggagaatgaggattcacctgtggccgaggtcgatgagccgcagcccagccaggcggtggcggaggtgccgcagcagtgcgctccatcaccgccgccgccgcctccgatactgcaggagcatcctcagccggtggtggcagtggtaccaaatgtggatgagcaagaggtggttgctaagccagcagtgattgccaagatagaggtggaagatgagcgagatgaggaggtttgctttcaggaagtggatcgatacaaagatgctgaactggaggactcaaacctgctggataatgacactccgatgctgccttgtttccttccctcgccctcggaggccattggcacagatggcagcagcaccagctgcggcacgggaagcagcgttaccaatgctatcgctccagctacgacgacgagcacgttcgctggtctgtttgcgtcggtcacaacgagcagcactccccaaagcagatccctccgcgatctcatcggcgtcgatcccacattcctctgccttgcaattggtgcgccgtcttctctcttcccacagacaaatgcaagtgacccctgctcctttgctccacctccagcaccgcacatgtccgcaaccgctctcctgcagaaggctgctgaggttggtgcttcgcaatcaagctcatctttcctgaaggagtttgggctcgccgcctccacctcatcgtctcccccatccaagctatcccaagggaggttcactactggtaacacaccaacaacatctcatccacatccacatccacatccgcatcctcatccgcctcaaggaaggttcatggataacgtcccacagccgccaccgccagccaagctgccacatcgaatgttcaccgataacagtgtacaacagtggcaccataggagcaaccagcaaatggaaatggagcctgggccgatgctacctggcggtcttggccttggtctcacctatgacactgggaattcagggttgccggacttgatgatgggaccatcggcactgtacggtcccaagcctgccactctggacttccttgggcttggcattggagggaccatgggtggctccactgcaaatggtggcctcccggcattgatggttggaggagagctggacatggggtctgcacaggcgccatgggaggaggccaagagaaagaccaacggccgcacaatcctgtga

SEQ ID NO: 13262 - DNA, 2142 bp, Oryza sativa
  Clone ID: TFbOSC401140j.C1.o27.fg
atggctgctagtggccaggtccagtgcctccttcctctccgcgtcgccttgtcaccgccgctgccgccgtggccgccggcgacgatggttatgccacctcttctcgccgccgccgccgccatggctgctagtggccaggtccggcgcctcctttctctccgtgccgccttgccgtcaccatggccgctggcgacgatggctccttcctcttctcgccaccgccaccatggctgccggtgcccaggcttccagtacgcttttgtcagagaaaaggctgcaggagatcacctgtcacttgggtacatgcagcatggagataataacaataaaaagaagaaaggggatttgtccaataacctcgatctcagctcatcacctcttctcatggactctcgaggtcaagcctactaccacagggcggcggcagcggcggcggcggtggccgccggtgatgctactgacggtgaggagccagctgctgctgagctcgctccgaaggctgtgagatcgaagaagaagctggcggtggaggcgcaaggcggcgccgccgtgcgcgatgatctgacgtgcccagagtgtggcaaggtgttcatgtcggacaaggcgatgtacggacacctgcgatctcacccactgaggaagcacaagggggcggcgcgcctggcggcggtggcggcggcggcggccgacgatgcttccgtggccgctggggtcaagccgaggccgtggaaggtgccacggacgaaggaggaggctgagctcggcgacgaccgccacccggggaggtcgccggtgacggggaagcgcgggcggccggcgtcctcggccagtagcagtggcagcgcgcccgcgcccgcgccgcccgcgtcgtccaggctgcagctggtgatcacggaggaggaggaggcggccatgactctcctggacattgcctcggggtgctcgcttgatcaccagcctacgcaaccggcgcatgtcgccgacgccgccctcctggcgccggcttcggaccagatgccaagcgtcgacgtcgagcaaggcgtcctcgccgtcgcggagcacaggacgtgggaagctgagaagcctgcgctggtcgaacatgtctttgggatcgtcaaggagcatgtcgccgcggtcgccgccgacgccgagccgcagtcgccggaggcgaagacgccagtgaagctggggcctgtgaccgatcaggctgtccctgttctcggcgacaagaacgacgacggccacgccgacatgcccgtgtcccccggaggcggcaccaccaagaagcctttgaagcgaagactccaggacgtcgagacgaagcatcccacagcaccgccaccgccgccggtgaagcgcatcccgtcgccggcgtcgaaaaggaagtacgagtgttcggagtgccacaagacgttctccactcaccaagccctaggcggtcacgtagcggcccacaagaggcagaagaagagctgcgccgagcagcagcaagaggcggtggcggcggcggcgcaagtcgcgcggcacaacttcctggctcaccagcgcccggccggcgtcgtcgtcgccgtcgacgccaccgtcgtcgctgctgccggcggcggtatcgccatcgggcctctcggcgaggagggcttggtcggcccaccgccgccgccgccgccgccaccgccgccgcccgcacccgcgcctgcgctcgcgcccgcgccgcagcaacaccagtgcttacggtgccccatggtcttccccaccgggcaggctctcggcggccacatgcggaagcattttctcgaggccaaggagcaggagcagctgctcgccatcgacatcgccaacgccaacgccaacgccaacgccaacgccgcgccggggccgccgccgatgatggccaacgccgcgccagtgccgccgccgtcgatggccaacggcgccgggcccgtgccgccgccgatcgccgtcgcccctcctcccgcgccgccgatcgccggagccgctcctcctccgcccatggccaacggcgccgcggcggctgcgccaccggggggcaacccggcgccacctgctgggccgcagccgggcgtgaacatgtttgacctcaacgagttgcccaacgaggatgcaggggagaaccagcaaccctag

SEQ ID NO: 13263 - DNA, 969 bp, Oryza sativa
  Clone ID: TFbOSC101916j.C1.o4.fg
atggaggactacgcccaaaccaacctgatctcgagaggccatggccatcatcatcaacccgagctcatgaaggaattccctttcctcagcctcatttcatctacctcttcttgcatcagcagcagtggtcagcagcagcagcagcagcaagatgatgatggccatggcggccatgatcgtcatcagctgctccggtacggttgctgcagctgcaacaaacagcaggaggaagaggaggaggaggtcacggttgccttgcgcataggcctaccggccgtctcgtcggcgtcggcgtcgccgtcgccggcgatggcgaaccatggggctagtgcttctagtacaggagttgctggagatgatggcggcggcggcgccatggccggcgtgggtgtggaggtggagagcgtgcggaggagcggcggcggtggcggcggcgggcagtactggatcccgacggcggcgcagatcctcgccggcgccacccagttctcctgccccgtctgccgcaagaccttcaacagatacaacaacctccagatgcacatgtgggggcacgggtcgcagtaccggcgaggcgggacggcggcgctgcgcggggcgcagccgacggcgatgctccggctgccgtgctactgctgcgcggcggggtgccgcaaccacatcgaccacccgcgggcgcggccgctcaaggacttccgcaccctgcagacgcactaccgccgccgccacggcgcccgcgacttcgcctgccgccgctgcgccaagcgcttcgccgtccgcggcgactggcgcacccacgagaagaactgcggccgcctctggcgctgcgcctgcggcgcccacttccgacacaagcgctccctcaacgaccacgcacgggccttcggcgccgcccacgcccacgccggcgccggcgccggcgccgaagacgacggccgcgccgccgccgccgccgccgtttgggtgtga

SEQ ID NO: 13264 - DNA, 351 bp, Oryza sativa
  Clone ID: TFbOSC101916j.C1.o6.gm
atggccgctcgccccgccattaaaatcccccgcgcgcctcgcctcgcctcgcagctcaacgccaccaccgcgcgcctgcagcccgagaagccgtcgatcgacaacatcacccgtctcctcccccaccccgcagagcccagcacttcgccgccgccgcccgggatggagatgaagaagatcgcctgcgccgtgctgctcgccgtggcggcgtccgcctccgcggtcgaggcctccgagtccccggcgtccgcgccgggccccgggtccgccagcggcgccaccgccgtcgcggccgcgcccgccgccgccgccgccgtcgtgctctccttcctcgcctactgcctgcattga

SEQ ID NO: 13265 - DNA, 1029 bp, Oryza sativa
  Clone ID: TFbOSC401275j.C1.o2.fg
atgggcgtccaggaggaggccgcgctcgccgccgccgtcgtcaagggcaagcggagcaagcgccagcgggcgcacgcggcggtggtcccgatcgccgcgtcggcgacggcggaggaggaggagtccatggagtcgtcgctgtcgctgtcgggcggcgccgcggcggaggggtcgtcgacgacgtcgccgttgttgacgacgacggccgcacggggcgacgaggccgtgtccgggtgcgtcaccgaggaggaggaggacatggcgctctgcctcatgctgctcgccagcggcggccacggcgagcgcgcgccggacgccgaggcggtggcggcgaaggaggccaagttccggagccggcggccggcggacggcgccggcgccggggagttcgtgtacgagtgcaagacgtgcagcaagtgcttcccgtcgttccaggcgctcggcggccaccgcaccagccacaagaagcctcgcctggtcgcgccgccggcggccatggaaccggcagccgatgacaagatcaagccgaccatcccggagacagccgccgccgccgccgaggagaagccgcccaagccatcgccgccacgaccaccggcctcgaggccgatcgccaccgatccaacagtgctcgcgatcccggtgatcccgaagcaagaagtgctcgacgccaccaactccgccgccattgccagcgtctccaagcagccacgtgtccacgagtgctccatctgcggcgccgagttcgcctccggccaggcgctcggcggccacatgcggcggcaccgcccgctcataccggcgtcggcgtcgtccgcggtggtgtccgtgctcgacgccgtcgacgcgccgaggcagaaggagaagagcctcctcgagctggatctcaacatgccggcgccctgcgacgacgcgaccgccgagacgacgacgacgtcgtccgccgccacctcgccggcgttcgccttcgccgtcagcgacaggtcgccgctgctggtgccggcggcgctggtcggctgccattactag

SEQ ID NO: 13266 - DNA, 921 bp, Oryza sativa
  Clone ID: TFbOSC401513j.C1.o15.fg
atggctaatccaagcaaagatcacatcttccccaaccaaagaagcctaatctctcaatcctcctctccccacaattcccttcctaaaaaggaggaaatccctcttctcagcctcctcccttcaatccatgatcacaacaagatccatggctgttataagcaagagaaggaagaggaggtcatggaggatgtggacatatcactccaaattggcctgccttctcctgatcctaacagctcggtcatcgatttcgcgaagagcaatcctctcggcgcgaccgcgacgacatcacaagagcttgatggtgatgatgatgatgatcacaaggtggaggtggagagggaggaggaagaagaagcagctagtgatgacctctgcttggactacttctctatgggaaagctcaccaagggcaagtattggatccctaccccaacccagatcctcattggtcctacacactttgcctgccctgtttgctgcaagaccttcagcagatacaacaacctgcagatgcatatgtgggggcatgggtcgcagtacaggaggggtccggagtcgctgcgggggacgcagccggcggcgatgctgcggctgccgtgcttctgctgcgcggcggggtgccggaacaacgtggaccacccgcgggcgcgccccctcaaggacttccgcacgctgcagacccactacaagcggaagcactgcgccaagcccttcgcctgccgcaagtgcggcaagcccctcgccgtccgcggcgactggcgcacccacgagaagaactgcggccgccgctggcactgcgcctgcggctccgacttcaagcacaagcgctccctcaaggaccacatccgcgccttcggccgcgaccaccgagagcgccccccgcccccgcccccgcaccctctcctgccgttgccgtag

SEQ ID NO: 13267 - DNA, 810 bp, Oryza sativa
  Clone ID: TFbOSC400284j.C1.o4.fg
atgtcgagcgcgtcgtccatggaagcgctccacgccgcggtgctcaaggaggagcagcagcagcacgaggtggaggaggcgacggtcgtgacgagcagcagcgccacgagcggggaggagggcggacacctgccgcaggggtgggcgaagcggaagcggtcgcgccgccagcgatcggaggaggagaacctcgcgctctgcctcctcatgctcgcccgcggcggccaccaccgcgtccaggcgccgcctccgctctcggcttcggcgcccccgccggcaggtgcggagttcaagtgctccgtctgcggcaagtccttcagctcctaccaggcgctcggcggccacaagacgagccaccgggtcaagctgccgactccgcccgcagctcccgtcttggctcccgcccccgtcgccgccttgctgccttccgccgaggaccgcgagccagccacgtcatccaccgccgcgtcctccgacggcatgaccaacagagtccacaggtgttccatctgccagaaggagttccccaccgggcaggcgctcggcgggcacaagaggaagcactacgacggtggcgtaggcgccggcgccggcgcatcttcaaccgagctcctggccacggtggccgccgagtccgaggtgggaagctccggcaacggccagtccgccacccgggcgttcgacctcaacctcccggccgtgccggagttcgtgtggcggccgtgctccaagggcaagaagatgtgggacgaggaggaggaggtccagagccccctcgccttcaagaagccccggcttctcaccgcgtaa

SEQ ID NO: 13268 - DNA, 1246 bp, Oryza sativa
  Clone ID: TFbOSC400284j.C1.o5.gp
ttcaatttcaaccaaaattcaaactttacgctgaactaaacacaatccaagtatggtcgaatatggtctacaatatatgactgtcaaagaacaaagtgtaaaagatacaggtacagttccagtgttacaaagaaccaaggaagagctagacctatatctgtatgactgtatgtatggctatgtatcactcgcttgctctgtacaaaagcaggaacaaattaaacaatagcggcacaaaacgaatcaacgaatagtgtgtttcgactgaatttcactccctagacaaaaactctctgacggatcggatccatgcagctgctgaattacgcggtgagaagccggggcttcttgaaggcgagggggctctggacctcctcctcctcgtcccacatcttcttgcccttggagcacggccgccacacgaactccggcacggccgggaggttgaggtcgaacgcccgggtggcggactggccgttgccggagcttcccacctcggactcggcggccaccgtggccaggagctcggttgaagatgcgccggcgccggcgcctacgccaccgtcgtagtgcttcctcttgtgcccgccgagcgcctgcccggtggggaactccttctggcagatggaacacctgtggactctgttggtcatgccgtcggaggacgcggcggtggatgacgtggctggctcgcggtcctcggcggaaggcagcaaggcggcgacgggggcgggagccaagacgggagctgcgggcggagtcggcagcttgacccggtggctcgtcttgtggccgccgagcgcctggtaggagctgaaggacttgccgcagacggagcacttgaactccgcacctgccggcgggggcgccgaagccgagagcggaggcggcgcctggacgcggtggtggccgccgcgggcgagcatgaggaggcagagcgcgaggttctcctcctccgatcgctggcggcgcgaccgcttccgcttcgcccacccctgcggcaggtgtccgccctcctccccgctcgtggcgctgctgctcgtcacgaccgtcgcctcctccacctcgtgctgctgctgctcctccttgagcaccgcggcgtggagcgcttccatggacgacgcgctcgacatgcttccaccgcaattcacaaaagcagcaagcagatcgacgacttgttatatccgctagctaagcttcgctcgctcgcctcaagctagtgtggcagctggctggttgctgtgtg

SEQ ID NO: 13269 - DNA, 1485 bp, Oryza sativa
  Clone ID: TFbOSC400090j.C1.o31.fg
atgcccatgcccatcgggccaggtatccgcggatacccggacccgtgggtaaaattgccatccccgggcacacgtgaaggaactgtggtaggggagaatgagggcacacatgcgggtttaaggtggtacccgaacccggcacccgcattctcaaacccgaacccgctaagacttgcctactccactaccgcttctactgcttggttcgagtcgagggtttctccttctcccaagatggggagcgtggagctcggagcggaggaaagggaggtcgccggcggggagggggggagcaagggggcggcgcctcctgctagggatattaggcggtacaagtgcgatttctgcagtgtcgtccgttccaagaaggggttgatccgtgcccacgtcctcgaacaccataaggatgaagtggatgatttggatgattacttgggacgtggtggcggcgagacgtgcaaagagatggaccatgattgcaagcattggatcccagagaactccaaaatgcgagaaggccttgagtggactagtaccaggatggggagacccttctgggaagctccttcaagaatgcctctttcacgctcttcttcaggatggggagactctcctgagaagctccatcaagaatgcctcgttcacacactttttcagaggcccttttcctgccatgtagatggttgccccttcagctatagcaggaaggaccatttgaaccggcatctacttacacatcaaggaaagctatttgcatgccccatggaaggatgcaaccgtaagttcactataaagggtaatatccaaaggcatgttcaggaaatgcataaagatggctctccttgtgaaagcaagaaagagttcatctgtcctgaggaaaactgtgggaagacttttaaatatgcttctaagttacagaagcatgaggaatcacatgtcaagttggattatagtgaagttatctgctgtgaaccaggctgcatgaaggcatttaccaacttggaatgcctcaaggcccataacaaatcttgtcatcgacatgttgtctgtgatgtctgtggaaccaaacagctgaagaagaacttcaaacgtcatcagagaatgcatgaaggttcctgtgttactgagagggttcgatgccacctcaaggactgcaagttgtcattttcaaagaaatccaatctggacaagcatgtgaaagcagtccatgagcagaagcgaccctttgtatgtggattctctgggtgtggcaagagtttttcgtacaagcatgtaagggacaaccatgagaaatctagtgctcatgtgtacgttcaggctaatttcgaagaaattgacggggaacgaccacgtcaagcaggtgggaggaagaggaaagccatacctgtggagagtttgatgcggaagagggtagctgctcctgatgatgatgccccagcttgtgatgatggaactgagtatttgagatggcttctctcaggctga

SEQ ID NO: 13270 - DNA, 1263 bp, Oryza sativa
  Clone ID: TFbOSC900033j.C1.o12.fg
atggtgttcgatcatggagcccgtgtgtacgtagacccagatgcggaggtggtggcgctgtcgccgaggacgctgctggagtcggacaggtacgtgtgcgagatctgcgggcaggggttccagcgggagcagaacctgcagatgcaccggcgccggcacaaggtgccgtggcggctggtcaagcgccccgcggcggcgacggcggcggaggacggcggcgccgcgggtggcggcggcggcgccggcggcggcgcgggcggcggaggggcgcggaagcgcgtgttcgtgtgcccggagccgagctgcctccaccacgacccggcacacgcgctgggcgacctcgtcggcatcaagaagcacttccggcgcaagcacggcggccggcggcagtgggtgtgtgcccgctgcgccaagggctacgccgtccagtccgactacaaggcccacctcaagacctgcggcacccgcggccactcctgcgactgcggccgcgtcttctcccgaaaaattaccagaagtttaaacctgtatagtgacatagccaattatttaagaatgaagtatataatatctctatcaaatatagcaatcaaagtggagagcttcatagagcaccaggatgcgtgtaactctggacgtgtgcgcggtgaggtcgtgcccgtggccacgacgctgccggtcatccgtcccgcggcgctgcggcatcatcaccatcatccgccgccgccgccgcctgagctgcagctcctcccggcgtccaccacggcgccgttggccgccgcgttctcgtccaactccacgaccaccggctcctcctcccacgagcaacacgcgacgacgatgacaacgacgaagctgcagctctcaatcggccccgccgccgtcgtcgccgcggcgtccggcggcggcggcgcctgcgccgcggcggcaggaggggaggaggagcagcagcgggaagaggtgaggcgcgcgctggaggagaagaccgcggcggacgcggcgcgggagcgggcgcgcgaggaggccgcggcggcggagcgcgcgctggaggacgcccgccgcgcgcgccaccgggcgcgcggggagctcgagaaggcgctcgcgctgcgggaccacgcggcgcgcctgatcgcgcaggtgacctgccacgcgtgccggcagcgctcgctcgccgtgatgtccatggccgccatcgacggccacggcgcgtcggcggtggcgcgcgagcacctgaggggcggcggcgtcggcgccggcatctag

SEQ ID NO: 13271 - DNA, 1068 bp, Oryza sativa
  Clone ID: TFbOSC900135j.C1.o12.fg
atggaagtaggggatccctctggcgccctcgtcggcggggccggcggcgccggagccggaggaggagacggggatgcccgcgacgcgctcctccggttggttgctctcggcgaccgcatggccgccgtccgccgccgcatcgccgcatctatatccggagaatccgggcccctctcttcctccgacatccactccgtctcctccgagatctcctccgctgcccacctcgtcgtcctcaacgccgcctccctcctctcttccaccgtcgcctccctcccggctccacctccgcctccggctactaccgtccaggagctcccccccgtggtggtctccgtgcctcaggaacccccgcaagaagcagccaagggcgacggcgactacgacgtcgtcgagctcgacgcctccgagcttctcgcggagcacgtccacttctgcgacatctgcggcaaggggttccgccgcgacgccaacctccggatgcacatgcgcgcccacggcgaccgcttcaagaccctggacgcgctctccaggcccggccagccgaagccgcctgccggccgggaggtgcggttctcgtgcccctacgccggctgcaaccggaaccgcgcgcaccgccgcttccggccgctcaagtcggccgtgtgcgcgcgcaaccacttccggcggagccactgccccaagctctacgcctgcgagcgctgcggcggcaagaagcgcttcgccgtcctcgccgacctccggagccacctccgccactgcggcgaggaggcgcagtggcgctgctcctgcggcaccaccttctcccgcaaggacaagctgttcggccatctcgctctcttcgaaggccacacgccggcgatcgccgagccgaacaagggtgtggcgacagcggctgcagaggcatcgatttctatgatggaggaaggaggagttgaagcgaattgtgatcgagaggaggatgaggagggtggttttgatccgaagttcttccaggagtggatggaggagctcagaggtggcgctgttgcccccaattggtctgcgccgtcagaagctggacattag

SEQ ID NO: 13272 - DNA, 2244 bp, Oryza sativa
  Clone ID: TFbOSC401824j.C1.o22.np
atggtagctccaagaaaggccctccaggtcgtcgcactagaaaggccaaacctggaacagtcaaagccaattgatgaagaattgatgaagagactgaaggtcaacttgatcacctggaaaaatacccaatgtctttttgacagacacatgactttgtttgtctattttctatggaggaagaagaagccattccacatcacaagagcggttcctcttgatgctattccaggatttttatacgacgatgaggatgatgatgacgacgacgacgatgagggcgataacaatgttgaattagaggagattcgaccaagttcaactgaatgtgaatcttccatccatccagcagaagagctgaatttactcttgccaaaatctcttccgttgccaagaatatccgctgcagttgaaaggaatggaaaagccagggacaaggaggtgaaagaaggatccaacttgaaagaattgccacaaggatatttgggcaaaatggtggtgtacaagagcggcaagatcaagatgaagttgggggatgtcatgtttgatgtgaacccaggagaagagtgtaggatggcacaacatgtggctgctatcaacaccaaagagaagcattgttgtttacttggcgagatcgagagccggcatgtcgttgtgactccagatgtggactcgctgctgttgaatgacaatagagcatataatgctctacaccaggggatcagattcctagggatgaaaatggtaggaattgatagcatatttgaaacgattaccgtagatttaaaaatggtcaaaatcgatagcatctatcgttggaatgattatcgggcggcacgcattattgcccatgccgcaattcctgcgagagagaatgcatatggacgcgcggagcgaatccgcatcggagatcgagcacagatcgagcaaaaccctagttcgatcccacttgcttctcctgctcgatcgatcatggtggaggatcaggagaagtccagcagcagccctcccgttcctccgccaccggaggaggaggagatggaggagggggagattcatccgggtggtggtggtggtggtgggtactacgattcgggctccgagaccgaggacgacgacgatcggtacgtgttccagtctcgccgcgacgacgaggaggaggaggagggcgtgaacccggcgagcaagcgccgccgcctcgaggacatcctcgcggagacacggggagcgctcccgctgccttcgccgacgccgtcgtcgtccggttcggaggggacgatcagcgacgaccacggcgacgggatcgccggcgccgccgccgccgccgatgcacccgtggcgcgcgtggcgttcccgtgccacgtctgcagcaaggagttcggcagcaggaaggcggtgcacgggcacatgagggtccatcaggcggacaaggacaaggagaaggagccgtcgctgcacctcgccctcggctggacctcgacggggaagcgcggcgccaacggcaacgcccgtgctgtcaccgtcgccttcgcccccatggaacaagcggtgggcgacgacgacggcgacgcccgcgccatcgtgctcgcaccggcggcgcagccgcagccgcagcccatggtggtggcagaagctgccaatcctcctaaccaggtcgccgacgacaaccaccgcctgccagtgccagctgccgtgccgtacgtcggcgccgccgccgcccccgcccgccgccgcgctcggccgaagcgtaacgccggacagggtggaccgtacaggtgcagttacccgggttgcaagggggagtacaggacgcaccaggggctaggcggccacgtggctggccacatcaacagggagaagcaggcggccgccgccgcccagggcggcagcggcgccaggccggagggcaatcacccatgcaaaacgtgcgggaaagagttctcgacgggagtggcgctcggcggccacatgaggaagcactacgaccccaagaagaagaagaagcatgctggccttgtccttaccctctccgtcgcgccgcctacgcctgcacctgctccgtccatcgccggagcggcattgccaccggcggaggtaaaagcggacgtggatgaacatgaagcagagcaagtgccaatggcgccggtgtctccgccagctgaagcgaggggaaatatcgtgcggatttttggcgtggatatagagaagccggcagacgaagaggagcaagaaggtggcagcgatgtc

SEQ ID NO: 13273 - DNA, 513 bp, Oryza sativa
  Clone ID: TFbOSC900016j.C1.o19.fg
atggaagtggccaccaatacggcgacacgatcgccggtgaagctaatgctggtgctgacactgtcgccggcgagcaaggtgatcgccaagggcggcggcggcgtgaagcgggtgcacctcgacggcggcgcgttccagtgccggacatgcgggcggcggttctccacgttccaggctctcggcggccaccggaccagccacaagcggccgcgggtgcgcgccgacggccttgacctcctcctcggcgcgcgccccggcaagctcggcgccggcggcgcctcgacgccggtagtgcaccggtgcgacatgtgcggcaaggtgttcgccaccggccaggcgctcggcggccacatgcgccgccaccggccgctggtgagtcgtaatggcacaatgtccacgacgtggacggcggcggcggcggcggcggcgacaatgtccggctcctcgtcggaagagcgtgacgacgacgacgacgacgacgtgcacaattataatttcatccactttttgtga

SEQ ID NO: 13274 - DNA, 1329 bp, Oryza sativa
  Clone ID: TFbOSC400923j.C1.o5.fg
atggagaacccctactacgcgagcttcctcaagaatcaccaccgccgctactgcttctccaccccgccgtcgccgtcgccgtcgccggctggcgcttactcctcctcctccttcccgttctttccgacggcgggggtgacgtcgacgacggccgcgacgccgccgacgacgactgccccgccgtcgcctccgctccgggaggccttgccgctactgtccctcacccccgcctcgcgcggcggcacgacggcggcgcaagagcgtgcgcggcagcggggggaggaggactgcaccgacgacgacgacggcgcggaggaggagggggcggacgaggaggacgtgccgggctcgacgcccggcggcggcggcggtggaggcggcgatagacaccaccagctccgtcgtcgccgcgcggggcggctcttcgccgacctgaacaccaaggctgcggcgggagacccgatggacgtggagggctccggctccggctgctgcgccgccgaagccgccgcggcgggggacgacgacgcggacgtcacggtcgcgctgcacatcggcctgccgagcccgaccgccgccgccgacctcatctcggggctctcgtcagcagccgggagaagatcctccaccgcgcgtcgtgacgaggaagaggacgaggcggaggaagccggcggcgcgagcagggacgacggcgacggcggcgacgccgccgacgccgcggcgccgctagggttcgcgtcgacgccgatcgggcgtctgaacaagggccagtactggatcccgacgccgtcgcagatcctcatcggccccacgcagttctcctgccccgtctgcttcaaaaccttcaaccgatacaacaacatgcagatgcatatgtgggggcatgggtcgcagtacaggaaggggccggagtcgctgcgggggatacagccgacggcgatgctgcggctgccgtgctactgctgcgcggcgggctgccggaacaacatcgaccacccgcgggcgaagccgctcaaggacttcaggacgctgcagacgcactacaagcggaagcacgggctgaagccgttcctgtgccgcaagtgcggcaaggcgttcgccgtcaagggcgactggcgcacccacgagaagaactgcggcaagctctggtactgcctctgcggctccgagttcaagcacaagcggtccctcaaggaccacgcccgcgccttcggccacggccacggcgcgctcggcggcgccgccgccctcgacgacgacgacgacggcgccgtctccgacctcgaccacgactcctcctccaccgcccccgccgcccgatccctctaa

SEQ ID NO: 13275 - DNA, 1317 bp, Oryza sativa
  Clone ID: TFbOSC401886j.C1.o3.fg
atggaagacccctacactagcttcttcaagaacccttactactactactgcacctcggctagctccttccccaccgcgcccgccgccgccgccgccgccgctcacctccctccgccgctgccgccgccttacgctgccctgtatcctaccgccggtggcgtcggcgtcggcgtcggcgcgcatcatcatcatcagtacccgccggccgcattcttccacccgccgccggtgcaccagcagcatcaggcgccgccgtcgccgccgctgcgggaagcgctgccgctgctgtccctgtcgcccacgccggcgcgccgcggcggcgtcgtcgacgcagcggctgactcggactccgacgacgacgacgacggcgactgctgctaccaccacctgcaggatcaggagggggcggcggccgggtcgacggccacccccgccgccgccgccgcgcgcgcgccgctcttcgccgacctcaactgcatccccacctgctgcggcgacgacaacgacggcggcgacccgatggacgtggaggtcgccgggacaacggcggacatcgacgccgcggtcgccctgcgcatcggcctgcctgccggcggcacggaggccgatctcctctccgggctcaccggcgccggcgtcgaacacgaggaggaggaggaggactgcaaggtggacggcggcggcagcggcggcgacgacgaggtggtgccgctagggttctcgtcgacgccgatcgggaagctgaacaaagggcagtactggattccgacgccatcgcagatcctcatcggcccaacccagttctcctgccctgtctgcttcaaaaccttcaacagatacaataacatgcagatgcatatgtgggggcatgggtcgcagtacaggaaggggccggagtcgctgcgcggggtgcagccgacggcgatgctgcggctgccgtgctactgctgcgcggcggggtgccggaacaacatcgaccacccgcgggcgcggccgctcaaggacttccgcacgctgcagacgcactacaagcgcaagcacggcctcaagcccttcctctgccgcaagtgcggcaaggccttcgccgtcaagggcgactggcgcacccacgagaagaactgcggcaagctctggtactgcctctgcggctccgagttcaagcacaagcgctccctcaaggaccacgcccgcgccttcggccacgcccacaccgccctcgacgccgacgacgacgacggcgccgtctccgacgccgacgccgtcgtcagaccttcgtcctccatggctgcctcctccctgcagccgccgccgcgctag

SEQ ID NO: 13276 - DNA, 1101 bp, Oryza sativa
  Clone ID: TFbOSC400259j.C1.o45.fg
atggaaggtgaggtcgtcgccgcctcgcctttcttcgagtggctcaagccaccgccgcggccggcgtcatcctcgtcgtggtcgtcgtctttctcctcgtcgtcctcgatggcttccagggatcaagaaacagtagtacctggtgaagatggcggaggtgaaattcaagaagatcataagagcggtatgacttgtttgccgctgctcagcatgctcgaggaggggaattcgaagaggcatgagcaccctgtgaaagaagagatcatgagcagtgcacacgcagccggggtagtggagcctggcgtggagttgaatatcggcttgccggttacaggatctagcgctcaggaggtcaccatggaggaggacgatgaggaggaggatgacgacgacgtaggggaggaggagatggacgagtggaagcctatgcatggcggttgcaaggtggagggggatgaagagcagtacggcgaggcggtggcgtcggtggaagggtcgagcagcatcaccgccgtgggggatatgttcggcggggtcggggcggagagcggcgtggcgatgagcagccggtattggatcccgacgccggcgcagatcctcgtcggcccggtgcagttcatctgccatgtctgtaacaaaaccttcaacagatacaacaacatgcagatgcacatgtgggggcacgggcgggagtaccgcaagggcccggagtcgctcaaggggacgcagacactggcgatgctgaagctgccgtgctactgctgcgcggcggggtgcaagaacaacgtcgcccacccgagggcgcggccgctcaaggacttccgcaccctgcagacgcactacaagcgcaagcacggcgccaagcccttccgctgccgccgctgcgccaagcccttcgccgtcaagggcgactggcgcacgcacgagaagaactgcggcaagcgctggttctgcgcctgcggctccgacttcaagcacaagcgctccctcaacgaccacgtccgctccttcggtgcccaccacctccccgtcgccgaatccgccgccgccgccgccaccacccccgccgacaaagaccgcatcataagcttccaacggtga

SEQ ID NO: 13277 - DNA, 1431 bp, Oryza sativa
  Clone ID: TFbOSC401482j.C1.o12.fg
atggccgtcaactccggcgatcgcgcgcgcgcgcgcgggcaccacggagacgacgacgaggagggtgtggccgtcgtcggcgaggactacccctactgctctgactcggattccgacgacgacgacgacgtcgaccgctacgtgttccttgcacgccagcccgcgccgccggtggaccgcgacgatgccgaagccgacgccggggcggaaggaacgggttgttgcaaacggaagaggcgcgtcgtcgacgacgacgacgatgatgacggtttctcgccgcgccagccggcgttgctggatggcagcggcggccaagcggcggaggaggaggaggacgacgaggggagctctgatgatgatgacgcaatggcgccgcgtggggaggcaggaggcggcggccgcggccgcggggtcgggaaggtatcacgcaagaaggctcgactcgtcgacctgatcagatcgccattgttgccggccgagctggatggttcggataaggcggcgccgccacctccgcgcggcgtgtgtcccaagaagatcgcggtggtggtgcaggcgaagaacaggaagcgccgcaggttcgtcgacggtggcgaggagcaggagccgcagccgcagccgccggtgcgcggcaagagaagcagaggccctgacctcgaggcgagcgagggtttgcaaacggcttcggcggcggcggcggcggcggcggcagaggcggcggagagagcttccaagcgcttcgtctgcagcatatgcgggaggtgcttcggcagccaccaggcgcttggcgggcatgtcctcggccacaagaagaaagccaagaacgccgccattgccgccgcagcgcgcgacgccacgacgacggcggtcacggaggccgtggctccagcaagccaaaggcaaagcttcttcgccgccgacatcaacggacaagacgagcgtggatgcgatggcgccgagggcagccgctacgacgacgacgaggagaagagccccgtcgtcgttgacgacgttgcagcatgccatgacgcggacgtcgacgaaagccgcggtcacggtaaggccgagtcggcctctgccattgatgccggcggggacgcgggcaacaacaaggtcgcccatggtgacggcgaggagaacgacaagatcgccggcgtcgtcgttgcatcaagccacgacggcgatagcgacgtgggcaagatgaagatcgtgcagcacaagtgcgacgagtgcggcaaggtgtgcctcacggggcaggcgcttggcgggcacatgagcaagcaccggcggacgcgaccggcggccaacggcggcgaggggcctgcaactgcaacggtggcggacgggggagcccaaactgttcggctgatcggcgacgatgtttgcttgcagagagcggtggcaatcgctgggtttcactcggctcagtaa

SEQ ID NO: 13278 - DNA, 975 bp, Oryza sativa
  Clone ID: TFbOSC101063j.C1.o11.fg
atgggatcccttgcagttgccggctgcttgaattccatgggagaggataggttgtcagctctcaaatccagggacaaggaacaagaagcagaactggcaaaacctgaaccaaccaccgaggttctcttcctgtgcagctatgagggctgcgggaaaacttttgttgatgcaggggctcttaggaaacatgctcatgttcacggggagaggcagtatgtgtgtcactatgccggttgcgacaagaaatttttagacagctctaagctgaagaggcattttcttattcatacaggagagaagaactttgtctgccctcatgaaggctgtggaaaggttttggctttctcattggattttaatttaaaggcacacatgaaaacacattctgtggataactatcatgtgtgcaagtacccagaatgtgctcgaaggtttacacaggaatcaaaattaagggctcatatcaagcaacagcatgaaaagggtggtctccagaatccaggtgggtctgcaacaaaccgcagtggtctagcagaccactcccataatagtcacacaccgaaaccgtcagcagctccacccactccctcagctgatcgcccatacgtctgtccttatgatggttgtgccaaggcatacattcatgagtacaaacttaacctccatctgaagaaagagcaccctaatcactaccaggatgccggtgctcaagccgcctcttcgaagatgtcgaagcgaagaagcaagccctccttgacggccaagatgccactgcccaaggtccctaagcgcaggggttacacagagccataccaacctcctgttagtgttgtcgaagagcaccagtggccgaggaatgtgctgtacgaggacgatagcgaggagactgaggaagagggagataatgttggggacggggcgaggtacagagctgctagcagcgacgacgatgaggagactgaggacgaagaatga

SEQ ID NO: 13279 - DNA, 492 bp, Oryza sativa
  Clone ID: TFbOSC900016j.C1.o20.fg
atggaccagcaggaggactacactagtgatctgcagcttgagctcgaggaagaagaagacgataaccaacttagccagctcgcggagctcgacgtgcagctctcgctgtcgctggcgtgcggctcgacgacggcgatgtcatcgtccggcgatgaggaggacgcggagccacggcgtcgccggcgggacgaggaggcggcggcggcggcgttcgagtgccggacgtgcgggcggcggttcccgtcgcaccaggcgctcggcggccaccggaccagtcacctccggcccactaccaacaagcggcggcccggcccgtccaagcctctaatccacgcgtgcgaggtgtgtgggttgggctttcagatgggccaggccctaggtggccacatgaggaggcatcggcctagaaatattgatctgggccataagcagatcgtcatgccagaaattcggcccagttcctccctgcagctgcttgatctcttcgtttag

SEQ ID NO: 13280 - DNA, 715 bp, Oryza sativa
  Clone ID: TFbOSC407916j.C1.o1.gp
taacacaacttatgattgaatacatagatcgagcataaaaaactgaacgagaataagtcgcatacaaaggactatttatgaccaaaccacacaatcacggccatctgattctactactctcaagaacagcacttctctaatctacttccagggttcagaatgcacgcagattagtaaaggtatcagccaccacgtctactgtctagttagtgcatatattgcagcaggatgttagtaaaggacaaaagagaatcgtttggttaatcttcatattctgtttcctcatcatcggcattctggttaccatatctccagccatcttcaatgttgttgccctggtcttcttctgtctcttcactgtcatcttcatacttacctggccactgattcttcactccactgatatcagcaggcaacacgctagaaatcttgacattgtaggctttattagatgagggggtcttatgccctgaatttgtcttgctcctttttggattcggtgcaaggtcgacaatctcagcatagttatactgattggcacgatcatttacagcatgctcacttgcatgtgcagcaatcctaccattctcttcttgaccatgttcaggatgctgagtttttagatgaaggttcaatttgtaactgtgaatgtaggctttcccacaaccatcatatgggcagacatatggtcgctcagcaaagcttgtgggtgctg

SEQ ID NO: 13281 - DNA, 98 bp, Oryza sativa
  Clone ID: TFbOSC100626j.C1.o10.gm
atggaggggtttgaggtagatggaagtgaaagtgaggaaggtgatgtttcaaaggcgtcaactggtggcccaacattagcaaggcagacggagtgcac

SEQ ID NO: 13282 - DNA, 402 bp, Oryza sativa
  Clone ID: TFbOSC100626j.C1.o20.gp
ggagaagagggtgccgcagtcgcagcggtactcgcgggtgccgcagatcttggagtgggccttccagtcggactggacggcgtagcgcttggagcacttgtcgcacttccacttcttctcgccgtgcttgcggcagaagtgcttcttgatgccggtgaggtcgccgagggcgcgggaggggtcgtggtggacgcacgtcggctccgggcacaggtacacccggcggcgctgcgcctgcagcgggttcttctgcttcagcttccacggcaggttgtgcccgcgccggtgcagctgcaggttctgctcccgctggaaccccttgttgcacacctcgcacacgaaccggttcgtcgccagcagcgtcttcggcgacagcgctatcacctccgcgtccgggtctgc

SEQ ID NO: 13283 - DNA, 1956 bp, Oryza sativa
  Clone ID: TFbOSC400555j.C1.o30.fg
atgcgcatccgccgctacgccgcgcgcctcctcgcctcctccaccgccaccgccccctcctccctcccgccgccccccgccgcctccgcggcctggtgccacgccgccgcggacgattgcgccatctgcgacctcacccgctccgcctccccgcaggtggtggcgccggacgcaatcaagcagaaggggcacattgccggccgggcgctggaacccgagctcaggagcgatccgcgcgtcggactagccgaacgaactcctgttccggaagatcaagggcgcgatatagatgacggtcctcccgcgaaaagatctctcacgtttactgatgctgcggcgaggctagaaggttcgggaaatgttggtgctggagttgctactgaaccagcagctagactaggagcccccgttgctaatggagctgttagtgggcaggaggatagagcagcaacttgtcttgcggatgaatctgctgcggagctgattgctaccggggtaacttctctcgttaccggagcaaccgctgaaccagaggttttaaaaggggcttcatttgctaatacaaatgttaccgagccaagagtttcggagagagttcctcttgtgcgtgaagctgcaactgagccagaagctgaagtctctatgcgagaagttacagaaggagctctccctgatggtgaaggtgctgcaaagttggaaattacaggggggctttctcgagaatctgctgacaaaatggaagttacaaagggaatttctcttgttactgaagcttctgctgattcagaacttgcacagagagttcctactgaaccaggagttgaactctctctgccggaagttacagagagagttcctgttgtgactgaagatttcactgagctaggagatacattcagtggcctacatattacagggttcgcttccctggataatgaaggttccgtggaacaagaagtcacaggaagtggttctcttgtaaatgaagctacagagatggaagttaaggaaggaacctgtatcttcaccagagttgccacagagctgggagatactggtagagtttctgcttgtagtggagatggtgacattgctttagatgagccacgacctcctgattgtgtttcggaggttgccaatgtgaatgttggaaatgcaggagaggctgttgcgagcaaagtgcagccttttagagacaatgcagaaagtgttggtggttctattaattcaacaggcaatggccatgttagctccaaaagtccaactgcagatgaagcagcaccacctggtggatgtactgatacacccagtgtttcatgtttatcagacattgtggctagaagcatcggtaagtcagggagaacagatatcatatgttatgttaggcgcaggggtaaaaggaagctggaaatggtggaggtaaaggaagaaaatgttgaaatggatgacagtgctatctgtgatcaatatgatgataaagtggcatcagaaagaactggtccttgcgagagtgtgacgtcaactgctgtatctgtagagattaaaattgctgacataaagagagagcttgaagataattcaactgctagcaagggtaaaaagaagagggccaaaaggtttcaatgtgaaatagattattgccgcatgacattcaagaaccgagctgagctttctgttcataaaaagaacacatgcacggtcaagtcatgcggcagacatttcagatcccacaagtatctgaggcgccaccagagcattcacaatgatgatatgccatacaagtgtccatgggagggttgcagtatggctttcaagtggtcatgggatcggggtgagcatttccaagtccatgctggcaaaagaccttataaatgcacaacacctgggtgcagcaagatatacaagtttgtttcggacttcacccggcataagaggaggtgcaaacctcagaggtaa

SEQ ID NO: 13284 - DNA, 1956 bp, Oryza sativa
  Clone ID: TFbOSC100181j.C1.o2.fg
atggtgggcggcgacctcaccggtgccttccctcttcgaccgtgcctccaaggccaccacggttcttgtggtcgtggtgctcttccgcattatgacccccaagtgcgtagactagaagtggattccgccggttttcttcttcatttgttgtctctctgttacttccaaagaccaaacaaaacatgggtaggaaagagaagaggagagaggggaaaatttgggagccctagatttcgacaggttggctatagtgagggggagtggatgtattggcgcgcggatctggtgggtgcaagaggttgggtggggcgaatcaaattgccacataagcgccacgtcaatgttacgtgggataaagaccttgtcaaaggagccacgttcaggagaactcgcggcattgctgcgatcatgcagccgtcgccgtcatcacctcgggcaccgccgccgacggcggcgcaggcgtcggggtacaagcacttctgcagagtctgcaacaaggggttcacgtgcggaagcgccctaggcgggcacatgagggcccacggcgtcggcgacggcgatgggttgggtgccgatgatgacgacgacgacgacgacgattcgctcggcgatgaggccgtgcggcgtgcgcgcggcggggcagatgatccttggaacgcgggcggcccgtcgtcgtcaggggcagcgacacacgtctacgagctccgcaccaatcctaaccgggtcacgaggagccgccaggtgtgcaagaactgcgggaaggagttcacgtcgtgggagcatttcctcgagcacggcaagtgcagctccggcgaggacgacgacgacgaggacgacgtggatcactcgctgcaaccgtggtcgccttcgcccgaggccgacggcgaagaggattctgcaccggccgccggttggttgaaagggaagcgctcgcgtcgctgcaagggcacaggagtcgatttgtcaccgacaccctcagcgtgcgctgccggcgaggaggaggacctggccaattgcctggtcatgctctcgtcgtccaaggtagatcaggcaggcgtcactgaagcagaacaacggtcatcttcttccgcgagtaaggaacataagagactgatcacgttcatggagccgacgacgtatgtactggatacagtgatggcgcttcccccgccggcgccggcgccacagtatgtctcgaccgtgcctcgaggcatgttcgagtgcaaggcgtgcaagaagccacaagaaggtgaagggctgcttcgctgccaagctggagagcaaccgccagaggtggctgagccatcacaccatgcagaggtcgctgatcggagcgaggacaatcccgccaaggccacttctgatgccaggaggaacgtgcacgcaagcatcgacggtgatggaaacgccggcacgagcgatgccgcggcagaactgtcgatggccatcgtgcccatagaaccgccggtcgccgcgctcgccgctgcaccgttgaagaagaagggcaagatgcacgaatgctcggtctgccatcgactgttcacctccgggcaggcgcttggaggccacaaacggtgccactggctgacgtcaagttcggcggatcacaccgcctcagtcccacccctagccgacgaccttgtcccgctctcgttccggccaatgttggacgcaccggagcccgctctcgacctcagcatcgcggcgaacccgccactgctggcctcggccgcaacagtccgtccgaaggtcggcggcagctcgtttcatctcgacgcgccaccaccggtatacatcccatcgtcgccggcgatacccagccaacggaacaaggctaccgcgacaaccggcagccagaacgccaacgacgcggtcgggttaagcaccgccgcagcagaggacgaggcggacagcaccaccgtcaagagagcgaggctagcgatctcaaggacgtga

SEQ ID NO: 13285 - DNA, 1515 bp, Oryza sativa
  Clone ID: TFbOSC419155j.C1.o1.fg
atgttgggttcttgcgccccgacgacggccgggccgccgccggacgaggcgaccacgccggagccgttccggtcgctgcagatcgccaccgcctccgccggctcggcgaagaagaagcgacggccagccggcacgccagacccggacgcggaggtggtgtcgctgtcgccgaggacgctgctggagtcggaccggtacgtgtgcgagatctgcaaccaggggttccagcgagaccagaacctgcagatgcaccggcggcggcacaaggtgccgtggaaactgctgaagcgggaggccggcgaggcggcgaggaagcgggtgttcgtgtgcccggagccgacgtgcctccaccacgacccgtcccacgcgctcggcgacctcgtcggcatcaagaagcacttccgccgcaagcacagcggccaccgccagtgggcgtgcgcccgctgctccaaggcctacgccgtccactccgactacaaggcccacctcaagacctgcggcacccgcggccactcctgcgactgcggccgcgtcttctcccgggtggagagcttcatcgagcaccaggacacgtgcaatgccagccgcgggcaggcggcggcggtggcggagggagggaacgtgtcgacggcggcgtgcggcggcgtagcggtgttagagcaggagaagcagctggacctgcaggcgccggcggcggcgtcgctgtcgcggaccgcgtcgagcaccagcccgtccagcgacgtggttgccagccccgtcgcctggcccggggccggggcgccctcgatgccgagccccaaggccgccgccttccgcggccggttcgacatggcgccgtcgccgccgccgccgtcgtacgatcattaccgcgggggcgctggcgcgcacaacctcgagctccagctcatgccgccgttcaacgcgggtggcgccgccgccgctccgggcgggatgggggcgtgcttctacgcggcggcgcatcagcatcacccgacgggtgtctcccagtgtaacgacgcctccacgcagctgcagctctccatcggccgtgacgaggtcatgggcgcggctgggacaagcgacgaggcgtcggccgcggccaccgcgaaggagcaggcgcgggagcagctgcggcaggcgatggcggagaaggaggcggccggcgaggcccgcgcgcaggcgaggcggcaggtggagctcgccgagcaggagctggcgaccgccaggcgaatgcggcaccaggcgcaggtggagctgagccgcgcccacgcgctccgcgaccacgccgtgcggcaggtcaacgccacgctgctccagatcacctgcttcagctgccgccacaagttccgcgccgcggcggcgggggcgccactaccggccgccatgagctccgacgtcgcctgcagctacgtctcctccgtcgtcaccgagggcggcgacgccgacgatcccctcgacgtcgtcgacgccacgcggcgtcgcctacagcacgctaacagcatgggcatcatgtag

SEQ ID NO: 13286 - DNA, 1158 bp, Oryza sativa
  Clone ID: TFbOSC404176j.C1.o2.fg
atgatgatgagtagtagtgccgatcatttcagcaacaataataataatcaggcgatgtacttggagcaagatgaagatttctcccagatgatcatggagctgtgtgattttgatgcgagtagcacgacgcaagctcgccatggcggcgaagcagcagcagcagcagctgggaacgcgagggcggtgctgacgtacctgacatttctggagcagaagatcggccacctccgcggcataatctcgtcgacgccgaacccgccgccgcagatcgtcgccgccgagctcagctgcatcgtcgtgcagctcgtctccatctccaagaacctcgccgcggcgcgccgcggcggcgacgacgcggacgcggacgccaagcacgacggcagcagcgacgccgacgagggcgccgatggcgacggcgagcgcgccccgccgcggggctcctacgaggtggtccagatcgagaaggaggagatcctggcgccgcacgtccacttctgcggcgtgtgcggcaagggcttcaagcgcgacgccaacctgcggatgcacatgcgcggacacggcgaggagtacaagtcggcggccgcgctggccaagcccggcggttcgccgtcgcgttcgccggcggcggcggacgcggcggcgaggaggcgcttctactcctgcccgtacgtggggtgcaagaggaacagggagcacaagagcttccagccgctcaagacgcccacctgcgtcaagaaccattaccggcggagccactgcgacaagagcttcacctgccgccgctgcaacgtcaagaggttctccgtcgtcgccgacctccgcacccacgagaagcactgcggccgcgaccgctgggtctgctcctgcggcacctccttctcccgcaaggacaagctcttcgcccacgtcgccatcttcgacggccactcgccggcgctgccgcccgaggactacgacgacgacgccgcctccggtcagctgccgcacgccgccggcgaggcagtgggcagaacggtggacacgaaccgcttcttctccgatggattgatgatcaaaggcagcatggaggatgagcgaggaagcctctcgccgatggggctcgattactgtgaattcgatggaattgatctctttgcagcagcagcattcgatttttga

SEQ ID NO: 13287 - DNA, 1026 bp, Oryza sativa
  Clone ID: TFbOSC400149j.C1.o5.fg
atggcgaagaacgcatgcaagctctgctaccgccgcttcgctagcccacgcgccctcgcggggcacatgcggtctcactctgtggcggccgccaacgcagccgcggctgcggcggcggccgcagccgcgaagctgcagatctcatcggcgtcgtccgcgtcgacgtcgttcaccgcggccgatgaggaggaggaggaggaggaggaagaggaggacgtgggattcaagaagcccctttccatctacgcgctccgggagaatcccaagcgcagcctccgcgtctccgagtacgcgttctccgaccgcgagagcgaggccgagtccaccccgacgcccgcagccaagggcttacgcgccggcggcggcggcggcggcggcgatggcgagcccatgagctcgttgtcgtacgcgggaacgccggaggaggaggtggcgctggccctcatgatgctctcccgcgacacctggccgtccgtcgagcgcggtggcggcgggggcgagtactcggacgacgggagcgacgacggctacgcgctccctccgccgtctcccgctccggcgccggcgccggtgccggagaagcggacgcggttccagtgccccgcgtgcaagaaggtgttccggtcctaccaggcgctcggcggccaccgcgccagccacgtccgcggcggcaggggcggctgctgcgcgcctcccgtcgctcctccccctcagccgcatccgcagccgccattgccggagcacgacgcgggcgaggaagacatggacgggaaggcgccgccgcacgagtgcccctactgctaccgcgtgttcgcctccgggcaagctctgggcggccacaagaagtctcacgtctgctccgccgccgccgccgcggcccatgcacagacacccggcggcggcgctcctccgccccagcccaaaattctcggcatgatcgatctcaacttcgcgccgcccgtggatgaggtggagctctccgccgtgtcagatccccacttcccctccaatccaccaggtccttga

SEQ ID NO: 13288 - DNA, 1350 bp, Oryza sativa
  Clone ID: TFbOSC400591j.C1.o18.fg
atggcgacgaacaggttcgtgtgcgagatctgcgggaaggggttccagagggaccagaacctgcagctgcaccggcgggggcacaacctgccgtggaagctgaagcagcgggggagcaaggaggcggtgaggaagaaggtgtacatctgcccggaggccagctgcgtccaccacgacccctcccgcgccctcggcgacctcaccggcatcaagaagcacttcttccgcaagcacggcgagaagaagtggaagtgcgacaagtgctccaagaagtacgccgtccactccgactggaaggcccactccaagatctgcggcacccgcgagtacaagtgcgattgcggcaccatcttctccaggcgtgacagcttcatcacgcaccgggcgttctgcgacgcgctcaccgaggagagcgccaaggccatcggcggcatccccgccgccatggccgcgccggggcaccaccaccaccaccaccaccaccaccaccagctgctcttctcgccgccgccggtcatggcgcaccaccaggagctcgccgcgctgcaggagcagcagcagcagcagcatcaccaggatgtcatgcagtcgccgcaccagcatcagcagcagcagcagcagcggcagcagctggtgcagcagaactgcgggtacgccgtgaagccggagatggcgccgtggccgacgacgatgccctacgaccaccaccacccgctgctgcagccgctctgcaacgccaacgccgccgccacggcgcagagctcggccacgtccgcgccaccgacgacgccgcagctgcccgccgccgccgccgccgcgcacctgtccgccacggcgctgctgcagaaggcggcgcagatgggcgcgaccatcggcggcgcgggcaccggcgccgcgggcgcgcactacgcccacatggcgtccccggcgggcgcgggcgcgccggccggcggcagcgccaccttcggcctcggcctgtcgtgcctcaacacccaccaggacggcggcggcggcggaggcaacggcctcatcccggccgggatgatgggccacctcgcaagaaccgcctcccacggccggagcggcgaggacgtcgccggcgccggcggcggtggcggcgacggcatgacgagggacttcctcggcctccgcgccttctcccaccgcgacatcctcctcgccggcttcgactcgtcgtgcatgggccacgtgaacgccgccgccggcatggccggctacgagccaccaccaccgcaccatggacagccacagcaccagcaccagcagcagcagcagcaacagcaaggcggcagcaacgagccatggcatggcatgggcagccatagctaa

SEQ ID NO: 13289 - DNA, 1188 bp, Oryza sativa
  Clone ID: TFbOSC33902j.C1.o3.fg
atgggagatccctacaccaacttcttgagaggctaccaccaccaccaccgctcccaccaccccctccacttccctccgccgccgccgccgccgcctccgccctacgccgcctccttctccggcctctactcctcctacctccacccaccacctcccccttcctcccctccgatcagggaagccctccccctcctcagcctcactccctccaccacccacgacgacgatcaccaccaccgccgccatgatcaagatcatcaccaccatcacaagcaaggccaagaaaagaacagccatggcggcggcggcgccgcttcttgcagcaacaacgacgacaaacgagaatcaccatcagcagcagcagcagccgatgatcaggcggcggaggtgaccgtggccctgcacatcggcctcccgagcccgagcccctccgacgccgccgccgccgccggcaaccaagctgcagcagcagcagcagcagaagcatcggcagcaggtggaggaagcagcaggatgcaagtggaggaggaaggaggagaggaggaggatgaagacgaggcggcggcggcggcggcgacggcgacgctgccgctgggttgcgcgtccatagggatagggaagctgaccaaggggcagtactggatccccacaccgtcccagatcctcattggccctacccagttctcctgccccgtctgctacaagaccttcaaccgatacaacaacatgcagatgcatatgtgggggcacgggtcgcagtacaggaaggggccggagtcgctgcgggggacgcagccgacggcgatgctgcggctgccgtgctactgctgcgcggcggggtgccggaacaacatcgaccacccgcgggcgcggccgctcaaggacttccggacgctgcagacgcactacaagcggaagcacgggatcaagcccttcatgtgccgcaagtgcggcaaggcgttcgccgtccgcggcgactggcgcacccacgagaagaactgcggcaagctctggtactgcgcctgcggctccgacttcaagcacaagcgctccctcaaggaccacatccgcgccttcggccgcggccacgccgcctgcggcatcgactccttcgacgacctcgacgccgatgacgacccctcctccgacctcgaccacgcctccgcctccgcttcgcgagtagggtga

SEQ ID NO: 13290 - DNA, 2538 bp, Oryza sativa
  Clone ID: TFbOSC31520j.C1.o2.fg
atggtgtgctctaccaatatactttaccaaaggaacaacccaagaaaatggaatggaggacagatggaaccagaaaataagcacggttgtgaactgatagatacctccttcgcaatatcagaaggcctcatccactcagagacaagggtaccgagctcgaatcgccctatagtgagtcgtattacaattcactggccgtcgttttacaacgtcgtgactgggaaaaccctggcgttacccaacttaatcgccttgcagcacatccccctttcgccagctggcgtaatagcgaagaggcgcagaggagaagctcatttttcacaagaggatgatgctaacctcaacacattaagtgaagacccaaacaaaagtaacctccccagtatctccatcattcatgaagctgtaggaccattagagtcaagagatcagaataaaactgctgccttccccagtacttctggtgtccaggacactggagaaccaaatagtgctttacacaatgtcagacatgaattggattcattcaagagttctcggcagtgttctgcatatatagaagcaaaaggaaggcaatgtggtaggtgggcaaacgatggtgatatttactgttgtgtgcatcaaagtatgcattttgctgaccattcgtctagggaagataagtcacttactgttgaaactccactgtgtggggggatgactaatcttggtagaaagtgcaagcatcgagcccagcatggttttatcttttgtaaaaagcaccgcttccaaacaaatccagatgcaatgagctcagatagtttgttaagttcgtctgagggccgtaagtgggaagagtcacagaaaagcgtggagaagatgtcttcctcaaatgcaacttgtagtgtaggctcagagcaggcaaataatttccaggttgctgtgcacatgaaagtgacaccaaccatggctgttgagacaactagtgataaagttaacgtgtcagagaacgctgatctctgctaccccatgtcaacttccatggaaaactctaacttagatgcttctatttgcattggaattcgctctcatgacaatattgctgaatgccaggattatgccgtacgacacacactttactgtgagaggcacataccgaagttccttaaacgtgccagaaatggaaaaagtcgactcatctctaaagatgtctttatcaatcttttgaagtgttgcacgtcaaggaaagaaaaactgtgcttacatcaggcatgtgagtttctttattggttcttgagaaacaatctttctcaccaacgcccgggtcttggtagtgaccatatgccccagatattagctgaagtgtcaaaaaatcctgatgttggagaatttttgttaaaactgatctctagtgagagagaaaagctttcacatgtttggggctttggtacagatagctctaatcaaatgcattctgagaaccaagatggatcagtgatggtgttacgtgaagatgggacacatccttcacctggtctgaagtgcaaaatatgttctcaggagttctctgatgatcaaggacttggattacactggacagaggttcacaaaaaagaagtgcggtggcttttcagaggctattcttgtgctgtatgcatggactcatttaccaacagaagagttctcgaaaggcacgtgcaggaaaaacatggcgctcagtatctccaatattcgacactcttacgttgtatatcgtgcaacagcaactttttgaacacagatcttttatggcagcacattgtttcagatcattctcgagatttcagccttctggatcatgtccctcgacgacctaggggtcaatctatcaaaagaacagaaagggcaagtgatgagctcctttatgataaccataaccttggtaaggatgatggtttacagaagttcacctgcagattatgtgggatgatgtttgatcttttgccagatcttggccaccaccatcaagttgctcatacaaactcaggtacagtcagtgatatcccttcaggacgtgaaaagtatcagtttaaccgtggtcggcactattattcagccttcaagaaaagtttaagaccatccggctcattgaagaagaggactagttctggagttgagaaacattttaaggctcaaagcttggatctatctatggatacatcacacattgtggaatctgagaccaccacccttggtaggttactggatttccaatgctcagacgtggcattgactttattttcaaagattcaaaagacaagaccccacccaagcaaccttgatattctgtctattgcccgttctgtttgctgtaagacaagccttcgtgctgcattgaaagctaaatatggaatcttgcctgataacatatttgtgaaagctgcaaagctttgtagtgatgttggcatccaaattgattggcatcaagaagaattcttttgccctaaaggttgcaagtccaggtctagttctaattccttgctccctttacagccattgataattatattcgatttttaa

SEQ ID NO: 13291 - DNA, 1068 bp, Oryza sativa
  Clone ID: TFbOSC900182j.C1.o1.fg
atgggtggctcgtcctccaccagccggcgccgccgcgacgagtactacgcggcccggcccccgccgccgccgcaccactactacacctacccaccgccccctcctccgccgccgcaccaccaccaccacccgccgccaccgcctcccccgccgcaccaccaccaccagcacccctaccggcctccgccgccgccgcaccacgccacctcgtcctcctcgtactactaccaccacccgccgcccccgcacgcctaccacggcccgtggcaccccgcgccgcgcccgccgcacccggagcagcccgcgctgacggggccgccgcccgagttcgtggatcaccagcaggcgcggaaggtgaagaacgacgtcaacctgcacaaggacaccatccggctcgtgcccgacgtcacggaccccgaccgacgcctcgtcgccttcaccttcgacgccgtgaccgacggcagcataactatttattactttggcaaggaaggaaaaaactgtactttctcttcagtatatccagaattacaaacacctacaaagatacctttccagaaaggattggctcaaaagtttgtccagacctctggatctggtgttgatttgggattcttttctctggatgagctttcaaatccttctggagaagtattcccactggtagtttatgcagaagcttgtccacctccagaggaaagtcaccagcctaactccactagggcacaaattactcttgctgttatagagaagcatcacaatgaccttcgagttaaagttgtcaagcaaatgttgtggagtgatggcgagaagtatgagctacaagaaatttatgggattgtcaactcgactgaagctgatgttcccgacgcagatgatagtgatatggggaaagaatgtgtcatctgcttgacagagccaagggacacagctgtttttccatgtaggcatttgtgcatgtgcagtgaatgtgcaaaaactctaaggtttcaaacagataaatgccccatatgcagacaacctgttgagaaattaatggagatcaaagttagaagtcccgagccataa

SEQ ID NO: 13292 - DNA, 497 bp, Oryza sativa
  Clone ID: TFbOSC415309j.C1.o6.gp
tttagccaacaattaatcttatgtatactgtatagttctcatagatatatatgtacacaagttccctatagtaatgtatcgtactaccgttcatagcttcacgtaatgcacataacacagaatgtataattttttcagtacaattggaacatcaaaatcacagctgacagcatgacatactttacagatggagcttttctttttccatcagaacttgtaacgaagaacaaacacccattgttcattcccatgtctactatttgattgttggaattgctcaaactgcatagaggcggataatctggttaatcttggctcgacaaatggggcatccccatttctttgattctatatccttcaagcaggacatgcaaccagccatgtgaccacacggaatgcaggcaccttccacaggagcatccaaacaaataacacaggttcccggtggagtgttaccgctgttgcttgcattagcatcactttctgcaggttttgca

SEQ ID NO: 13293 - DNA, 1674 bp, Oryza sativa
  Clone ID: TFbOSC400302j.C1.o7.fg
atggcgtcgcgcccccgtggaaggcgccttcctcctcctcatccgccgctcatccaggagatcctcgacgacgacctcttcgatgtagaggttaactacagcgacgaggaagaagaggaggaggaggaggaaagcgatgaagaggagtcggagtcggaggacaacgaaccggaggaggtggtgccggggcaggagagtatcggggagggatgcgggccggccatacaagctagggtttccggcgccgccgcggagaagaacgcctgccccgtttgtatggaggcctgggcctcccaaggcgctcatcgaatctgttgtattccttgtgggcatatctatggaagatcttgcctggagaggtggttgaggcacaagggcaacactagcgcaacctgccctcagtgtgggaaaaggttcagacctaaggacattaccaatctctatgcaccagaggttgcagttccaaataatgatctggaaaaggaagtattgtatctaagggggaaagctgaatcccttggggaaacggtgatgaaacatgagaaattgatagaggagatgaatgagagattggttgagttgacaagtgctcagaagaggcagattctgtcagagcagagattaatgaacgttggtagctcaaagagacagaaagaattcttcatggatggacttcgagtcatggccatagatgcatttaaccaaacaattcttgcttctggaaaagcaccaggcataggacaagaacatgttctttataagtttagcatggtttcccatcacgaagctcggaatatacaacttcctctggatactaaaactgtcagggacatatgtatcttacctagtggctctgctatttttacatcactgggcaggaaactatcgtcatttagcatgacggctgaccgtgtcgttcttcagtgtgatttgccgtgtcctggctggtcatgttctgcggatgaatcttcgcgtcagatttgtgctggattgcagaatggcaatcttatcatctttgatatccgtcaaacctcaagaccgttgcattctatggtgggtttatctacacacccggttcatactctccatacggtcattgataacaacggttctagaaagtttctctctgcctcttctataggcccctgcatgtgggatactgatggtattcaaggcaggccaaagttgctattggggacagataatcaacgggtgtgcatttctcttgcatgtgccccttcatcaagtgatctattggtagcttcctttcggccaaaggttgaaacgtccgaggatgctacagcatctcaagtgtatctatcacaaacaccaacaccctctggtggagggaaattagggtatcattccttcatcaggagggcggggaactcgtcatccttcaccgaagataggacatgcagcacacttgtgagcgaaattcgcatgtcgaaatccgcaattataccttatggaaacaaccaacatctgtttgcttatggagatgagtcgctgcgtggggtccggacctggcgactaccatcgtttgagatgcattctgatctcagctccctccagcaaccggtcctggatctaaggtatgcagaaagttcatccggagggaggtatctcgggtacctgagcacggaaaagttgcaggttttcagaattaggtag

SEQ ID NO: 13294 - DNA, 696 bp, Oryza sativa
  Clone ID: TFbOSC8663j.C1.o1.fg
atggcgggtgaagaaccatggtcaagcgaggcctccgacgatgtccccgacacatcgcacatgtcggacgaacaatttcaacagttcatcgaccagtactgggcagagcaaggattcaacatttggagttggattcgtgcttccaggacgtcgtcaagctccacgccggggccaaccaggcggacggcggcgtcatggcaggccgtcactttcgacggggacggcgtcgcgcgcttctccggcaactccgaccgtagcggcggactcgacgaccaagccaccagcggcttcagcatcgtggacctactggacggtatcctacaagcggatgacgacggcaatggcggtggagctacgccggcgtcgagcatggcgatcgtaaacctgccggagattaccgtcggcgacgagaaaggcgaggcgaaggactgcccggtgtgccttcagggcttcgaggagggcgacaagcttaggaagatgccgtgcgctgattcgcactgcttccatgagcagtgcatattcagctggcttctgattaaccgccattgcccgctctgccgcttcccgttgcctgctgagacggaggaggatgaagaggtggtccaggcagagaacgacgacgacgacgatgatgaagagaccatcctatgtctgcatcgactgttcgctgatgcggctgatgagtatacgagttga

SEQ ID NO: 13295 - DNA, 2625 bp, Oryza sativa
  Clone ID: TFbOSC20843j.C1.o1.fg
atgactagagaacatacctgttttactttggtaaaagctacatcactatgctcatgttctacatattttagagaagcacaactagacagagtttattacgctaggttgagtattatccagaaggcaaggataattacggagtgtttgcaccggttctgtagggactgcatagaaaaatccatgcggcttggaaatgatgaatgcccagcatgccgcacccctgcaagtagtcattccttgaaggttgatcctaattttgatgctttaattttgacgctgtatccagatcttcacaaggacgaggaagaggaacttgctttcactgaagagaagacttgtcacaaaaagatccaagcatccaccgatgaggcacctcatagacgaaaagaagcacttgggaagaagagctccgctgcaaaagctataggttcttcaaggtctcaagggaatatgctggcaaggaagagaggacacattgattttcctgatattgtcccaactaaagttcgtgatttccacaactttgaagaaggacgctcatgtaagaagtttgagtgtggacaaatttgggctttatatagtgaagttgataaattccccaagttatatggttggataagaaaagtcaagctacagccattcacagtgcttttgacctggcttgagccttgtcctcaacaggagcaggagaagcggtggttagagcaggatatacctatcagctgtggtgaaatttggtccatctacatgaactggacatttgactggactccttccagcaaagctacatgcgagttcaccatcgaggaaagaggtggtgagctttgtggcttcttagagcttgatcctggttctgttcctgacattttcctcaatagggaagaaaataacaatgatggttgcaaagggttgtcatcagttggtgatcattcagaaggtccaaagacaaaaaaagctcgcaagtttcatgtgtcacaatcatcccccgctggacataaagtcaccagcaaagtggacagccatgaggaaagaatggcaaatcgtgtagctattcggctaaagaacatcatgaagatctttctttgcaaaaaaagagctgacagacaatataatccacctcctatgacaagaaaagtagacattcaaggtaaaggaaaaacttcagacacagatgataaggacaatgccaatgctgaagctactaatactgttcgtcagaatgagcattcctgttctttagaacttccgtccccatatccagatttctatgattttgagaagctcagggatattaatatgttctcacttggtcagatatgggccctttacgacgaccttgatggcatgccaagattttatgctcgaattgaacattttgatgcatccagcttcaaagctcatctcacttggttggagtacaatgcagcaagtgaagaagagaagaaatgggctgatgaagaacaacctgttgcttgtggtttctcagttaatgatggtatcactgttatcccattagtcaggattaaaggctttgtgagtttatttgcggcagctaaagacaaatctgcagttgtgatagcatcgagtgagttgcttcgattttctcataatatcccctgttacaggacaactggaaatgaaaaagttattttcagggcaactcattggctctggttttgggcacaactacaaagtgatgttgataaattccccaagttctatggttggataagcaaagtcgagcgacaaccattcatagtgcatttgatctggcttgaggcttctcctgaatatgagcaggagaaacggtggttggagcaggacttaccagtctcttgtggtaaatttaaaatccgggactggaaagccagagcagtgttcatgcctgacaagcgaaatacagttgtggagatacctacaagagatcgtttgaggttttctcaccgaatcccctccttccttttgacagaagaaagaggtggcaggctccgtggcttctatgagctcgatccagcttctgttcctgatgttttcctgtataggaacactgttatgggctggagtggcatgagaggaactgatgcactaaattttattttttttacatattggaatgcaacagagaagaggctagctattgggcattcccaatgtttaccgctcaatgagccctcttttcattcttggttgtatgacagccataagaagatggtcaaggaacatcgccggggattcgacaccatcgcaacactggtagcgtggacgatttggaaggaaagaaacaattgggtcttcaaccagaagagcagaacatgggcggagattgcaagggttatgacgggtgaagcggagctttggcggctggctaaagccgcaatccctgttgtgtcaggactgaacaatcctgtgattgcctaccactatccagacctctgtgattttggcaagtttagagatgtcaactggattgaagttgatcagatctgggcactgtatgacgaccacgatttcatgccaagagtctatgctcgaatagatcacattgatacatccagcctcaaagttcagttcacttggctggctggagcacaaagctatgaatgcgcaagaggcgaaatggactga

SEQ ID NO: 13296 - DNA, 1005 bp, Oryza sativa
  Clone ID: TFbOSC408838j.C1.o17.gm
atgcctccatacacgacgtccgtgcccctgcacgcacagcagtcgcagccctcatgttcaccgtccacgaccccgtcgtcatcggccctgcacgtccgccgcgccgcgccacgctcgccagctttgcccttccgtcaatggcctccctgccgccgcggatccgcgttcgccgcgtgcgtcggacgcgccgtccatggtgctacccctctaatctctctgaacgccttcggccacgcccggcctcgtcttccggtcacgctccaccatcgtcgcagcagcagcaatggcgactcccgcctccttccaacggtcattgccgcaattgtgcacgcctcaacggcggtcttccgtcgcggctataacatgggtatctgcgtatctgtgtgtgcgttctcctgtgcattcgagatgagcgatatccgcggcttccaccgtgcggtcccgagcgacgcggctgacggaactgccggaggagctccgatcagcgccggcgccatcgccggcaccgtctgcgccgttgtcgtggttgtcgggctgctggccccgctcgtgtactggctgtatcggaggaagctgaaggcggcggcgagtcctcctctgcgtccgccggccgccgcggcgacgcccctcgtccgcgctcaggaagcaggcgcggcggtcggaggccaaggcgactacacgcggcgtcgtgcgcaagtcgccgtccccgccagggatggcggcgacctctgctgcggcatgtgcggctccgcctacgacatcgtgcgaggaggtggggagctgccggagacgctggagtgcggccaccacttccaccggcggtgcgtccggcggtggctgcgcgtcaacctcgcctgcccgacgtgcaacgccacgcacatccaactgtgcggagacgacgacgacggtcaagcgaccacgcccaggcatcggctgacggcgagcgattacagcggctgggatgaactctccaccggcgttggcagttccagctgccgtttctga

SEQ ID NO: 13297 - DNA, 2481 bp, Oryza sativa
  unsure (1)..(2481): unsure at all n locations
  Clone ID: TFbOSC401368j.C1.o14.fg
atggcaacatcttcggtggccgccatgccgcacgactccacgccatggagggacccctccagggcatcctccaggcagcccgccagggggttcttcaacatcctcgtcccgccgccgcagtcgccgcgcccgcgctgccccgaccaccaacaccaccaccaccaccaccaccaccacgatgctgctggtggcgcggcggcggcggcggcggcggcggcggcggagcccacgccgaggcggcggaagcagatactggatcggtgggcggcggcggcggcggccgcgtccgccacggcgtccgccgaggcccccgcgccgcaggagcaaaggcggagggcgagggacgccgagctgtccgcgctcgcgtcggccacccgccccgtgaccgcccgcgccgccgtgttccgggagccgtccccagcgccgtcggacgcgtcgtcnggggcgggggcggggtgcggaggcggggccaggtgcggcgcggagctcccgcccgcggcgccgcgcgcgtcgtcgctgatccagcggtggcgggagatcgaggcggtggggcccgccacgccgcggccctgcgacctggcctccgactccgacggcggctcgccgcggggccgcgtggggtgcatcgtcaagaagctcagcggcacgtcgtcgatccccgacgacgagctggacgccgccaacaaggaggtcgcgatgtcgcagtccgcgcccccgtcgcccgcgccgatgcgcgccggggtggagccgcccaccaacatcgccggtatcaacgggtccaggccgacgcagctggtagtccgcacggtgcgtggccgccgcgcaatggaggagctcgtcgccatgatggcccattgccggaggtgcgagctcgccgcggtcgccgaccgccacgtcgtgtcgcggttctcgcacaaaggcaggatccagtcccccaaggatggggccatatggctgtttggtagatcatgttcccaactggcactgctgatcattgtcatgtgcaaatcacattatcatgtttcgttttgcagattgtatctatgcgaacacaagtactttttaagcttgtttgttccttatgtggcttccgctaatattgtcatgctctttgacaccttgcagtccatgcttcgtcttaggctgttgcgtcagggatttaaagttaaggatgaagtttggactctaccaaaaccagtcaggccacgccttccaaaacatgagcatgaggcctataccacaagccaatgcctaacacaagcttttctcagcaagtgcattgctggtaaccaacataagggtggccaggttttggctgagaagtctactggttctgttgagagactagtttcttcggatggtttaggaaatgaacaaaatgatgggcagaacagcaacagtgaaaatcaatgtcaggaaggttgcaaaaacatggtaaaattatgtacccagaatcaggaatattctgagccatcgagtttcgtgaggtatgacgagcatagtaccgttgatgatgtctcgccaagtaccataagcacattgcatgaactttgcactccatcctcaaggggtgataatctaagagaagaagacaaccaaagcctgaatggttcatgggaagagagggcactatggataagtagtcttggttggcctgcaccagtggaagccatgagtccagacagctggaatcaggatgaaattggggatattgagaatcacactcagaatgaatttaatgatcgcccctggatagattcccctaactcatggagatcattgtgtgttgccacacaagcagacagcggtgctttgtctggcaatgctgacatctgcaatcttcttgagagcaaaaatgtctcaaagtctcttgagagtgattttagcaataaaatgaacaacatgttgctaacaatcttgcgcaaacaaaggcaacaacacatgattgatgattttgaaggatattatgatgagcgcttatactggagacagaatgatgaacaacagaatgctgatcagagggtatctgcacagtgttcattagcacctgtctcccatctccaccaacaagaaggctggcagcattcttcgtttgaacatcaacatcatgaaaaccaaaacttccttgaaatggaggtcagggttagaagtgaaatggcacaggtccatcatgaaatatatgaactacggaagttggtggaaagttgtattgcatcccaagtaaagatccagcactccattaaagaggagatgtgcagtgcacttcgcgaagcagggttgatgccaagccaacccgacacaccagcaaaaaggggaagctgctgcatctgccatcagacgcaagttgactctctactttacaggtgtggacatatgtgcacctgtttcaattgcgccgatcagctgaaatcgagcaacaggagttgcccaatctgccaatctcctattgaggatgttgttcgagcgcatatgaatttttga

SEQ ID NO: 13298 - DNA, 3582 bp, Oryza sativa
  Clone ID: TFbOSC401616j.C1.o63.fg
atgtccagccctggaaggagtgggttctcccctgggttggcgcagttgttatcatctagagatgaagcgaaggttagttcccagaagtcgcacttggtatcgtaccatgacgagattgggcaccaggatattgagaggacgctagagcatatatttgatctccctcacaagtcggtggtccggcctccgggtccgattgatgtgggatttgtgcgctcggtattgcggaatcaggcaaggaagtttgatcttggcgggaaagatagccgtaaatacgatgatggtgttctgattgtggataaaggtgctgggcaaactaaggttgttcttgatgattcgagcatttgtggcaagttcaagagcatttggggacctttgcttgttgagagctcggcatcattcagcagcgctagggctaacacctgcgtgtggaatggcaagtggatgtatgaggttaccctggagacgtccggagtgcagcagcttggatgggctactctctcgtgccccttcactgatcagaaaggagttggtgattctgatgattcatatgcatttgatggccggcgggtgaccaaatggaacaatgatccagaacaatatgggcagatgtgggcagtaggagatgtgattggttgctgcatcaacttggatgctggggagatcagtttctacaggaatgggaattttcttggtgttgcctttgatgggattcgcaaagtgggacctaggaaaggctactatcctgcaatttctctctcagaaggtgagcgttgccatctgaacttcggctcacatccattcaggtatcctgtagatgggttcaatccaattgaggcaccgccacatttttgtatgtttgcggcatatcttcttagatgtttgttccgtctactagaagttcaaaatctggaaaaatctgaatctgcatacttcgagaaactaaggagggtcaagaaatttgcacctttacgtgaactatttcgaccaatttcggaagggatatgtgcagaatttttcggtgccgctgaaggaagccaagggtgttctgaatatatcacctggggatctttcatcacccttcttacagatgttttcagggtacgggagccgcatgatttcttatgccttgaccaggttcttgaactttttctacagttcccggggtgcagttcattactgcaggagctcattgtggctctttcttgtatgtgcaaagctgctccacttgtgttgacagaatgcccattttctggaccatatccatttttagcgctggcttgccacattcttaggcataaagatgtaatgcatctatggtggaagtcagaagattttgcattctcatttgaaggatttcttacgatgaagattccaaacaagcaggacttgcagtaccttgtaccttctgtttggtggcctgggtcttctgaagatgaggttagcatgacattatcgatgacaacactctccgatgcaattaagaagattgaggataagcaccgtgagctttgcagcttggtgatatgctttgttccaccaacgtctccccctctgcttcctggatctgtgtttcggtcatttgtacaaagttcaatactaaaggttagaggtggagatcataggatggcttccagtgggactttcaatgacacggtgcttgtctcactgtacactgtaatcctccatttgttgtctgaaggattttctatggattcttctggacctgcatcatcctctagaataaattatggaactggtgttggatttctccacaaaggtggaaagcggaggtttcctacacagttattattgaggaatgatgcctattacaatgtaattcctagactcggtggatcactaaatcacctgttgatgtttcaccaaattgatgccaatgaagatgaggtgcagtgggatgaaggttgcatgaatgatgaagaaacacggataacacacactacagcacaaaaaccttgctgctgttcaatcacagatgtcactgttggcctgagatttaaagaaaatgccaagtacataccatcaacttcgaaaggcccatgcaagtccatgcatgaaaaatctgcacatattgcctctgaatgcagtgcattctattttgtgtcccagcaatcacaatccatttctttactagaagaaactgataggcagataagagaaaaatcatgcatggagcaagtaagacgcttgaaggaagcccgcaatagttatcatgaggagttggtggattgtgtcaggcattgtgtttggtatcgtgccactgttttttcttcatggaagcaaaggggaatgtatgcaacttgcatgtgggttgtggagcttcttttggtgctcagtgattcttcttccattttccactatattcctgaattctatgtggaatcattggtagactgtttccatgccctgcggcggagtgatcctccttttgtctctcctgcagtatttcttaagcatgggctagcttcatttgtcactcttgttgtcaaacactttgatgatccaaggatatataaagaattcatgtttgtatttgagaacaatcgggaggctataaacagaatgccaagatcacttctgtcagcttttgataatagatcatggatacctgttaccaacatacttttccaactctgcaaaggttttggctttgcttcatctaagaatgttgaaccttcatcatctgcaattttccaggtcctactcagggagacatgtattcatgaagaagaactgtttttatcctttctcaatcgacttttcaacacattaagttggactatgaccgagtcctctatgtccatccgtgagatgcaagagaagcgccaggttgcagatttgcagcaaagaaagtgcagtgttatttttgacatatcatgtagtcttgcaaggattttggaattcttcaccagagagattcctcatgcattcctgatggggccagatatgaatctgcggaggttggctgaattagttgtctttattctgaaccacatcatattagcagccgatgcagagttctttgacatgactctaagacggccagggcaacatcaagaaaaaacaaattgcactatgatcttggctcctcttgttggcattatcctcaatcttatggaaagcagcagtacttcaggccatagggagttaaatgatgtgattacagtgttcacaagcatggattgccctgccacaatccattttgggttgcagtacctactgagctacaattggagcaatgttctccgaggtgacgcttcccttgcaaagctagctcagcttgaagaattctcccattactttatgcacatcactatgtcagcggatggcaatgaagagcaaggtttcagcactgccagtaatgaagaggacaactgctgcatatgctacaattccgattcggataccacattcgagccatgccatcacaggtcctgctacggctgcataaccaggcacctcctcaacagccaaaggtgcttcttctgcaatgcagtggtgacttcagttaccaggatagctgattcgcgcatcgaatctcggtcacctttggcaccgtaa

SEQ ID NO: 13299 - DNA, 1485 bp, Oryza sativa
  Clone ID: TFbOSC405796j.C1.o6.fg
atggagccaccggcgggaggctcctccgatcatcgccggggtgccgggaccggcgcgggcgccggtggggccgcctcgccgtcgggcctccgccgctacggcttcagattctccgcctccagcctcctgcaggccccgctcgctgcgctgctcgagtactccggcgtcgtcccctccggccccggcgccccgcaggcggggccgccctcggcgctgtcgtcctcgccgtcttcttcgtcgtcgtcgtcggaggccgatgggctgctctccgcggccgcggctggggacggggaggtctcgatccggatccagggcggccccggggaggccgacgcggcgggcgtcgcgggggcggcctcgtcgggggaggactcgatcgaggcgaccgccgccggggacgttgacccggcctcggctgccgcggggaggggtggcggcgccgacgcggaggcgagtggtgggggcgcggacggcgcgtccgggaacgggggtggggaccgcgcctaccagcggtatgacgtgcaccatgtcgcgaggtggatcgagcagatactgccattctcgctgctgctgctcgtcgtcttcatacggcagcatctccaaggtctaatactcattctcttgtgctcgtgccattgtgtgattataagcggtttctttgtcacaatttggattgctgctgtaatgttcaagtcaaatgatatattgcggaagcaaactgctttgaagggcgagagaaaaattgctgtgcttgtcgggattacagtaatcttcatgattcatgtgtttggtgtctattggtggtacaggaatgatgatcttctcagacctctgttcatgcttccgccaaaagaaataccgccattttggcatgcgatttttatcatcatgttggcatttctaaccaaatgccacttgcagatacaatggttcgccaggcagcaatggccattaagtgcatgctacttatgtactataagaatagcagaggtcgtaactaccggtcaaatgctaacccttgtggaataccttctgctcctatatcgtgccttgttgccaactcctgtttggtaccgtttctttctgaacaaggaatatgggagtcttttctcatctttaaccactggactgtacctgaccttcaagttaacttcagtagttgaaaaggttcagtcattcttggctgcagtgaaagcattgtcacgtaaagatgtgcattatgggtcttatgcgacagcagaacaggatacccccttgaactctcactctatcttgtttaaagaacttgttttttgctggaacctggtgcaggaaaagatgcatgttcctgtcctcctccgctgtaaacatattttctgtgaggactgtgtctctgaatggtttgagcgagaacggacttgccccctgtgtagagcattggtaaagcctgctgatattcggtcatttggtgatggttctacaagtcttttcttccagttgttttag

SEQ ID NO: 13300 - DNA, 390 bp, Oryza sativa
  Clone ID: TFbOSC402932j.C1.o2.gm
atggatcccacaaccaccacgacagattccgagtgcgacttcatcaagaagatccctagttggatgataaggaattcgccaatgcattgtatggaggccggccactttggcaaggatgccgccgccgccgccgccgccgccaccgcggacgccatggaacatgcactcccctgcagcgatcttcaccacctgagagtgggcaagacggcagagcagagctgctcggtgtgcctcaagaatttcgaggagggcgactacatctggtcgatgccctgctcccacactttccatcagctctgcatcttgggcgaccgctcctgcagggtctgtcacccggctgctcccccatccacggaggagaaaccggaggcccctcggactgttaattga

SEQ ID NO: 13301 - DNA, 377 bp, Oryza sativa
  Clone ID: TFbOSC400545j.C1.o59.gp
ggaggcgaattcttacatattcacttctgcaagcagctagctttacaaataatctcaagcacatctgagaatgagataatctaaacaatggctacgttacaagtagaatccaaaaatcttaataagtgtcaagcttgactatctgttgaaatctgcaaagcttctatactactccatctagctgttgagagagagagccttcaggctcgggcaatcttcgacgcacggcgtggatggcatgatgcacccagggcacgacatcacgccgctctcccatggcgcggcggcgaggccggtgaggtcgtcgcggcagatcgggcaggtggtccccttgaacagccacctggtgatgcacggcgggtggaacgcgtgcccgc

SEQ ID NO: 13302 - DNA, 361 bp, Oryza sativa
  Clone ID: TFbOSC900230j.C1.o3.gp
atactgacagtggaggcagtagtcattcagaaaagaactttgttggatcgtaagaggaccctttacatcttgatgtctacctctataatttacaggttgatgtgtggaaggcctcatcaaaggcgtgatccacgctgccaacgaagtgggaagagagttatagttgtgattcaatgtcgtttcctaccctgttgtcgctgtggcgacgcccaaagccaatggctggagcacttgtggagacaccatctatctcagccttgcaaagggggcacagcgcgtttatcttgagccatttgtccacacaatccttgtggaagaagtgcgcacaagggagctctcggagatcatcgttatcgacata

SEQ ID NO: 13303 - DNA, 1098 bp, Oryza sativa
  Clone ID: TFbOSC401380j.C1.o24.fg
atgagctctctatgcccgtttgccaaactcgcctctgctggcgccacatgccccgtaaaatcagacaacaaaaccacctcatgtcctgtcacagccaacaatcacaccgacgacgacgataatgaaaaaactggcaatgctaacaccgatcctcgtgtggtgccagcaaagtgcccctttggctatgactccaacaacaccttcaagcttggcccactcagctgcgtggtctgccacgctctgctacatcaaagcagcaaatgcaccccgtgctcgcacaagttctgcaaggcatgcatattgcgctttaaggactgtccattgtgtggtgctgacatccaagggatcgagcctgatgatgagcttcaaggccttgtcgaccgcttcattgatggccatgcccgaatcaagagatcacatgctgcaggcgatggtgaagccgcaagtgacaagaccaaggtcatttacgagcatgtctccatggagagaggagcttttctggtccagcaagcgatgagggcttttcgcgcacagaacattgaaagtgcaaagtcaaggctcagtatgtgtgcagaagacatcagggaagagttgaaatctaaagaagacaaccaagaactgtgttctcaacttggagctgtgttaggaatgcttggggactgctgtcggaccttgggagatgctccttcagcaatcacttactatgaagaaagtgctgaattcctctcgaaattgcccaaaaaggatctggagttggtccatactctctcagtttcactaaataaaattggagatctttgctattatgatggggacctccactcagcaagaagctattatgcgcgttcgttggacgttcgcagaagtgcagtaaaagaacactcagctgtggcttcccaggtcattgatgtagcaacttctcttgccaaagttgcggatgtcgatagaaatcttgggaacgaaagcatggcagttgagggttttgaggaagcaattaaatgccttgagaatttgaagctggaatctggagaggccagtcttgagcagcggcgtctctcggttctcgactttctacaaaaacaactggatgacaagtga

SEQ ID NO: 13304 - DNA, 2052 bp, Oryza sativa
  Clone ID: TFbOSC401045j.C1.o15.hg
atggggagcgatgttatccaggccaagctggtacttctgggtgacttgggagccgggaagacgagcatcgtggagtcgacgatcggggcagcgttcttctcgcaggtgctgatcatggacgaggccaccgtgaagcttgacatctgggacaccgccggccaagaacgctaccacagccttgcgcccatgtactaccgcggcgcggccgccgctgtcgtcgtctacgacatctccagcacggattcttacattcgagcaaggaagtgggtcgacgaactccagagacaagggaatccacatttggtgatggcattagtgggcaacaaggtcgacctggaagaaaagaggcaggttggaacgcaggaggcgatggaatacgcagagcgaaacggcctcttcttcatagagacctcggccaagacgtcgcagaacgtcaccgagctcttctacgaactaggcaagcactaccgaaacaactctgctggtcaaagtgcgacctcaccgcccttccgggatggttctccacgacggccggcgccgccgcgacgacggcggcggctggccatggcggctctgttgctccggctgatgcgcctctaccgactcccgaaatacgccatccttaatcgaaaacgtcttttactgaacccgccttggactttaaatgtccctgcaagtcggtgcggcccaccaggccgccactccgagtccgacacgacccatcatatcgcgttcgcgagcccaagttcgagtcggacccggacaccgacagaccgacctagtccgagccctacaaatctcgcgccgccgccgctgctctgctttcttcttccaacctatttccctttcccgccgctgctctcaccgcgaaccctacgcgccgccgccgccgccgccgcggctgcgcacgtcgagcagcccgcgatggagaacgcctgcgaggccggcctgccgctgtcggtggccgtgtcggtgccgccggtgatggttgacggggagacggttccgaaggaggtggaggagtgcgaggacgaggaggaggaggaggagtacgccggggatgcgccgccgccgtggaaggtgatgggttcggatgatgagggcgagacggaggccggcgaggaggaggagattgccgaggccgacggcgaggaagaggcggcggacgtggaggaggtcgagtacgagttctacgacagcgacggcagcgaggacgagggcgacggcgaggaggttgacccggcggtggcgagcgccgcgcagttcgtgccggaagggcagtttcttgggtcggcgcagttcgccgcctacggctgcgccgccggcttcatgcgggtcgccgccgtcgaggcggacccggccgacggccaagagatcctcgtgctctaccgctacaccctcctcaagagggcatggagcgatccggcgggcgtggagctgtccatgtgggcgaaggtgtcgaagatacaccgcctccggttcatcgtcccggcctccggcgacccggcgagctcgctgccattcgccgggctatctctgtccccgctgatctaccacaacgactacgtcgaggagctcgagacgctgtggtccaagctggcggcgcaggtgcgcgtcccgccggtagccacgcgcgtccaggtgatcgtcgacgtgggcatcctcagggcgggggacaacacgccggagcgcagggagtacatgcgcgccgagctggaggccaagaaggagatgccatggccggggaagctcctcggcatggagctgcacgtgccggagccggtggtggcggcggcggcgtcgtgcaagagggacagcagcgaggaggtgttcgacgacgcgccagcgccgccggcgaagcggaggaaggtgttcgacgccggggaggagtgccccgtctgcctggacgagctcgaggacggcgtcgtggcgtggcctgggtgctctgtcgcccatgtcttccatggccaatgcttggagacaactctcaaggggagccagatgtgccctatctgcaggcgtgatcttggcctgaaaaccttgcaggagtag

SEQ ID NO: 13305 - DNA, 375 bp, Oryza sativa
  Clone ID: TFbOSC402929j.C1.o3.gm
atggatccgacggccgggacaggttcctccaccaagaagatccctagttggatggtaacggagctgccaatgctatcgacggaggccaaccgcttgccacagatccctagttggatgataaggaagccgctaatgctatgtatggaggccggccgctctggcaaggccgccgccgccgccaccgcggacgccatggagcagagctgctcggtgtgcctcaagaatttcgagaaggacgactgcatctggtcgatgccctgctcccacactttccatcagctctgcatcttgggcgaccgctcctgcagggtctgtcacccagctgctccgccgtccaccgacgagaaaccggaagcccctcggactatgcattga

SEQ ID NO: 13306 - DNA, 1020 bp, Oryza sativa
  Clone ID: TFbOSC900356j.C1.o18.fg
atggcggattcaaggggagcggcggcgccgccggcgacaagcccggcgccgacgcgagccccgccacgaatccggccccgccagctgccgccgtggccgtcgccgctgcggccgcggacgccggaggggacgacgacgtggccgcggccccgggaggcgcggcggcccgttcacggcgctcagccaggtcgacgccgacctcgccctggcccgcgtgctccaggagcaggtatatgtgggggagatctcgcggagcgggcgtacatgatgcttcgcatgggcggaggcgtcggcgagggcagcgattacgggagctcggatgccgggagctacgagtacgacgacgaggccgaggaggactacgaggaggagctggagcaccacctccgcgtccaccaccacgagcacgccgttggggagggtcgtggcgagggagagcgagatggggagggggctgagggaagcgagttcgaggaggaggggttcgacgaggagtatgatgaggaggaagtcgagccagagctagaccccgcggagtacgaggacgatgaggcttatgcacgagctctgcaggatgccgaggagcgcgaagtagccgcgcgacttatggctctcgcggggatcagcgattggagacctgtggagcctgtagaggagcatgcgaatgatccacaggaattagttgcattgggagaagcggttggtacaggacacagaggcctctctgctgctacacttgcttctctaccttcagtaacttacaaggcagaaggtgtccaagatggcaacacagagcaatgtgttatttgtcgtgtggaatttgaggatggtgaatctttgattgcactcccctgcaagcattcataccatcctgagtgcataaaccaatggcttcaaataaataagagggctttatttgactgccaggctgcatatgttgctaagttttgtgtcaaagtgtggcaacccaagattgtctccaaatttattcgccacattagtgggaagtcttttttatag

SEQ ID NO: 13307 - DNA, 1107 bp, Oryza sativa
  Clone ID: TFbOSC100622j.C1.o1.fg
atggcggcggcggcggaggcggaggaggaggtgcggcaggaggtggaggcggtggcgtcggtgtacggcgacgactgccgcgtggtgcgcggcttccctccccacctcgtcgtccacgtccgcccccgcaccgccgacgactcctcgcagcagttcgtggagctatttcttggaattaaagcatcttctcagtatccaaaagcacctcctcatgtttatgccgtggaaagtaagggccttgatgagaatcgacaggtgtatcttattagcagcatccagaacaaggcaagagaactttcctgctacccgatgcttgtgacgctgtgtgaggaagctgtggagatgctctcaaatatgaatcatccagctggggattgcccactttgtctatatcctttagtcaaagagaatgatggttctgctttgccatttatgaagttgatgtcgtgctaccactgcttccacagtgactgcattatgagatggtgggaatggctacagaatgatgatactgactcgaagaagagtagtacagcagcaactactgaaggattggatttgtccagctcagctaagcatcacaatgtaagtcagcacaaaggactatgtccagtttgccgcaaagtgtttgatgagaaggatattgagcatgttcgtgatctgctaggtgcaaatacttctcaactggcatctttatcgattgatctggacgaagatgaaaaagaagtacttcattctgagtcagagaagatccgtcaagaaaagttcgcatcgctgttcaatctacaacaagaacgaaatggcctgattgaaccaaagaaagacctttccatacagcctggaatgtacatccctcgtcctcccagcgcgcctactgcttccgaaggagacaccgttgatgattcttgtgaagacaccacaacttcaacctcaggaacggagccactcaaccagacaaacagcactggtggtaccaccaagcacaacagcagttcaggtcatcgaaggagacatcgatctcatgcttcaagaagacaaccacatgggcaagggcaacctgctaggcaacaatggcagaggaaaggcggagacacttcacaccaatag

SEQ ID NO: 13308 - DNA, 360 bp, Oryza sativa
  Clone ID: TFbOSC401783j.C1.o18.gm
atggcccccacatgcgtcgggtgcggcctctgttgcgccaccgccactgctcgccagcatgacaatgggacgaagtggtggcggcggaggcgcgccgtcgccgggcgcaagcttcaacaccaacttgcggcgcaagaggagcggagggcggtgtggggtgtggtgtgcggcggtggcatcaagaagcgcgcgctgaggagcatcccggtggaggtgcgcgtgctgccgcgctgcaatcatgggttccacgtccggtgcgtcgacgcctggctggtctcgcacggctcctgcccgacgtgccgcagcgcaacaggagtcgtcggcggcaacggggccgaggtcgcgcctgaagagagatga

SEQ ID NO: 13309 - DNA, 846 bp, Oryza sativa
  unsure (1)..(846): unsure at all n locations
  Clone ID: TFbOSC411039j.C1.o2.fg
gtatccanaaagcacctccctcatgtttatagccgtgcgaaagtaagggccttgatgagaatcgaccaggaagctgtggagatgctctcaaatatgaatcatccagctggggattgcccactttgtctatatcctttagtcaaagagaatgatggttctgctttgccatttatgaagttgatgtcgtgctaccactgcttccacagtgactgcattatgagatggtgggaatggctacagaatgatgatactgactcgaagaagagtagtacagcagcaactactgaaggattggatttgtccagctcagctaagcatcacaatgtaagtcagcacaaaggactatgtccagtttgccgcaaagtgtttgatgagaaggatattgagcatgttcgtgatctgctaggtgcaaatacttctcaactggcatctttatcgattgatctggacgaagatgaaaaagaagtacttcattctgagtcagagaagatccgtcaagaaaagttcgcatcgctgttcaatctacaacaagaacgaaatggcctgattgaaccaaagaaagacctttccatacagcctggaatgtacatccctcgtcctcccagcgcgcctactgcttccgaaggagacaccgttgatgattcttgtgaagacaccacaacttcaacctcaggaacggagccactcaaccagacaaacagcactggtggtaccaccaagcacaacagcagttcaggtcatcgaaggagacatcgatctcatgcttcaagaagacaaccacatgggcaagggcaacctgctaggcaacaatggcagaggaaaggcggagacacttcacaccaatag

SEQ ID NO: 13310 - DNA, 1929 bp, Oryza sativa
  Clone ID: TFbOSC419789j.C1.o16.fg
atggcgtcctacgttccttgttccagttcctcaacccatcgatccaggaacttttgtgacttagttttggtctatgctataattggttccatgcattcttcaatgacactattttcagtctgcaagatactgtctttatatgtagacatgtgttttgttgactattcgaaggaagttcattcttatctaaagtactgcaaagatgtggtttttactggaatgacattttcactagaagaggagcatttaatagatatcttttgggatatgtacaaagggaaagaggatgagaatgcaaaattgtgtcaggaaaagttgagaactacaaatggagtgaataaacgctgccgagatggaagttcaaattattctctgcagaacaaaggcatcctgattttccatatcattccggactatcatcccgaaaatccatggaacgtgcttcacccttcgaacaaacgttttgaagagagaaaaagctgcactgatgcaggtatgctacccggtccccttctcccacttccgccgccgccaccaccggagctcgtagtgtatccctctgtgccgagcctgccaccttcagccacgccgccgtcatcgtcgtcgtccataggctccagcattgccattgtcgtcctcgtcgtcattaccacggccatcgtgactgtcgccattgttgtcattcgacgcagctaccgccgtgggcgccgcctgtcctgctcatcgttctccccacgccgcagcttatccccaagggctttgtcatcttcgccatcagcaatgtctcagatgtggcgcgcggcagttgcagctgtcggttcttcaccgagggccagtgctgccagtgccaggtcctggccggaaatggccgcgccctcttcagctccaggcgatcccggcagaggccctccagtggcattgtcgagctctgcacaaggggcagtgcaggggacggctggattgatggcgtcctcggctacctcagctgctgcgatggcgccgccgccgtctgcgccgtctctgccggaggtggagcgggtgatattggagctgctctcgctgccaccttcgccgttgcagccggcgatgagcggcagcacggcgacctgcttcatctgcaacaaactgcttctcccaactgatctgcacctcgtccttccggtgtgctcccacatgttccaccagcgctgcctcgtcgcctggctccgcagccgcgtcacgccgctgctatgctgccccgagtgccatgctcccatcaccacccgctgccgcaccgacaagagaagcctcgttccaaccttctgctcaggggagtacgacatcgagtcgcagattctggcggtgcccgcgccgccagccgagaaggtggcggaggcagtggggggatctcgtgggtggctgcgctcctcgctggacaggctctccggcagctggagggcgtgctccggcagccgcgccgtcgcagcggtggcggcgccggggtgctcctcgtcgcgccgcaccaccggaagctggagccctggcactggcagcacgagcggccgccacctccacctcggcgctgactcgcgtggcgttcagacggaggtgcagctgcagctgcagctgccggtgctgcctctcgctgatgaagaggtggctgcagccgacgatgatgctgggggatctcgcggctggctccgctcttctctggccacactctctgggagctgggccgtgttccccaccaccagccgctccaccgcaatggagctaccagtgtcctcctcgcggcgcacggcagctgggagcaccgactcgtggtcggggagctgggatcctgaggcgttgagggtgtcggagccgcaaccacgagagagaccatcggtgctcgactacgccagatgggtgttcagaaactcaggcaagtatacaaaacatcggcactga

SEQ ID NO: 13311 - DNA, 381 bp, Oryza sativa
  Clone ID: TFbOSC35114j.C1.o1.np
atgaacgagctggtcgaaccgtcatcgaccatctgcggtcacattttttgcaagcagtgtatcaaggcctcaatccaggctcagaagaagtgccctacctgccggaggaagctgaccatgaacaacttccaccgcgtgtatctcccttctgcggacccgaagcaaggggcgtctaccacacgcgcagcagcagcaacaacgcagtgcatcatccacccaacggcgccgttcaacacacacgtctccattccgttgacgccgaccacgataactagagggcaggcaggcgagcaggaagccaggaagaagaagaagacgtggtggtgccgtggtgggcacacggacgttgacgcagtgccatcggttgcactgagtactaac

SEQ ID NO: 13312 - DNA, 1593 bp, Oryza sativa
  Clone ID: TFbOSC400964j.C1.o128.np
atgaacgagctggtcgaaccgtcatcgaccatctgcggtcacattttttgcaagcagtgtatcaaggcctcaatccaggctcagaagaagtgccctacctgccggaggaagctgaccatgaacaacttccaccgcgtgtatctcccttctgcggacccgaagcaaggggcgtctaccacacgcgcagcagcagcaacaacgcagtgcatcatccacccaacggcgccgttcaacacacacgtctccattccgttgacgccgaccacgataactagagggcaggcaggcgagcaggaagccaggaagaagaagaagacgtggtggtgccgtggtgggcacacggacgttgacgcacagggtccagctgcaccgaatgactcgccgcgcaagcggttctccggcgtcgcgccgccggcggcgctcatcttcttcgtgctggtgttcgccggcggtgcaatcgtcacgcttgatcacaaggagttacggccgagagaaatggtcgtaagcgagacggagacgagggctccgacgagcgaggtgcaagagacggagacgagggctccgaccagcgaggtgcaagaggcaggcaccggcgccgccgccggcggcgtccagcgagcggaactcgccggcagcagcatctgcgagaatcagtgcaggccttcaggcagcgagccattgccgaagggcatcgtgcaggacaagtccaacttcgagatggagccgctcggcggcaaccccgaacggcgcgccgccgtcgcccggccggcgaagagcctcctcgccatccccgtcggcataaagcagaaggccgtcgtcgacaagctcgtctccaagttccccggtgacaggttcacggtgatgttgttccactacgacggcgagatggacgggtggagggaactcgggtggtcggaccgggcgattcacgtggcggcgaaggaccagacgaaatggtggttcgggaagaggttcttacacccggacatggtggccgagtatgagtacatcttcctctgggacgaggacatcgaggtggacggcttcgaccccatccgctacctccgcgtcgtccgccgcgaacgcctcgagatctcccagcccgcgctcgaccaccgctcccagatccaccaccgcctcacactccgcgcccgcaaaggccaagttcacaggagattctacaagacgaggggaggggggagatgcgacgacaacagcacggggccgccatgcacggggtgggtggagatgatggtgccggtgttctcgcgggcggcatggcggtgcgcgtggcacatgatccagaacgacctcatctacgcgtggggcctcgacttcaagctcgggtactgcgccggcggcgaccggaggctcgccgtcggcatcgtcgacagcgagtacgtcctccaccgcggcatccccacgctcggcgacggcggcggcaagccggcggcgaagcggtcgtcgacggcgacgaaggcggcgaccgaccggctcgccgtgaggcagcggtcgtacaccgagctgcagatattcaaccggcggtggaaggccgcggcggagggggacgtgtgctggaccgacccctacccg

SEQ ID NO: 13313 - DNA, 1293 bp, Oryza sativa
  Clone ID: TFbOSC401327j.C1.o18.fg
atgggagctaattgctgtatagctgcaaaagagaggcctcagccatgtgttactccaattgaagtgtcagcattcaggaacgtaagacactctccatcatggagcttccggtgggataaccgcacacacatagaagacataatggaaatgcccgcattgttttccaaccatagtagtggaagcattcggcctgaaacaaagagtggctcaattgcgccaactgatggcttttctaacggaggcagcccttctgatatgttcaacaagctcaagtgccataaatctgacaggaagagggagtcatctaagattgcgagatctgaccttcgaggtagatccaccacaagcaattcttcccctgaggcaaagctttccagaaaatcgctagacacagtaagtgtggcttcagattcgaagatgtcaatctctgttccttcaacgccgcctgctatatccagagcagatccttcatcatcctccagggggcattctctaccaacagatgcagattcaatgaggaaagcacgtcgatcaccagggtatcaactgtatagacaggtctccgacagcaagattccatctctcaggtctctcaacgagggcgcctctcctgaaggaaggccatcctcctccatgctctcagtctgcagcaacgatttatctgcagtaggatcacatggcgagtcatctgatggttggtcaatgcgaacattttctgaaatggtcgcatcatctcagagagagagatggtcagttgatagtgagctcttaggttctgtttcgagtaaaatgacaagatcaaatgcttctaataatcctactacacattcacctgaccaagaggtgtgcaagctatgtttaaagctattaaaggaacggtccacatggaatgctcaggaactggctgttgttgctgttttattgtgcggccatgtttaccatgctgactgtttggatagcttaactgcagaagctgacaaatatgatcccccttgtcctgtatgcacccatggtgagaaatgtacagtgaagctatttgggaagttggaatcaaagacaaagaacaagatacctaaaaatgtgatagttgatgttaatctagatgggagctctaagcatcagaaggaaagtaggagagagcccagattaggcacaagttctagcttgaagggctcgtttagtcgcccgtttttgagaaggcatttctctattggctctcggccatcccagtcaatttcagagagcgagtctgccagaaagaagggcttctgggcaaggcactggagggaatag

SEQ ID NO: 13314 - DNA, 2988 bp, Oryza sativa
  Clone ID: TFbOSC900236j.C1.o5.fg
atggcggacacggggagcctggagaagatggggcgagagctcaaaaatcttgttcttggcagcctgagccttctcagttcggcggtatccatctcctgcaaccacgtcttctgcaatgattgcctcacggaatcgatgaaatccacgtcgagctgccccgtgtgcaaggtcccgttccgacgacgagaaatgcgaccagcacctcacatggacaatctggtcagcattttcaaaagcatggaggctgcagcaggtaccaatgttgtctcaacacaggaggctcctgtggtaaaacttgcagatggatcagattgtgtcaacagcgggaaaaattccaaaaggtcacaaaaatcattgacacgaaaaaggaaggtaacatccgagatggaaaaaaatacagcaaaggatgctacagcttctgcatcccaacctactacaaagccttccttctctactaacaaaagaatacaagtgaaaccattccctgaatctgagacaccaataagagctgagaagattatgaagcctgaagagccaaaaaataatctgaataatgatgttgaaggaaagaataaagcagtggcatcgggtcaacctggaagtccttcattgtcaccctttttttggctaagggaacaagaagaacaagaaggctgtaccgctgagacgttaagtgaaacgcaatctttagacacacccttgcgtcataatgcaccctcttttagcgatattaaagattctgatgacgaaatccctttaaatacaactccaaatagcaaagctgcggctacagaactctttgacagtgaaatatttgaatggacccagagaccatgctctcctgaattgtattccactccattgaaaaagcagagtaaagctaagagtaaactagatcaaattgaagagaagggtgatgaagaagatgtgcatattggtggttcatttgataagctgggtaatgcaagtaatgcagctcagcttgtcaatacaaaagcaacaaagcagaagagaaagaaaacaagtcccagtaacaaaaacagtgcaaaattgtccaatcgtgctgagccctgcataaaaaagtctgatgccaatcaacaaggttcaaatagacgtaaaagtgctgccctaaaatcttgtcagaaaagcagcagtgctgtagggaggaatacttcaggtagaagaaacaaggcctctagcaacagcaagccaattcatggctctagtgataactccccagagtcatatcttcctaaggagggtttggatgttgaagcacctgacaaacccctttctgaaaggatccaaaacttggagaaaactagtcgacgaaagggaagtgcaaggaagctggaaatggcagggaaaactatttcagatactacagagaagaatagtgagccaagaagtaagagagtcagaagaatgtctgaccacgctatagctaaaccggttgaagttccttcaggatctggaaatgaaacagaaataccacagcttcacaccctcacaaaaggcagcattcaacgcaaatcctccaacgctagaagacatagcaaagtttgtggagaacaggaaggtaagaataaacttgagaacacgacaatgacacctattattttacatgggaaatgccaaaataaagaggcagtatgtacagctccttcagtaaggactgcatctgttaagtacaagcaagcaaaatttagcgaacaaccagattgttttggaacggagaactttggaaaccttcaagcatgccctgcacgtaatgttttactgaagaagtgtgaggtatctactttgaaggtttcctgtgctttctgccagaccgatgtcatcacagaggagtctggagagatggttcattatcaaaatgggaaacaagtccctgcagagttcaatggaggagccaatgtggtgcactctcacaagaactgccttgagtgggctcctgatgtctacttcgaagatgattctgcctttaatcttacaactgaattggcgagaagcagacggatcaaatgtgcttgctgtggaattaaaggagctgcacttggatgctttgagatgagttgtcggagaagtttccacttcacctgtgctaaactaatcccagaatgcagatgggataatgaaaattttgtgatgttatgccctctacatcggtctacaaagttacccaatgaaaattctgaacagcaaaagcaacctaaaaggaaaacaacactcaaaggaataaccggcttttccaggtcatctcaaataggatccaatcaagattgtggtaataactggaaatggccatctggatcaccacagaagtgggttctctgctgctcatcactttctagttctgagaaggaacttgtatcagaatttgcaaagttagctggcgtgcctatttcggcaacttggagtccaaatgttacccatgttattgcatcaactgatctctctggtgcttgcaaacggacgctgaagtttctcatggcaatcttgaatggcagatggattgtctccatagattgggttaaaacttgcatggagtgcatggaaccaattgatgagcacaaatttgaagtcgctactgatgttcatgggatcactgatggtcctaggttaggaagatgcagggttattgacaggcaacctaagctgttcgacagcatgaggttctacctccatggggactacacaaaatcctacagaggctacctgcaagatctcgtggttgcagcaggtggaatagttcttcagaggaagcccgtatcaagagaccagcaaaagcttcttgatgacagctctgacctcctcatcgtttacagcttcgagaatcaagatagggcaaaatccaaggccgaaaccaaggctgctgatcgcaggcaggctgatgctcaggctcttgcttgcgcttctggaggcagagttgtgagcagtgcatgggtgattgactcaattgcagcctgcaatctgcaacctctttga

SEQ ID NO: 13315 - DNA, 476 bp, Oryza sativa
  Clone ID: TFbOSC401518j.C1.o5.gp
aacccgcgctctctctctctctctctctctctccccctccctgccgctgctgccgccaccgccgcggcggcgccccgattcggtgatcccccgctcgcccatctccgccgtgacgtatcggcgacgcggagggagccccccaccccccacctccggatctagggtttcgaggcccaggtggcgttgcgctgcgcccccgctcctccgcctctcctccgccgccgagggttcgcgtgaggtttctgcgtattaccagctctgtacttaatttactagtgagaagcaaaatgaagtgcaatgcttgctggcgggagttggaagggcaagctgtatcaacaacctgcggtcatcttttatgtacagaggatgctaagaaaatactgagcaatgatgctgcatgcccgatttgtgatcaagtgctttcaaaaagccatatgagacctgttgatacaaatccaaatgatgattggacaaat

SEQ ID NO: 13316 - DNA, 783 bp, Oryza sativa
  Clone ID: TFbOSC416339j.C1.o6.gm
atggccgcgagcgtgttctccgtggggagaaaaagcccagcccgagagcgccacggcccaggcaatgtcgccgagacctcagggtgggctgaatggaaaattgtcacaggaatcaagcaaaagatgtcaaacagagccacgcactggtgctacgtgtgccggcggccggttcgcatccgcggcggcagccaagacgtcacctgcccaagctgcgacgacggcttcgtccaggagatgagcgagatgggacggaggacggcgagcagcacgctcggtttcgtcgggccagacgccggcgacgagttcctgctccggcgatccccggtgatggaggcgatgtccaccctcatgcggcacgcggcaacggtgggcggcgacgagcgcgaggtcgacgtccacgacgagcatggcggcggcgatggcgtgcctgcgcacgcgagactcggcgtcctcttcaggggagggccccgtgtcggcgtcgagcgccgcggcggatactaccgtgccggtctggaggcgctcttcgagcagctgcagaaccagctggggagcagcaggcagggccctccaccggcgccgccgtcggcgatcgacgcgatgcccgtggtgacgatcagccgccggcacctccgcgccgagccgcggtgcccggtttgccaggacgagttccagctcggcgccgaggcgcgggagatgccgtgcgcccacctgtaccacgccgactgcatcgtgccgtggctggcgaggctcgcgctcgttcctctggccgtttgggccgactag

SEQ ID NO: 13317 - DNA, 2115 bp, Oryza sativa
  Clone ID: TFbOSC401282j.C1.o8.fg
atggcatcggcgggaggccgctgcgacggctgccacggcgacttcggcctctgggagcctcccttgacggcggagtgctcgcacaggttccacctccactgcgtcgtctccggcgccgacgtctgcccggcgtgcaacgcgcgatggaccaacgcgccatcgaacccgccgccgcaacccgccggaggcagcacgacgccgtttggacagacgacgggctttcccatgcgcgtccggccatggtcgtcgtgcgacaaatgccgcggcgtcatagaccacagccagcccaccgtcacgtccgagtgcagccacacgttccacctccgctgcttctccgggagcgtcatctgcccggcgtgcaacgcgcggtggcgcgacacggtggccgtgccaaacccttcgccggcgccgccgtccaccttctttcccgccggcgttcccgcgccgccgccgaccttttcgcccttctgggtgagccaagagtatgacgacgacgagccggtggagccgccggtagcggcacacggtggcggcgtggcaccggcgagcaatggggcgctcgtcgtcaggacgcactgcgagcacacggccgtggcgaggagcgtgatcagggacaatttcgtcgtccttgtccatgccaaagctcctagcatcgccgtggcggaggcgacggcggcggcgcgcgcgccggtcgacctcgtcacggtgctcgacgtgagcggcagcatggaaggctacaagctcacgctcctgaagcgcgccatggggttcgtcattgataagctcggccccggcgaccgcctcgccgtcgtgtccttctcctacaatgcgcagcgagtgatccggctgacgcggatgtcggacgacggcaaggcgtcggccaagagcgccatggaatccctcgctgcgggcggcggcacgaacatcctcaagggccttgtcgaagccgccaaggtgttcgacggtcgccgctaccggaacgccgtcgccagcgtcatccttctctccgacggtcaagacacgtacaatgtcaacggcgggtggggcgcctcgaactcaaagaactacagtgttctcgtgccgccttccttcaagcgctccggcgaccggcgcctgtcggtccacacgttcggcttcggcaccgaccacgacgcggtggcgatgaacgccatcgcggaggagaccgggggcacgttctccttcatcgagaaccaggccgtcgtccaggacgcgttcgcgcagtgcatcggcgggctcctctcggtcaccgtgcaggaggcgcgcatcgccatcacctgcccgcaccccggcgtccgcgtccggtcggtcaagtccggtcgctacgaaagcctcgtcaatggggacggccgggccgcgtcggtggacgtcggcgagctctacgccgacgaggagaggcgtttcttggtgttcgtggacgtgccagcagccggcgccggggaagacgtcacagaactgatcaaggtgagctgcacataccgcgacaccgcgagtcggcagcagatggtcgtcgccggcgagcacgccgtagtgcaaagaccagtggaggtggccaccaacacggagccgtccattgaggtggagcgcgagcgtttccgcgtggaggcaaccgaagacatcgcggcggcgcaagaagcagccgagcgcggcgcgcacgcggcggcgaaggcgatactcgaccgccggcaggaggcgctcgcccggtcggcgccgggtctcgccggcgacgccaggtgcgcggcgctgctgtcggagctgcgcgagctgagcgcccgcgtggcgagcaggcgggagtacgagcagaccgggcgcgcgtgcatgctcgccggcatgagctcgcacgcacagcagcgcgccacgtcggtgcagctgtttggagcggcggcgccgacgtggtcaatgccgatgtgtggatcggcggcgccgccatctctctctttcggggggtttggagggttcgcgacgccggcgatgcggagcatggtggagtcgtcgcgaaagagaagaaagggcggcgacggaagcttaagctttttggatctggtccgaactgaggaagaagccggcagctcagatgacgagaaggagaacctgtaa

SEQ ID NO: 13318 - DNA, 182 bp, Oryza sativa
  Clone ID: TFbOSC400621j.C1.o35.gp
atcctatgtcggatatgctttgagagagacatttgcatagttctgcttccatgccgccattatgttctttgcgaagcgtgctctgataagtgccggtcatgcccaatttgtcgagtgagtattgagaacaagctacctgtttgtgatgctatgagttcagctgattcaataagtgatacagt

SEQ ID NO: 13319 - DNA, 2874 bp, Oryza sativa
  Clone ID: TFbOSC400302j.C1.o1.fg
atggagcacccagttagtaataccatggagccggatctccgggccaaggaccaccgcgcgtgctccgcctccgccaccgacacgtcgtccaggatcatcgcgcagtgggcggcgcgccgccgccagctggcgtgcgacgaccaggtgatcgaccgccgcgaccgcgactccgagctgctcgctctcgcgcgcctccacgccgtctccatgctcgacgcctccttcctccgcgcacacgacgatgccggcggcggcggcggcaggcgtgcgcgttcgccggagcgcgcgctggtgcggaggatcgcgcgggagtggacggcgtcgtcgcggacgtccccgcgcgggggcggcgccggcggcgaggagctgcttggcgagacggagcggcagcgggtgcgcgccgtgcgggagcgcgtgcgcatggcaagccaggggcaggggcacggtggcgcgcacacgcccaggctgatgcgtgggcgtgggcggcatgggcaggacgtggtgacgcgcatggccatggaacgccagcgcgagctgcagggcctctccgaccaccgcgccgtctccgccttcgctcaccgcgcccgcattcagtcttttctacgaggtagatccttccatagtggaagccctatgcatgatgagagaccactctctatggcagccagagaattaggacagcttagacagagtcatccagtctctagattcagggaagaagttcgctcaagaacagaagttaccacaaatggcccagcaacaaaccacactggacccatggatactattgtagatctgcacttacatgaaaatgatcatcgccaagagaatgctactcacaatgaaatccagacacatcaatcaatggaaaatgaatctgtagatatccaaagaagtataacaaccagtaatgatgatgttgtccaaagtgactttggtcaagaacagcttcacagatatgaagattatccagattcagggtcctcagaagaggccagtgaacaatctgattcttccagtccatctgacaatagcaatcaacaagaagaagaaacttacgagcagcaaactaatctgctatggtcaagagagacatctagtagtgaagatggagatcatgaatggaatgttatgaattctcaagaagctgaagcacaatggaggtcaggtccaagtttttcttccaaccgaaatattaacaggttcagtccaccggacgatgatgtatatggagtggagctcagagaactcctaagcaggcgtagcgtctctaatcttcttcgtagtggcttccgagaaagtttggaccagctgatacaatcgtacgttcgaagacaagaagagcatgatgatcctcttgattgggattatcaaaggcagggaacagctactgggttacacagcgacgatcaaggtgaagacaggatcgatgaagcaacaaatcagactgtttctgacaccagggatcaccagccgtcgattcttccacagcaacggcattggcagatggaactgcctcatcatcatcataactggagtcaacaagccatgcgtcattctgaacttgactgggatgccatccatgttctgcgagatgacctgaccggactacagcgagggatgaccagcatgcagcagatgctagaagcttgcatggagatgcagatggagttgcagcgctccatcaaacaagaagtctctgctgctctgaaccgctcactagccgttcctgcaggcgaagaagggatgttagaggatggatcagagtggaagctagcgaggaaaggaacatgctgcatctgctgtgacaggcaaattgactcgcttctttacagatgtgggcatatgtgcacctgctcaaagtgcgcgagcgagctgctccacggggtgggcaaatgcccactgtgccgtgcgcctatcgtcgagggtttacttacctgggcatctccgagccggtttcgactccttgatgctcctggtctcttggcagctgtggaagaaatggaactccagggttctctcttctgtctatgtggtcttggagtctattctttcggatgtaacagcgtgcaacgctactcggcaactaaaactgacaagaacaagagcagcgatctgatcattcagcctcaaattaacgacgttacagaggagagcaaccagaggcctaccgatagcagtgagatcaaccctactgttggtgtttttggggaacattatttgttctggactcaacacatttgtcagcttagcagccaccgtgatggcaccatatacaacaaccagctttattggaaaaataattatgatatcgatgtcactaaccgtgaagagacacgggatcatgtcgactcaatgcttaattatgttttcaatcgcagcagagatgatcccatcgccgtgaaccagggttctcttatcgaaatgactggccctaagagaggcattgcactgatccccgaatgtctgtttgagtttgacatgagaatcaaaactggggagaaagaagaagatgatctacagctgatcgacggaatgatagagttggacgaaatgagaatgcccgagacgccgtacacaactcgcatcaatggcgattctggctccgtcgacctgtgtttagcgaatgtttctaacggagtagaggcaacggtggaagttgtcatatcggaactgatggtgaatggttttgatctatcgatcagctgtgttgtttcaagttcaaggtacgaatacgatgaaagtaaagagtttcagatattcggtggcagtattggtgaggcgtgtggcctaagaaggtttgtgttggctgtctacttggacactgatgcagctgaagttgaagttttggttgcctgcagtctgtacccctaa

SEQ ID NO: 13320 - DNA, 1932 bp, Oryza sativa
  Clone ID: TFbOSC400054j.C1.o20.fg
atgccgcaccaaaccaaagccacagtccagcagcagcgaccaccagcagcagcttccgtcgtccgcgccggcgcccaagaagaggatgcctctgctgcaggctctctccgtgccatcctcgcccagatccccctccagattcgccctcctcaaggcctccatcctgcccaacaagtgacaatgcgagtgagaagcagaatggaacccatgaaattaacggtgaagagccggtgcggcgtgtgctcccacggcgtgaagaccggcgcggcggcggtgttcacggcggagtgctcccactccttccacttcccctgcatcgccgcccacgcccacgccctcgccgccgccaccgctctctcctgccccgtctgcgccgcgccatggcgccaggcccccttcatcaacaagcgcaccaccaccaccgacgaccacaagcgcaagtcctacgacgacgacgagcccctcctcgcgcccaaggccgccgccggcgccttcaaccctatccccgaggacgacgaggacgacgccaccgagttcaggggcttcttcccggcgcgccccaggagcgggctggccgtcaccctcgccccggacgccgccctcgtgtccgctgggcggaggcacggcaagtacgtggtggccgtgagggtgaaggcgcccgccctgcgctcctcgccctccacgcgcgcccccatcgacctcgtcaccgtcctcgacgtcagccagggcatgatgggcgacaagcttcacatgctcaagagaggcatgcgcctcgtcatcgcctctctcggccccgccgaccgcctcgccatcgtcgccttctccggcgccgccaagcgcctcctcccgctgcgccggatgacgcgccagggccagcgctccgcccgccagatcgtcgatcgccttgtcgtctgcgccgccgcccagggccaggaacagccgcaggccgtctgcgttggcgacgcgctgcgcaaggccaccaaggtgctcgaggaccgccgcgaccgcaaccccgtcgccaccgtcatgctcctctccgacacgcagcagcagcagcagcagcagcaggatgcgatccggcgcccgccagccgcccctccggccacgcgattcacgcacgtcgagatccccatcgggccaggggaggagccggcccggtcggcgctggtggcggaggaggacgacgaccagttctcggagcacgccttcgcgaaatgcctgggcggcctcgtcagcgtggtgatgcaggaggtgcagctggagctggcgttcccgacgggcgagatcacggcggtgtactcgtgcggccacgggcagcaggcggtggcccttgggggcggtggcggcggcgcggcggtgagtgtctccctgggcgagatgtacgcggaggaagagcgggagctgctggtggagctgcgcgcgccgctgagccagagccacccacactcgctgtccgtgcggtgcagctaccgtgagccggcgtcgcaggagacggtgcgcggcgcggagcagcagctggtggtgccggccctccacggcgggagctcgtcgcggcggctgcacgacctgttcgtggcgacacgggcggtggccgagtcgcggcggctggcggagctgaacgactacgcgacggccatccacctgctgtcgtcggcgcgggcggtggtggtgcagtcggcggagcaggggctggttggcagcctggacacggagctgagcgacatgcggtggcggcgcgggcagtcggcaggcaggcggcgtggcggcgagtcggaggagactccggtggggacgccgcgggcgcgggggggagagccgctgacgccgacgtcggcgtggcgcgcggcggagcagctggccaaggtggccatcatgcgcaagtccatgaaccgtgtcagcgatctccacggtttcgagaacgccagattctga

SEQ ID NO: 13321 - DNA, 774 bp, Oryza sativa
  Clone ID: TFbOSC8178j.C1.o6.fg
atgccgcaccaaaccaaagccacagtccagcagcagcgaccaccagcagcagcttccgtcgtccgcgccggcgcccaagaagaggatgcctctgctgcaggctctctccgtgccatcctcgcccagatccccctccagattcgccctcctcaaggcctccatcctgcccaacaagtgacaatgcgagtgagaagcagaatggaacccatgaaattaacggtgaagagccggtgcggcgtgtgctcccacggcgtgaagaccggcgcggcggcggtgttcacggcggagtgctcccactccttccacttcccctgcatcgccgcccacgcccacgccctcgccgccgccaccgctctctcctgccccgtctgcgccgcgccatggcgccaggcccccttcatcaacaagcgcaccaccaccaccgacgaccacaagcgcaagtcctacgacgacgacgagcccctcctcgcgcccaaggccgccgccggcgccttcaaccctatccccgaggacgacgaggacgacgccaccgagttcaggggcttcttcccggcgcgccccaggagcgggctggccgtcaccctcgccccggacgccgccctcgtgtccgctgggcggaggcacggcaagtacgtggtggccgtgagggtgaaggcgcccgccctgcgctcctcgccctccacgcgcgcccccatcgacctcgtcaccgtcctcgacgtcagccagggcatgatgggcgacaagcttcacatgctcaagagaggcatgcgcctc

SEQ ID NO: 13322 - DNA, 1290 bp, Oryza sativa
  Clone ID: TFbOSC410095j.C1.o20.fg
atgtcggcgcgcgacagggagacggccgtggcgctggcccgcctcgccgccgcgctggacggggcggtgctcggcctcggcacggcggcgctcgccgtcgcctcgtgggtcaagtacctcgccgcgtccgggcagctgcggcgcatcgcctccgcgccggcggccgccatacccgacctccgctcgctcctcgcggagtacggcggcggcggcggcgacggcgaccagccgatcctcgcggtggtgcggggccacgtccgcgccgccccccgaggcaagtacctcgtccccccaggctccggcgagcactgcgtcgtcgcaaagcatacccagctgtggcatagaagacttgggttaatgttctggattgcttctggatttctgtggaaacagtatcctgaagcaaagttccagttattgattttgttctgccggggctgcggctgcactgcagccaaccggaacattccgtgcttgttcaatgaatggagaggcatctttgggtggacctttgatctgcatgctctctttttcaaatcaattaaggagcagattataacatcatttagatgggtataccatctgtactttgttccatttgttcttgtagatcctgaaaacatgactggaatggtccatgtgaagttagacagggcaatgcaaccattacctcttacaactgtgtatcataaacttaccccagtcgactcaactccttacacattgtttcagactattattggcaatggttacccaattgcgttgttggatgaggaaaagatacttcctgttggaaaggagattacagcaataggctatattcgacctcataaagcaagtgttgagatcagctcatgctcagaaataccttttttcttgtctgaccttaccaaggatgagatggaagccgagttgtcttctcgtgctaaaacactcttttgggctagtgttgttcttggaacaatgtcagtttgcttgctgggctttgcgacttacaggagctggaagaagatcaaagagcggagggaggcaaggcaagcccaagaggtatttcgacaaactactgatgaagttacagacgatcagtctagcgatgaagaggctggtgaaatgggagacgggcaactatgtgttatatgcttaaggaaaagaaggaaggcagcttttattccttgtggtcaccttgtctgctgctgcaaatgtgcactgattgtggaacgtcagttcgacccattgtgccctatgtgtcggcaagacatccgatacatgataaggatctacgacaattga

SEQ ID NO: 13323 - DNA, 190 bp, Oryza sativa
  Clone ID: TFbOSC400139j.C1.o1.gm
cgcgctggtcgccggcgagaaggtgaaggccctcccgccgtgcggccactgttttcacccggactgcgtcgacgcctggctccgttcccagcccagctgcccgctctgccggagcctcctcctcgccgccgccgccaccgccgccaaacccgacgtcaacggcggcgacgacgacgactccgccgtgtga

SEQ ID NO: 13324 - DNA, 783 bp, Oryza sativa
  Clone ID: TFbOSC400645j.C1.o14.fg
atgtggagttttgcgtcaaacgccatagctggaagcataaggaaaaaagcacagccctcaaaatgcagtcaatccaatcctgattgctctgatgatgatgtttcttcatgtgcaagtagagaggaaggccttgaatgtccaatatgttgggaatccttcaaccttgttgagaatgttccctatgtcttgtggtgcggtcatacaatgtgcaagaattgcatcttgggtcttcaatgggctgtcgtcaagttcccaacccttcctatacaactgcctctcttcatctcatgtccatggtgtaacctgttatctttccggctagtttacaagggaaacctcaagttcccacgcaagaactattttctgctatggatggttgagagcatgaatggcgagagagcaaagttccattcccctagtcatgaagagcgccattctttatgcccttctggtggtggcccaagttccagtcaacaccatcgaagacctgctccacgaacagaaagcgccagtggcagagaaaggagtgttgctggcaacgttttcaatacttacagcatcagtgcatctctccaaaagataatgttgtcttttgttcagatgacagccaagtttccactcgtgataattttccttctgatagttctatatgctgtccctgcaagcgtagcagttctagtattgtatgtccttgttacagttttgtttgcactgccgtcctttttgatcctctactttgcttatcccagtttggattggctcgttagagagatcttcaattga

SEQ ID NO: 13325 - DNA, 792 bp, Oryza sativa
  Clone ID: TFbOSC417199j.C1.o2.gp
gaaaagggaaacaaaagcttgcaataatgatctcctttacataatatttatacactctgcacacaggagataagatcaaagaaaaaaaaaacatgctgctgcatagcttcgatcctccccttccccacacatataactatcagtctacatcacgccgtccaccgggcgcttcagcgatccggcagctgatgcccaccgtcaaccactatgctaggcagctcgctctccacgccgccggtggtcgccggcgcggtcaccgcggcggccacatgagaagcgccgttctcggcgctcgccatgtcgtcgccgccgccgtgccgaaccaccacctgccgcagcagcagcccctgcagccgcagcaggtagctctgcccagccggctgcgacgacctcacgtaccgcgccatcgtcgccgctgtcacctcgctggccgacggccggtccggctcggaggatggccggaggttgttgagcgcgctcaggtcgaggttggggaagacggagcaccggcaacgggggcacttgacattcagccggagccactggtcgatgcactccacatggaaattgtgcgcgcacgggagcccacggacctgcataatggattgggaaaagaagtctttgtcagtccttaaaaatgctggagaacgtaacttcataaaccatctctagtcttgttttaccctcgaactaacaaaaatgctccactttacttctaaccatgcttttttattctttatacaagttatattcttcgttgaaattgtggcatgtacacattattactctttt

SEQ ID NO: 13326 - DNA, 792 bp, Oryza sativa
  Clone ID: TFbOSC18350j.C1.o5.fg
atggagcccgtgacggcggcgtcggcggcggcggcggcgagcgaggagcaggtgacgcggcgcgtggcgagccggatcatccgggcgctgcagcaccagctgcggctgctgcaccgcgcggggcccgagttcttcgtgctgggcgcgacggggaacgtgtacacggtgacgctggcggcggcgccggcgtgcacgtgcccggacccgtccgtgccgtgcaagcacatcctcttcgtcctcctccgcgtgctcggcctctcgctcgacgaggcctgcgtgtggcggcagtcgctccgcccgtgccaggtggcgcggctcgtcgccgcgccgacgtgcgccgaggcggacgtcgtggcggggccccgcgcgcgggagaggttccaccagctgtggtcggcgagggccgccgccaaggccgaggagagccgccgccgccgacgacgcgacgaccaggccgccgcagccggcgcgtcggggaggctcgacggcgcggcctgcccggtgtgcctggaggagatgtcgccgcctggggcggcggcggcggcggcgatgctgctgacgtgcgcgatgtgccggaactcggtgcacggcgagtgcttcgcgcggtggaagcggagccgggggaggcgggcggcgacgtgcgtggtgtgccgggcgcggtggcggcagccgagccgggagcaggagaaggagccgtacatcaacctgtccgcgtacatgaacgacgccggcggcggcgacgtcaacatggtcgccgccgacggcgacgacgggggactgtgcgccgggtag

SEQ ID NO: 13327 - DNA, 1077 bp, Oryza sativa
  Clone ID: TFbOSC413657j.C1.o14.fg
atgggggcgttctgctccaagcagaatccgtcggggcagcagccgcactgctgcaaccacagcagcagcagcaatgccgcgccgaaggggaacaatcggttcgccaagttcggcgatgattaccataccctagagcaggtaactgatgctcttgcacacgctggtcttgagtcatcaaatctgattgttgggattgatttcaccaagtccaatgaatggacaggcagagtttccttcaacaaccagagcctgcattctctgggccatatctcaaacccatatgagcaagccatatctatcatagggcaaactctttcacgatttgatgaggacaacctgataccatgctatggatttggtgatggccccacttcatttgcaccgatgattgagacagctattggaattgtggatagtagtggtggccagtatcatgtcctacttataattgcagatggacaggttacacgcagtgttgacacaggtaatgggcagctgagccctcaggaaagggagactatagatgccattgtgaaagccagtgactaccctttgtcaattgtgcttgttggagttggcgatgggccatgggatatgatgaggcaattcgatgacaacatcccttctcgtgcgttcgacaacttccagtttgtgaacttcacagagatcatgtcaagacctgttcctgccagcaaaaaggaggcagaatttgctctttcagcattgatggagatcccagaacagttcaaggcagcaataaacctccaacttcttggaaaacgtcgaggatttccacatcgaacagtgttacctccacctgtgagggatttccaacaatactatgggtgctcaacagtcaaagaaacgcaatctactagctatgggtcgctgcagaaaaagacatcagcacctaaacaggatagtgacataggtgatcagacttgtccaatctgctggttggaagcaaagaaccttgcttttggatgtgggcatcagacgtgctcggactgcgggaaggatctgaaggtttgccccatttgccagagggaaatctccacaagaattaggctctactga

SEQ ID NO: 13328 - DNA, 147 bp, Oryza sativa
  Clone ID: TFbOSC9137j.C1.o1.gp
ggctgagcgagagccaatccaagatgcaggtcgcatggaagcaatgcgagcagggcatcctcgtcagcttctctccttggtcgaagccctcaaagcacacagcgcagtcgctctccctcgcctcgctcacctgcgcttcctgcagct

SEQ ID NO: 13329 - DNA, 2046 bp, Oryza sativa
  Clone ID: TFbOSC101892j.C1.o22.fg
atggttgacataaaccctgatcacatctttgaggttccggacacccctgaccgaatacagcagtcaacatgccctgtatctagcccagctgctaggagaggtattgcaaaagcagctggaactccattaccatcgcgaagaattaaatttaagatcacaaataactccatccagggtcaatcaagtagaggcaatgcaagtagtgtgtcgcctgcacctttagatgctggcgatatttttaaacaagccgagttggcacgattgctgccagtggcagaagatcctgaagcaagatcatccttgctaaaatcaggtcggacgatagagacatctgttgagaatgaaaaggtgccaaaaaaatctggtttggatcagagcatgaatatttcaaacaatataaattgcaggggctctggagaaagggaccgtagttgccaaatcagaaaaggggatattagtgcacgggatgccaatagctgcaatgctgactttctctgtttaggatcaggtcttcctactactacggtgggaaaaccacgaaacagaatggggactatcacctttaagaagccgaaggaagtagtaggtgctaatgtctgttcagtatcgagtcctagagagggcaaaggggaagagatcactgacaagggcacaacaggaatttcaagctctacaccaagcattgttcctcaaaggcatgtgggccaaagaaagctggtgcggaatggttgtatttctccctccaacatagccaaaagaagtctgaaggttgatgaaaagcgagaaatatgctctacaagtggactcttacactatccagatactcaggttgatgcttctgggaagggaaatgtgatagatcttactgatagttcacctataataagaaggcagggaaacactgcaactgacatggaaaaaaggtcagggagaaagtcggcaataggcagagctggggagacggtaattccactggctgcaaatcaagtgaacagtattttttctgaaggtaacaagaataaaggaaaagaaatttcccatgatgtcgtgggtgctaagcagtctggagaggcttatatgaggagggtttgtccaagatccatgggagattcttcttccgttgcaaacaatgatcacaccggtataggttctgagcaaggtaagatgaccaatagttgtggaagagaatctggatcttctgaacagtctaatctggatcgagcatctgcagcaggagacagcaataactcaattgagggaggagacaacaataactcaattggtggagcaaaaacattgcagactgctagttttgttaatagaacaataaggatcagtagcagaaagaggaagcgcatcgcaagttcttaccatcctggtgaaagctctagctctgttgatgttgatcaacctagagttgcatcatcagactcaacagctgctagaaatcataccactcaccgtcatcatattcctgtagtagatattgatgacatatgctctcctgaagtaaggcctagtttgagtgggattggtagcagcaatcggacctcagtggatcccaacataagagaacagttggagtctgatgagttattggctcgccaacttcaggagcagctttacaatgaaactcctcatgttgttcccacagaagagattgatgcgatcatagcaatgtcacttcaacatgaagataatgcgcagccgacatctagaactgcgaggcggttccaaagcactacaagaggtccaagggtattgcgttcaactgttcctcagcatgctaatagggttcgatatgactcaaacaacagaagaataatttaccagagagctctttccagataccctgctgcacatattcaacctaatattgatctaaatgattatgatgcactgcttgcattagatgaaaataaccaccagcatgctggtgcttcagaaagccagatcaataatttgcctcagtcagtaatccagtgcatagacgaatggctaagaaggaagaaactatgtccagtttgcaagtctgggatcacataa

SEQ ID NO: 13330 - DNA, 657 bp, Oryza sativa
  Clone ID: TFbOSC411348j.C1.o1.fg
atggcgatgtcgccgcacgaccagcacgagcacgagccggaccacgcccaccgctcgccgtccaacggcacggcagcgaccagcaccatcgccaccaacagatggggtccctactccggcgccggcgacttcgccagcaacatggccgtcatcctcgccgccctgctcgccgcgctcgccctcgccctcgcgctcaacgccgccgtcaggtacctgctccgccgccaccgccgggccaggcaacaaccagccgccgccgccgccgccgccgaggacccggagaagccgcctgtgcaggaggccgacccgccgccgccgcccccggctctggtgtactccgcggcgggcaccaagctggccggcgccgcggagtgcgccatctgcctcgccgagttcgtcgacggggacaccgtgcgcgtcatgccgtgttggtgccaagaaattcctctggaatctgggctcagatttgcacagataaaggtttatcagacagggcctttcaatgtagaggctgcaaatttgcttccaactccgggaatttgcacaacctgcagatttgtttacaggggagtggtgaaacatcttcattttttatatggagactggagagacatcctagcttgttttgtgaagggaaagaaaaacacaaacagttag

SEQ ID NO: 13331 - DNA, 348 bp, Oryza sativa
  Clone ID: TFbOSC401961j.C1.o21.fg
atgcaggttggtggcaccgccgccgcggccgctgaggtgtccatgtcgtaccgggagacgaggagagaggaggaaaagaggaggggtaccaagatgaaggtcaagattcttcagtggcatggggtggcttcttggacatggaacgcccaggatgaaacatgcggcatatgcaggatggcatttgacggctgctgccctgattgtaagttccctggcgacgattgtccgctcatctggggttcctgcaaccacgccttccatcttcactgcatactcaagtgggtcaattctcagacatctacgccactttgcccaatgtgccgtagggagtggcaattcaagggctaa

SEQ ID NO: 13332 - DNA, 186 bp, Oryza sativa
  Clone ID: TFbOSC402359j.C1.o1.gm
cctttggcccgttatgggcccctcggcaactgcgcgcacgcgttccacaaggcgtgcatcgacaagtgggtcgacaagggccaggccacctgcccgctctgccgcgccgccctcctcccctccgccgacgacgccgacgccgccgccatcgccgccaccaccaggcaccacctcccctccttctga

SEQ ID NO: 13333 - DNA, 1122 bp, Oryza sativa
  Clone ID: TFbOSC404332j.C1.o15.fg
atggcatctggaactgatgagaaagccaagatggagggtttgacatcagctgcagcctttgttgagggtgggattcaggatgcatgtgatgatgcatgtagtatctgccttgaggcgttctgtgagagtgacccttccacattgactggttgcaaacacgagttccacctccaatgcattcttgaatgtcaagagctgctcgaggcagtggagcgtgaaaggaatgtaaggaccaatcaaactcgaaatacaactatatttcatcatcctgctcttggagattttgaggttcagcatttacctgttgttggtaatgatgctgaacttgaagagcgtatattacagcacctagcagcagccgctgcaatgggaaggtcacaccaccttggtagaagagaaggacacaggggtcgttccggctctcatggtcgtccacagttcttagttttttcttcgcatccaaacatgccttctgctggttcagtttcttcatcgtccgttcaaggggaagtggataatgaatcaagtcctgtccacacaactggtgaattatcactgcatgctaacacccatgaagaagcaggcaatcaaagtcctgggatgcttacctacgatgctgatcaagatgctgttgtttcatctggaaatagtacccctgtatctagccctaggtttttcaacaggaggcattccactgggcaatcaactccagtaaacaacgacagagctgggccttcagatcttcagtctttctcagactctctgaagtctcgcttaaatgctgtctctatgaagtacaaggaatctattacaaaaagtactcgaggatggaaggagagacttttttcgcgtcattcatctgtggcagatcttggttctgaagtaagaagagaagttaatgctggaattgcatccgtatcaaggatgatggagcgtctggaaactagaggtagtaatggtagaacaagtgatggcccagcaatatccacttctgaagttattcccagtacagaatcaagcaatgagagagttacagaaaacaatccaactactgcagcgacaagtagtggcaacacttctgcgtcttctgccccttgtgttacaacaaccggttcaaattag

SEQ ID NO: 13334 - DNA, 2136 bp, Oryza sativa
  Clone ID: TFbOSC10241j.C1.o6.gm
atggatgagaaggtgaagatggagagcaagctgtcctccgcggcggcgttcgtggagggaggtgtgcaggacgcctgcgacgacgcctgcagcatctgcctcgaggccttctgcgacaacgacccctccacggtgacgagttgcaagcatgagtaccatctgcagtgcattcttgaatgccaagaactacttgaggctgttgagcaagagaggaacattcgagctaaccgtttgaacactgccgctgtttttcaccatccagtattgggtgattttgaggtccctgtaggagctgatgatgctgaacttgaggagcgcattatacaacacttggctgctgctgctgcaatgcgtaggaatgaggctattcctggtggctccctgcatgcaagttcaggccaagatgaagaccatgaacaatcttctgacttaggttctgctcatccttttgctgctcttgctgctgtagaccaaggacatatgagtggtggttcgcagctatacgtgggtcattctgaccagggtgcttcaaatccatctctgcatgatgagagagcaatgagcaggaaaccaaacaacgcgtcgtcttcttcctgcgggaaactaggcgcccccaaaggatccctcgccgacgagggcgcggtagcagcagcacaagcaattcgcgcaggagagaagtggccgcaggccgcagcgatgggcgcgccggtttgtggcgcactcgtgtgcttcttcgttctcctcgttgcccgtgcggccgcggagacggcgccggtggaacgtcccacattgccctcagccgacgtcgccatcgacggtaatggcaacggcgctcgtgctggtgcgggcaaagctgccggcgccggcgccgtgggaggagggatcgtgtcaaactcggtgctggtggcgttgctggactcgcgctacacggagatggcggagctggtggagaaggccctgctgctccaggcgctggaggacgccgtcgccgagcacaacgtcaccatcctcgcgccgcggaacgaggcgctggagcgggacatcgacccggagttcaagcgcttcctgctcgagccgcggaatctcaactcgctccagtcgctgctcctcttccacgtcctccccgcccgcctcccctccggttcctggcccgccgcggccacccacccgacgctcgccggcgaggatgttgagctcgccgcggccgacggcggcggcggcatgcgcgtcgcccacgccgccgtctcgcgcccggacgcggtggtcaggacggatggcgtcatccacgggatcgaccgcctcctcgtgccgcgctccgtccaggacgaattcaaccgccgccgcagcctcgccgacatctccgccatgccgccgacggccgcgcccgaggtggatccgaggacggatcgcctcaagaagccggcgccacccggcgattctcctgtgctcccgatctccgacgcgactgttcccgatccctccgtcgcgctggcgtcggagcccagtgaccactacgacggcgacagccaggtgaaggacttcattcagaccctgctcaagtacggcggctacaacgagctcgccgacatcttcgtcaacctcacctcgctcgccaccgagttagcccagctcgtctccgaagggtacgcgctcaccgtgctcgcgcccaacgacgaggccatggcgcggctcaccgccgaccagctcagcgagcccggctcgccggagaacatcctgtactaccacatgatcccggagtaccagaccgaggagagcatgtacaacgcggtgcggcggttcggcaaggtgcgctacgacacgctgcggctgccgcacaaggtggtggcgcgcgaggccgacggctcagtcaagtttggccatggcgagggctcggcgtatctcttcgacccggacatcttcgccgacggcaggatctcagtgcagggcattgacgccgtgctgttcccgccggctgagacgaagacgaagacgaagccggccaccgcccggatcaggacggcgcccgctatcaccggcgtcagcaagattaaacaccggagaggcaaattgctagaagcagcatgccaaatggttggcatccttggccagcgatcgcaattcacacgctgccagtag

SEQ ID NO: 13335 - DNA, 497 bp, Oryza sativa
  Clone ID: TFbOSC34110j.C1.o1.fg
acttggttacttgtgttcgatccaacatataccacgtgaaacaaccacccaatactatgagcaccaaggcagtgtgccatgtcgtcgtcgacatcgagctccaagacgtagcccgcggcggcactgctgctactactaccaactgctgcgcggtgtgtgtggagccattagagtgggtggcgatcgggccatgcggccaccgctgtgtttgcgcgagatgcattgtccaggtccgcttcgtcagcgaggacaggcgctgtcacgtgtgcagagccccctgtcctctcgtcgtcgtcatcaaggggcactgcatcaacggcgccgatatcctcgctgagctgccatcatcaccgtccatgataactagacagggtagagtggacaacttctggttcaacgtcgacacggcggcctacttcgccgatgagcagcaattcaaggtggcgaggattgcttgcgttaaaaagtccttttataagcccaaggagaagccatag

SEQ ID NO: 13336 - DNA, 879 bp, Oryza sativa
  Clone ID: TFbOSC408853j.C1.o1.fg
atggcggaagtggccaatgtgggaacaaagtcgtccatcaataacaatgaagacaccagtcggcggcgacgaaggcggtcgacggtgaaagcgaagatgcccactaatggcggcataataggtcagccgtgtaagcggaaacaccagtcgacggcagcgaaggtgagccaacgattgagtttccccctgactgatttggatcaagtcagagaagaggagcttgaagaagtggtcgacggaaaggaagtgaaaactcccaaagcgaaagcgaagtcggcgactcatgaaattgattccatcgcgctcgttgataggaaactcgacgcaacccctacctggcgcgccaactgtcgaaacatgaattcggcaataataaaaggggacttggttacttgtgttcgatccaacatataccacgtgaaacaaccacccaatactatgagcaccaaggcagtgtgccatgtcgtcgtcgacatcgagctccaagacgtagcccgcggcggcactgctgctactactaccaactgctgcgcggtgtgtgtggagccattagagtgggtggcgatcgggccatgcggccaccgctgtgtttgcgcgagatgcattgtccaggtccgcttcgtcagcgaggacaggcgctgtcacgtgtgcagagccccctgtcctctcgtcgtcgtcatcaaggggcactgcatcaacggcgccgatatcctcgctgagctgccatcatcaccgtccatgataactagacagggtagagtggacaacttctggttcaacgtcgacacggcggcctacttcgccgatgagcagcaattcaaggtggcgaggattgcttgcgttaaaaagtccttttataagcccaaggagaagccatag

SEQ ID NO: 13337 - DNA, 1998 bp, Oryza sativa
  Clone ID: TFbOSC420483j.C1.o21.gm
atggatgagaaggtgaagatggagagcaagctgtcctccgcggcggcgttcgtggagggaggtgtgcaggacgcctgcgacgacgcctgcagcatctgcctcgaggccttctgcgacaacgacccctccacggtgacgagttgcaagcatgagtaccatctgcagtgcattcttgaatgccaagaactacttgaggctgttgagcaagagaggaacattcgagctaaccgtttgaacactgccgctgtttttcaccatccagtattgggtgattttgaggtccctgtaggagctgatgatgctgaacttgaggagcgcattatacaacacttggctgctgctgctgcaatgcgccaagatgaagaccatgaacaatcttctgacttaggttctgctcatccttttgctgctcttgctgctgtagaccaaggacatatgagtggtggttcgcagctatacgtgggtcattctgaccaggaaggatccctcgccgacgagggcgcggtagcagcagcacaagcaattcgcgcaggagagaagtggccgcaggccgcagcgatgggcgcgccggtttgtggcgcactcgtgtgcttcttcgttctcctcgttgcccgtgcggccgcggagacggcgccggtggaacgtcccacattgccctcagccgacgtcgccatcgacggtaatggcaacggcgctcgtgctggtgcgggcaaagctgccggcgccggcgccgtgggaggagggatcgtgtcaaactcggtgctggtggcgttgctggactcgcgctacacggagatggcggagctggtggagaaggccctgctgctccaggcgctggaggacgccgtcgccgagcacaacgtcaccatcctcgcgccgcggaacgaggcgctggagcgggacatcgacccggagttcaagcgcttcctgctcgagccgcggaatctcaactcgctccagtcgctgctcctcttccacgtcctccccgcccgcctcccctccggttcctggcccgccgcggccacccacccgacgctcgccggcgaggatgttgagctcgccgcggccgacggcggcggcggcatgcgcgtcgcccacgccgccgtctcgcgcccggacgcggtggtcaggacggatggcgtcatccacgggatcgaccgcctcctcgtgccgcgctccgtccaggacgaattcaaccgccgccgcagcctcgccgacatctccgccatgccgccgacggccgcgcccgaggtggatccgaggacggatcgcctcaagaagccggcgccacccggcgattctcctgtgctcccgatctccgacgcgactgttcccgatccctccgtcgcgctggcgtcggagcccagtgaccactacgacggcgacagccaggtgaaggacttcattcagaccctgctcaagtacggcggctacaacgagctcgccgacatcttcgtcaacctcacctcgctcgccaccgagttagcccagctcgtctccgaagggtacgcgctcaccgtgctcgcgcccaacgacgaggccatggcgcggctcaccgccgaccagctcagcgagcccggctcgccggagaacatcctgtactaccacatgatcccggagtaccagaccgaggagagcatgtacaacgcggtgcggcggttcggcaaggtgcgctacgacacgctgcggctgccgcacaaggtggtggcgcgcgaggccgacggctcagtcaagtttggccatggcgagggctcggcgtatctcttcgacccggacatcttcgccgacggcaggatctcagtgcagggcattgacgccgtgctgttcccgccggctgagacgaagacgaagacgaagccggccaccgcccggatcaggacggcgcccgctatcaccggcgtcagcaagattaaacaccggagaggcaaattgctagaagcagcatgccaaatggttggcatccttggccagcgatcgcaattcacacgctgccagtag

SEQ ID NO: 13338 - DNA, 309 bp, Oryza sativa
  Clone ID: TFbOSC8672j.C1.o3.gm
atggatccgacggccgggacaggttcctccaccaagaagatccctagttggatggtaacggagctgccaatgctatcgacggaggccaaccgcttgccacagatccctagttggatgataaggaagccgctaatgctatgtatggaggccggccgctctggcaaggccgccgccgccgccaccgcggacgccatggagcagagctgctcggtgtgcctcaagaatttcgagaaggacgactgcatctggtcgatgccctgctcccacactttccatcagctctgcatcttgggcgaccgctcctgcagg

SEQ ID NO: 13339 - DNA, 379 bp, Oryza sativa
  Clone ID: TFbOSC18110j.C1.o1.gp
tttcttaagaaaatcttcaacttcatatacaattaattcgtttgtacactcgaatagtgataacaagttaaatcaatgagaaaaaaaaaagcatagtcaacattgtcgacgtagtagtagaactagaaaccatcagttgaccgttgaacaaacaaattccacctcgcctgcagcggatccgccaccatcggatcggccaccagcacatgcacatcctctccggccgtcgtcgtcgccgctgccgccgccgccgtcagctcgcgccggcacatggggcaggtccctagcttcacccgagcccaagactcgaggcaccgcgagtggaagcggtgcgcgcacggcgtctccacccacgcctccgtcgtcgtcttctccccac

SEQ ID NO: 13340 - DNA, 743 bp, Oryza sativa
  Clone ID: TFbOSC400014j.C1.o1.fg
atggcctcatggccgacatcatgtaccaaggtgtacgagatcattcagttttcgcgctgcaaggaggaggcgagcgcaacatcaagcatcatcgaccacaggacggccaaagtcggcagacgagatgacggcccgaacatgtcaaaggtgctaagagctacaatacctgagaattcagttagtggatcatcagttcgaggaaagctgcgagaaatggagatggacttggcagtcgagcagtacggcagtataggtgcgtcctccatattaagtactctctccgtcccagaatatagcaacctagcatgggatgagacctatcctaagaccatgttatctgctctctctgcaacaaagaacaggatgtacaacaggattgctccaattgtggggcatgcttgggtaaatatttctgcgcaaaatgcaacttttatgatgacgatgcaagttgtgctaaatatgcattcctgtgacggagtaatgaaatatgagccctttttgataaatctcaccatcacattttacagaactggtggtgcagagaacttctttcactgtgacaaatgcggatgctgctacagctatgtgctgaaggattcccatcattgtgtggaaagagcaatgcaccataactgccctgtatgcttcgagtatctatttgactcaacaaaagacatcagtgcactgcactgcggacacacgatccatctggaatgcctatacgagatgagatcccatcaaca

SEQ ID NO: 13341 - DNA, 420 bp, Oryza sativa
  Clone ID: TFbOSC900071j.C1.o7.gm
atggatccgacggccgggacaggttcctccaccaagaagatccctagttggatggtaacggagctgccaatgctatcgacggaggccaaccgcttgccacagatccctagttggatgataaggaagccgcttatgctatgtatggaggccggccggtctggcaaggacgccgccgccgccaccgccaccgcggacgccatggagcagagctgctcggtgtgcctcaagagtttcgagaaggacgactgcatctggtcgatgccctgctcccacactttccatcagctctgcatcttgggcgaccgctcctgcagggacatgaacgccaatgaggagtgcaaggagctttctttggtagaggatgaagcttctactgcaagagaagcaagcgagctgggaagaactagaggaagcttttag

SEQ ID NO: 13342 - DNA, 960 bp, Oryza sativa
  Clone ID: TFbOSC900389j.C1.o9.fg
atggccgtcgacgcgcaccacctgcaccgcctcccaccaccgatccagcctgctgaatccatgttctcgccgaggcagccttgtttcggcgccgccgccggcgaggttgtcgtcggcggcgccggtggcgcggtgatggcggggctttgccaggaggagcagctggtgcaggggtaccgccaggtgtttgttggaggtggtggggtgaggcagccggcggcggcggaggtgatgaggcagtactcgcaggtgtgcgcggcggcggcggacgcggcggagagcggcgtcacgttcggcggcgggcaggaggcggcggcgccgaggaagaggaagcgcgccgaggtgccggtggttcttggcgccgcgggcgacgtggccgtggcggcgcaggctcgccagcagctggtcgacgtcgaccgcctcgtgctccaccatgcggcgaagatgtgggcggagcttgcggagcagagggggaggcacgcgaggcagatggtggccaccgtggaggccgcggcggcgaggcggctgagggccaaggacgaggagatcgagcggatcggtcgcctcaactgggcgctcgaggagcgcctcaagggcatgtacgtcgaggcgcaggtgtggcgcgacctcgcgcagtccaacgaggccaccgccaacgccctccgcggcgagctcgagcacgtcctcgacgcccacgcgcgccgcggcgccgaccacggcgacggcgacgacgccgagtcctgctgctacggcgagaacgacgtgctcgcgcgcgccgccggcgacggcgaggcggcgtcggccgagcggcgctgcaaggggtgcggcgaggcggcggccgtggtgctgctcctgccgtgccggcacctgtgcgcgtgcgcgccgtgcgcggcggcggcggcggcgtgcccggcgtgcgggtgcgccaagaatggcagcgtcagcgtcaacttttcgtga

SEQ ID NO: 13343 - DNA, 562 bp, Oryza sativa
  Clone ID: TFbOSC404797j.C1.o7.np
ggccgccgaagctgcgcggtgtgcatggagaccctggagtgggcggcgatcgggccgtgcggccacggcgaggtctgcgccggatgcgcgctccacatccgcgtcttccagaacaaccgcctctgctgcatctgccgatcgccgtgccgcgtcgtcgtcgtcaccaaccccgacgccatcgccgccgccggcggcggcggctggcccgccgtctcctcgcggctaccgagcgagggacgggtgggcgagtactggtaccacaccgggatgggggccttcttcgacgacgagcgccagtacgcagcggcgaaggcggcggcgcggctggggccgccgccgtgtggagatgcaaacgagaaccctcctcctcctccgccgccgcattgtgtcagatcgaggcactcagttcacctcaagagttacctgaaggtctcgcagatgtgcacaatgtgtttcacgtgtctcagttgaagaaatatcttcgtgttccagaagaggctttattttcgccgtttgttgagttgtcccgtttcgcgtgtagtttcggagcccgaagacctgc

SEQ ID NO: 13344 - DNA, 981 bp, Oryza sativa
  Clone ID: TFbOSC414535j.C1.o8.fg
atgcggaggaggttccaggactccgtcaaggccctcgaggccgacatcgagcacgccaatgagctggcgtcggagttcttgcgggattacgacggggcggtgatccagatgcggatggcgtacagcgccgtcgcgcacttcctcgtgcagtggatcgactgcaagctcgccggcgcgctcggcctcctcaagatcatgatctacaaggtgtacgccgatggcaccacggctctgccggagtgggagagggaggccagcatcaggcaattctacggtgtcatcttcccgtcgctgctccagctgccgagtgggataactgaattggacgacaggaagcagaggaggctgtgccttcagaagttcaggaaggtggaggagagggtctcggaggtggatttggagagggagctcgagtgcggcatctgcctcgaggtgaatgccaagattgtgctgcccgattgcgcgcactcgctgtgcatgagatgcttcgaggattggagacaaaatttcgtttacctgaatgtggtgttcaagaaagagagaaaaagattacctttgccatatattggctggttgtgttcctcaggatgtaaagtcagttgtaaatctcctgcacttctgatagagtaccacaatgccctctccacagagtctttaaccatcttcatgcatcaagatgtagtccatccaatcaaacctgcatccagaatgactttatttataactgcagcaaacattctattgaactatgtcctgctcttgagcaggaacaccaaatcaaagtcgtgccccttctgccgcgcctgcctcaagaaggtgaatccgagcagcctgtggttgtacaccgacgaccgcgatgttgtggatatggatacgttgactagggagaacattaggcgcctgttcatgttcataagtaagcttccacttgtagtgctccatgtggttgaccttgacatttacgagtaccgtatcaagtga

SEQ ID NO: 13345 - DNA, 300 bp, Oryza sativa
  Clone ID: TFbOSC401965j.C1.o30.gp
aacaacaaagttttttttcctttttttttaaaaaaaagagcaaattgctcatgcaggcaacagctaggatggattctgattaaccaagctagaaaccggcgacgaagagggaggagaaccagatgacgaggtcgtcgccgagctggagctcgtcgagcccggccacggcggcggccaccacggcgccgccgacgtggaggcggcagagcgggcacgtccgccgccggcagtagagcgccagccaccggtcgacgcagtcccggtggaacgcgtgcccgcacggcagccgccgcacctcct

SEQ ID NO: 13346 - DNA, 693 bp, Oryza sativa
  Clone ID: TFbOSC826j.C1.o13.gp
aggacatccaatgacacatatatgttaaacaaatagcaagtatcaatacacactttgcttgactgagcaaagtagcagaagaaagtaggcatgtgaattcttttacaacactccgaccggtaactgcagcaactacaacgtttgaaaattttaaaataaaactattctaaagaaacaatcacacaccaccatatagtcattttgttatcagatgtaccaacggaacattctagaacatagaccaccaactctttttggtgtccacatgtacttcagtggcacttggggatctacagtacagttgccttctaccactcctagcgggatttgtaaagcataaaactagagcgaaaccgatgaggcttacaactggagcagcagcaataaaaagccatccactgcgcctgcgtgcactgtttggttgctcatcaacacgaacattgtgttcacttgtattagtctcttcgatcacaccagcagccatctgacgagttacctggacctcttgttcatcagaaatttcttccacaacctgaatgtctcttacattggttgtggcttgcttggacctttcatactctgcatcatctgtaggaagctcatatcggcagacaggacatgtatttctagaactaagccatggcaagatgcacgatgaatgataaagatgcatgcatggtagctgttttgctc

SEQ ID NO: 13347 - DNA, 1155 bp, Oryza sativa
  Clone ID: TFbOSC401130j.C1.o66.fg
atggcgtgtggtataggcaggtggagcagagcggcggcggtaggagtgaaccgacaagcagcagcgggcgagctcgatctccgcccgggtgtcctcctctcactctcacgatttcgaccgaagcggcaacgggtgaagcaaaggggtggaggtcatgggcgatgcggtgcagcttcatcacgggccctcaccggcaccgaaaatgggaagggagagtggaggggaacaaaaactacaagctcaagtggatcaagattggcttcatcattggtgtcttccgccggttcacgctcgtttacaattttgctccttttattttttccggatcaaacagccatctgccaacagactaggagtaccaaggagtcgaagccggtgcggaggtgctcagcgccgccggcgccaccgaccacagccgcatcgtcaccgacagcgagtacgacacgtctcctggacgacgacagcagcagtagcgccggcgccggcaacagccacgtcgtgatagacatcgacgacgacgacggcggagtcggagacagcgacgacagcgcctgctcgtcgtcgtcggccgaaggcccctgctgcgcggtgtgcatggagccgctggagtgggtggccgtcggcccgtgcggccacgccggggtgtgctccgtctgcgcggcccgcatccggtcgtccaggagctggcagcccgacctccggtgctgcatctgcagggctcactgccccttcgtcgtcgtcaccagggcggcggcggcggctgcccccgccgccatgccggcggtcaacagctaccaagagtggcgggcgcgggggtactactggtactgcaccaccatgttggcctacttcgacgacgtggagcagtacagggcgacgagggcgatcgcgcgcggcgaggttaaggggggcgccgccgtggacgtggacgggaacgacggcggcggcggtggccgccgcacgctgagcagctgcgtagacgtgttcaggttcctgctaattgtggccatctttgcgctgttcggcgtgctgtttggctccgtcttttcgtcactaacagcgggaggaagagccacaccgggtgacaatctggccttcatttcagcatgcgccgcggtctcgatgctaggatcaattctcttttattttgcatga

SEQ ID NO: 13348 - DNA, 1608 bp, Oryza sativa
  Clone ID: TFbOSC8604j.C1.o3.fg
atggccgtagtgcttacccacggagtcgtggacgagggcggtggtgagcggagatggatctggcttgtagcggaggaggcagggaaggaagctgcgaggagaggaagaggagaatgtggcaagaggaagacgaggagatggagcagctcaccgaggccatccaggcctccctaccctccaatgccgccgcccccgcgccaccggaggaaccttcccacgcctcatgtgccctggaaatcccacgccgccgacctcgcgcgagccgagcatgaccgccgcgacgcccaggcctgccgcgcctaccacgcccgggccgccgcctccgtccgcgtcgccgcgcacgacgccctcttcgcgcgcgacctcgccgccatcccggaggacaggtgggcccacgacggcgactacttcgagcggcccctccccctggaaggaggcggcgcgctcttccgcgtgctgttcaagggcatggcgagcagggaggtggtggggccgcgtgaccgtgaccctggcgtcggggtgctcgccgtcgccatctgcgggccaaggggggaggtggtgctccggatacacaagcccgtgcaggcgcaggcgcagcaagggcggatgatgctggaggcgatggcgctggtggaaggcctcaatgcggcgctcgccctcggcatccggaccctcaacgtcctcactgacaacaagccgctgcacaaccatatgagtggtatatggcgcccaagacagaagaggcttgtggatttgatcaatgaggctttctcaacaaaacagaaatttgagcaatgtgagatcctctgtgttgcacgaacccaagtcaactatgtcacaaaattagcaacagattctctgcatactcaaattgccaaagctgctgctgtgagtgctggcaaggagaaaaaagagaactgcaccatctgcttggaagacactgacgtctctaagattcatgcagttgaaggctgcgcgcatcgcttttgcttctcctgcatgaaggagcgtgtcaaagttaagctacttcatgggatgctcccagcttgcccacaagatggttgcactaccaagctaaactgtggagggttcaaagatgttcctatctccacggttattagcgatcatggtgcagcgtatcagggaagcacaaattcctccaactcacaagatttattgcccatatcccaagtgttcagccttgatgtccatgagagaactgatacatccaatgcaagcatcatcctcaaaatgacttgttatgactacaagaggaggtacccccatgctcgtctagaagatgcctatctacagaaccttgcacggcagcggtgcggctatgagttctgctacacctgtggaaaagaatggaaggagaagaaagcgacctgctcttgtccactgtgggatgaacgcaacattatccgtgatgatcctcaaggcaatgctgctatccatgatgatcctgaagatgaatatgatgactactatgatgaggacgaaaataattactatgttggagaaggccttcagtacaatgtggattaccatcgtcagtatgatggaggggaccgtcaccatggccacttctatcaatacaatcgctag

SEQ ID NO: 13349 - DNA, 981 bp, Oryza sativa
  Clone ID: TFbOSC401130j.C1.o102.gm
atggctcaactccacggcggcagcgtcggccacagccaagccatcgacgacatacctcaattctacgcgagcagctgtagcgccaccgcctaccacagccatgccatggagatgtcccggctcgacgcgagcgggcgcggtagctcccgcaccgccgccgacgacaaaggcggccacgtcgtgatagacatcgatgccgccgacgacattccaattccattctgcgtggtgtgcatggagcccctggagtgggtggcggtcggcccctgcggccaccgcgtcgtctgctccgcgtgcgccgcccgcgtccgctccgcgccctactccgaccaccggtgctgcacctgcaggacgccctgccccaccgtgttcgtcaccaaggcggcggcggcggcggccgacggcgaacttaattaccttctccaactccaaggcgatgctggcagccttcaagacgggcgggtcggcgagtactggtacttggcccccatgtcggcctacttcgacgacgagcggcagtacgaggcggcggccgcgtcgtcactgatgatgaagcatcagcgaccgccgcccgatgctgacggtgagttccaaccccgccatggcggagatcgcggcgacggtgcactaccgggcgatgaattcggggcgccggagctgtcgtttttggctcttttctttgcggcgtgcggcgcggttgtcggcctcggcttcactggatttggcactggctggggtcaaaaggtggccatcgtgttaggatccgccgtggcaaacggtgtcaggggagcttctaagcttcttcgtttctgttggaggcatgacatgagagccttcgaccaaccctgccgaaaccatctattcgacgagggatcaaaccagaggcgtcggcttcgaccaaggcgaaggtacatggcgaaggccatgtggcgaagcgtgtgggcgaagaccaaagactcggttccaagcctcgcagtctag

SEQ ID NO: 13350 - DNA, 3201 bp, Oryza sativa
  Clone ID: TFbOSC400049j.C1.o37.fg
atgacaaagacgcagccgcaactagtggagtcggagccggtgaagaagctccaacgcttgccaccagtgtttagtcgtgtgttggagcttccattcccaagggataccaatgttcgtaagctctttaccaccaacgctgacctcttttttgtgccacatggtgtcggtggtgaacctgatgttgttaaggtacacattgtgagactcgagcgctgggatatgactagggtggtggtgcacattggacctggggagccagacttaaggaatgatctagtctatgacaagtggcgcttccccctagctgagacatccattctatcgatggttatggcagggatggatgcaagcggtgatggtgggaatgaggggatcccaatgtggcccaacattgataaaagaggaggaggaggaggaggaggcggcggattcgggcttcttgctggtgcaagctacattcctaccaagttttcaaggcctcgaaattctcagaaagttgaaaagtgtgtgttggataaggtgaaagcctctaagttcaagagtgccagagattatgactcgattccgatcgaggggcaattcatctcggttgccaacctgaaggagcggatttttgagtccaagcatcttgggagaggcacagattttgacctcatgatttcaaatgcgcagaccgacgaagaatatgctgatgaagctactatgataccaaagaacacatcggtgttgattcgtcggataccaggaagaccaaggaagcctattgtaacagaaccagaagagacaaaagccatggaaggtagggtagaagaaaccatgccttctggtagtgcttttcttgctgatgcatctatgaaatatcctgaagaatctgagtgggatgacgagtttggcaatgatttatatgtttctgattcagtcccttcacagctcggtagccaggcggttgatgcatctgaaaataaagttgatgaagatagtaaaataaaagcacttattgatacatctgcactcgactatagtcaaattcctgatgggtatggtggtggaagaggctatggaagagggatgggtggaagaatgatgggtggtcgtggttttggtcatttcattcaacattgcccaacaaatggtgatgctagatttgacatgaaaaggatgaaacctccaactggcattccaaaatctatgttgatggcaaccccagatggctcatatgcactaccaagtggggctggtgctgtcttgaagccaaatgaagctgcttttgagaaggagatagagggattacccacaacccgctcacttggtgatcttccaccagagttacgttgcccattgtgtaaagaagtaatgaaggatgctgttctaactagtaaatgctgctttaggagtttctgtgataaatgcattagggactacattataaacaagtcaatgtgtgtctgtggtgccacaagcatattagcagacgatcttctccccaataaaactctaagagaaaccatcagccggatattagaggcaccaccaactagcagtacagaaaatgtgggaagcatggtgcaagtacaggatatggagtcagctattcctgtacagcccaaggttaggtctccagctgtttctgctgcttcaaaggaagaaccaaaaagaacacctgcacctgtagaagagtctccagatgttgagagccatagcgaagtgaaaactacaaatgttgatatgagttcttcagataagaaggtccccgcattaccagatgttgttgaaggaaccatggagtctaaaattctgaaagaaaaaacaccagaagcaacacctgttgtgaaagagtcacaggaaaaaatgcctgttgtgggcgaacaagtcgtaaagaaaaagaagaagaagaaggtgcgcgcaccaggaaatgctgaggactggaaaccctatcaggactttggagctgaaaattttgctggaatgcctatgggtccggcaggaggcttcaacccttactggggaggggggatgccattgccaatggattacatgggtgcgccatttcctggtcccatgccatacatgggttatccaccaggtcctttcgacccttttggtgggggagtcctcccacaagatccatttatgcccccaggatacatgatgccagcagttcctagggacctttctgaattagcagttaacagtatgggaatgaatatgggtccaccggttgttagcagggatgaatttgagctccgaaagcctgataataggaggagacgtgaaatggagcgattcaatgaaagggagagggagcgtggacattcccgcgagagagaaagagaaagggagagggagagggagagggagagggagagggaaagggaaagggaaagagagagggacagagaccaaaatcgagatcgcgatcgagaccaagagcgggatcgggatcgggagcgagacagggaaagagaatctcgaagggaagcgagggaatcatccggagccaataacgatagtactacctcaatgaggccgaaggctaggtcaaggtcgtcgcagccggcggacaggtcggcgccgcctccgccggcgagccccgaccgccactcccggcgctccccgcaccgctcctccggctccggcaagaagcgctcctcctccgaccgctacgacgacctgcccctcccgccgcctccgccgcccgcgtcgcgccacgaggcggccgagcacgcccacgcgaagaatacggcggcggcggccgacgcgcggtccaaggccaagggcagcgtcttctcccgcatcagcttccccggcggcgacggcaacccttccgacgccaagcgcagccgcaggtcctcctccgacaagcccccggcgtcctcttcttcctcctccaagaaagcacgtgccgctgtggcggaggacaacgacggccgccaccaccgccgccaccaccgtgaggcggccgccgcggcggaagagaggcggaggcccgcggccggagactactacggcgaggaggaggaggacgacgagagcgaggaggagcagcatttcaagcggcgcccctcgtcgtcgtccaggcgggagcgggagcatcaggaggcgcaggaggagccgcggcggtccagggagcgccgcggcggcggcagcgacggcaaccaccaccacaaccatggcggtggcggcggccacaagcgccggtga

SEQ ID NO: 13351 - DNA, 921 bp, Oryza sativa
  Clone ID: TFbOSC401130j.C1.o74.fg
atggctcacctcgacccaaacagcggtagtggtgccactgtcgccgctgccagccacagccacgtcgtcgtcgatatgcctcaactggacgcgagcagccatagcaccgccagctacgacgacaaaagcggccacgtcgtcatagacatcgaatccgaaggcagatcaggtaccaccggctccgacattatcttgtcctgcgtggtgtgcacggagccgctcgagtgggtggcggtcgggccctgcggccaccgcgccgtctgctccatgtgcgtggcccgcgtccgcgccggcccggacgccgacaaacggtcctgcatctgccggacgcgctgctacaccgtggccgtcaccaaggcggcgacggccgctgacaccctacacgccttcccaaagacggtgccggtgacctcccgagactggcggatcggtaaattctggtactacgctgccatgtcggcctacttcgacgacaggaaccactacaaggagacgaagcgcgcggtccgcgatttccttgaaaagcagcgggcggcgccgtctccgccgccgccgtgcccggacgacgatgtcactgatgaaaacttggaagcgcagccgccggcgccgcaccacccacgtgtatcgtggtgtggaatcctgtttgttttagttgcctttgcatttgtctgtggacccccagcgctccgcgccggtgtgcaccgggtagaaacctgcgccacggccgcgacgaggacgcatcaggacgaagtgctacgcatcagcaaggctcctaagtcgcagccaagtgctacgcatcaggacggctccttgccaattgccatggagaaactggacggagaggacagagaggaggaggaagaagaagaagaagaagaaaagaagcaagcagcaagcattagcgtaatgttgacacactag

SEQ ID NO: 13352 - DNA, 2607 bp, Oryza sativa
  Clone ID: TFbOSC22501j.C1.o1.fg
atgtccactctcgcggcgcatccaccgttggggccagcggcggcggcgcaggagaaggcggcgagccggaacaagcgcaagtaccgcgccgagccgccgtccgccgagctggggtcattcgggctggagtacccactgacggccgactgcgtgggcttcgagttcatgtcgccggagaaggcagccatcgcggcggcggcggccgccgccgcggtggccgccgagggcgtcaacctggacctcatcccgggctcgtgcgattgcaaggatattcaccccacggcggaggagctactggagtgccagagatatgtgaattggaatgaccccaacgaggcgctgctcgaggagatccttctcaagggcctggacgcgacgttcgacaatgccgtaggtgtgatcatcgcgatgggttactccgagcccaccgcgcgtgccgccgtcctgcgggctgccacgcagtacaattggagggagagccttgctgggttcggcgaggcggcggtcgaggtgctcaagaccgagggggacatgttgagtgagggcgcctccgaggaagacatgaggaagattgagcaggcagtgctcggtggcatgattgcgttggtcaatcaggctcagccgttctacactacaggtgatgtgatgttctgcttgcttatgtcggatatgaatgtggccaatgcctgtgccatggactacaatccggcttccctcccagcagtggatacgcaagtgattgcccagccagttgttggaaactatgaacctaataatccaagttcggatttatcagtatctattaccaacccacagactggcgtcacttttcgtggaaaacttaccccagtgccacccaattcttacaatactgccaaggctgattcatccgcaacaccagcaaacctgaatgtaccgagcagtaaaccctctgtctcaggtaaggcgcagagtgaaatcccgaatcttaagccaaaagaaaactcaaatcctgtgcctgatcattcagaggagcaaccattcgttgctgctgcgacacaacctgtgaaagatgataagccaatccctagtaagagggggagttctaagcgggattccttgcatcggcagaagttgatgagttttgataagagttcccgagcactgggttctaaaggatctcttaggtcaagcaagcatagctctttgggtagcgcagtgctggacaggaagtgcaggtcgttttcagattctactactagcagtttgaaggcctcatccaaagtaggcaaagggttttctgcaagcatgaagggaccggaagtaccacctgacctttcttttactggtgctgcccttccctccaatccatcatttgatgccaagctgagtagtaacttgaacccattaccagctgctagcacagatctctcattgtcgttgccattgccgtcctcaaatgacagtcctgctccatcttcgaatcatgatgccaatacagagggtatggactctagcagcaaaatcaatttatcatatgatgaggatcagaaggtttggatcccacaagataagaaggatgaaatggtcttgattcttgtccagcggcagaaagagttgcaagcacatatgagggattggacagactgggctcagcagaaggtgatgcaagtcactcgtcgacttgccaaggagaaggaagagcttcattcacttaggaaagagaaggaagaagcggaccgcctccaagaagagaggcacaatctggaagagagcactcggaagaagcttttagagatggaatctgcgatttctagggcgaacacccagctggaaaaggcagaatcttctgctcgtagacgtgaagccgagaatgaacagctcaggatacagatggaagctgcaaagcggcatgcactagtgtctgcaacaaatattttggagctttcaaagaaggatgagaacagtcataaaaggtctcagcattgggaatctgaaagagccctgttgcaagaggatcttgctgctcaaaggaacaagctatctcaggtccaccagcaacttcatcatgctaaagagcagaaggatcaaatccaggcaaggtggaggcaagaagaggctggaaagattgaggcaattgcccgtgtaagcttagagaagaaagagagggatcagattgagacatcactgaggtcggaagagaacttcctgcatctcaaagcggagaacgatacgcaaagatacaagagccagatacgtgctctcgagcagcagatttcgcagctgaaggtatccttggactcgttgagggttggtgcccctcccaagtggggagcagacaacagaaccaacgcgttgcgcctttctgaagggagaaagaatggcagcgctcaaattttggccaatatagcagcggtaccccaggatttcgattttgacgacatacagcgtgaccgggagtgcgtcatgtgcctgagcgaggagatgtcggtcgtcttcctcccttgcgcgcaccaggtggtctgcgcgaaatgcaatgacctccatgacaagcaagggatgaaggagtgcccatcgtgccggacccccatccagcgcagggtgtgcgcccgcctcgccggttgctag

SEQ ID NO: 13353 - DNA, 401 bp, Oryza sativa
  Clone ID: TFbOSC22501j.C1.o2.gp
aaccaacacccatcccattatccattatctctgcggggttttgattgatgtgcgaccaaccatgtatattattctcaaagtttaaccactctcaccaccactcattattccatccaatcttccatccatccatccaaggcaagctcagcaaatcaatcaaaaaaaacaaataaaaagagaaaacaaaatggtgtatatgaagaagtctagcaaccggcgaggcgggcgcacaccctgcgctggatgggggtccggcacgatgggcactccttcatcccttgcttgtcatggaggtcattgcatttcgcgcagaccacctggtgcgcgcaagggaggaagacgaccgacatctcctcgctcaggcacatgacgcactcccggtcacgctgtatgtcgtcaaa

SEQ ID NO: 13354 - DNA, 1620 bp, Oryza sativa
  Clone ID: TFbOSC900169j.C1.o23.gm
atgggtacttcggggaggcagtgggcattgtgtggtggtgaagggaataagaaggtgggaatgtggtgtaaggaatggcaacttcaaaggacgttcgtggagctatttcttggaattaaagcatcttctcagtatccaaaagcacctcctcatgtttatgccgtggaaagtaagggccttgatgagaatcgacaggtgtatcttattagcagcatccagaacaaggcaagagaactttcctgctacccgatgcttgtgacgctgtgtgaggaagctgtggagatgctctcaaatatgaatcatccagctggggattgcccactttgtctatatcctttagtcaaagagaatgatggttctgctttgccatttatgaagttgatgtcgtgctaccactgcttccacagtgactgcattatgagatggtgggaatggctacagaatgatgatactgactcgaagaagagtagtacagcagcaactactgaagtttgccgcaaagtgtttgatgagaaggatattgagcatgttcgtgatctgctaggtgcaaatacttctcaactgacaccacaacttcaacctcaggaacggagccactcaaccagacaaacagcactggtggtaccaccaagcacaacagcagttcaggtcatcgaaggagacatcgatctcatgcttcaagaagacaaccacatgggcaagggcaacctgctaggcaacaatggcagaggaaaggcggagacacttcacaccaatagcaggaaaggaaagaagttattatcatcactgctagttgtggtgtcgaccaccctgaccttgaagcataccgctgccagcaccagcagcctagctttcgcggcgttgcccggctgcccagacaagtgcggcaatgtcagcatgccgtatccttttggcaccatagatggctgcttccggggaccacccttccgcgtctactgcgaagacgaccatgcggtttatctccaggagcacaagaagttgaaggtcttgcgattcgagctggcccagggcgaggttctcatccagaagcgcatagcaacaagctgcggcgtcaacctcaccggtaaagccgtcggcattccatgggtagtgcacgatggtggcttagcagatgactatccctatctgacaatctctaccaagaaccagtttgcagtagtcgggtgtggtatcacagcgatcatcgttggtcagggagagaaccagcctgattacacggtcggatgccgatcattctgtgatgatgtcgatagcaatattgtcgaagataatagcacgcaatgcaatggcaacacgggctgctgccaggcttccatcccaggtaatctcaaggctttccagccctcattcttaaaaataagcggtgtgaactactccggcgtcccgtgtgtctacgctttcgtcgtggagcagaactggttcaaattcaagacctcatatgccaaatcgatggaactttattcaaagtatcgaaataagggcaccggggttcctctagtgctcgacttggttgttgacctagccgctcagggtacctttgcaactgctctcaaggttatgaaggaaatccctacctacatggaggctgccaaggtttaa

SEQ ID NO: 13355 - DNA, 1497 bp, Oryza sativa
  Clone ID: TFbOSC400138j.C1.o14.fg
atggcgacactccccatcttctcgcaccgcaatcccagacgagagggggaagcaacaggatgcttccccacatcctccctcctcgcaatcgtggacaaagaggatgagcaacagtcaggaggagaaagaggagtagtcgtcggaaggtgccttgaggtgtttgttcttgcaagggagttctgcgaacaagcttatggctcgtcgattacttacggctacgaaaggccccatggggccagcacggctagccgggagtggtcctcgattgggcggagcgatccgctctggcggactaacgctggcttttcgccgccgctgtcgaggaggtgggagtaccgcatcaattctgaggggctgtcgtatggctcccagggtgacagcggggctgctgcgcactacggttcgtcgctatcctcgaatagtaaagagcctagtaggagctgggagaggagtgatgttccaccggatcatcatcgttactccacctcggaaggtgccatttcgtattttaacagtccggatgttaccttccagaaccaccatattatgcttcctatgctgcaggattctggcattgatgaatacatgcgagtctcggtggctgagccaattggtgcattgttattgtcagaggggatatctggacagcaaaacagtggtggttccacttcctctcgctctgatggaagtgaatatgatattgtaccaaaatcatattcctctaccccacgcaacttcccaagtcgtcgatcattcctgtcaaagccaatccatccgctctcgtttccagagcatgcactagaagggcaagaaactgatagccctgttgccaatgcaagcaccagcagtcctatgccctcggagttcaaggcaataggggagatccgcccgtcaggtctgatggactacgcctacgccagtggcagtcatggggagtcagcaaactggagtgccgcaagtagcatggatcttaccgatttatcagaacgacatgatgctgaacgctctggaccactgcgttccaataacataatggatagaacaaggtgcgacctttgcgagaggctcttgtccaagagatcgccctggggctcccgccgaatcgtccgtactggagatctgcctgttgctggtgtgcttccctgctgccatgtctaccatgccgagtgcttggagcgaaccactcccaaggggcagaagcatgaccctccttgccctgcctgcgataggctgtccggcaaagacaccgagcagtggtcgatctgcaggctaagaaacggattcccgaggctaaggtcacttggggaaggcccttccagggtctggagctgtgcccaagctggagactgcgtggctggcgctgtccagataccaagagcaagcagcatctctctgctgagccggagtggccacaagaggcatcatgctgcttccaagggagaatccggcaaagactgggctgagacatcatcatcatcaagaactgcctgcatgtag

SEQ ID NO: 13356 - DNA, 672 bp, Oryza sativa
  Clone ID: TFbOSC401130j.C1.o67.fg
atggttcaactcgacgccgacgacgcgaacagcggtagcgccgcctccgccacccacagccacgccattggcgacatgcctcaaccggacgcgagcagccgcacaagcgccgacgaggatgatcacggccacaacgttggcatagacgacatcgacgacgccggagacaacggtagcatcggctccgactccgacgtccccagctgcgcggtgtgcacggagcccctcgagtgggcggcggtcggcccgtgcggccaccgcgccgtgtgctccgcgtgcgcggcccgcgtccgctcggcgcccaaccccgacaaccggtgctgcatctgcaggacgatctgccccttcgtcgtcgtcaccaaggccgcagcgggagtcgtctccttctcgacgttgccggcggtggccagccacgacgacgggagggtcggggagtactggtactgcgccgccgtgtcggcctacttcgacgacgagcagcagtacgaggcggccaaggcggtggcctcgcggcgccatggtgatcagccggcgatggtacaccgagccgtgcacggtgtcggttcacccaaagccccaacaatgcaaattgcactcagggtttacaaaacacatagtcacatagagattggcccggatttcacggaacctggatttcctgtaatggagtaa

SEQ ID NO: 13357 - DNA, 1725 bp, Oryza sativa
  Clone ID: TFbOSC408625j.C1.o6.fg
atgctgcggcggccgctcgccggagctccgcccgcactcgccgtcggcacctctctctccgacgaaggccaagtgagcagcggctcgctcgtcgcggccgtggaaattaccatgatgacgccgggatcgtcctcgacttcggtgccgggagatgaggccgacgccggcaactgggatgcgggggtggagacggcggcgcggctggaggcgatggttcatgcggaggacgaactctcggaggagcagattcaagccaacaaccagacacaggaagatgagctgctggcactacaggccatctatggtgatgatttggttatcttcgacaataaggacggccttcgatttttccagatttctctgcactatcaactcgccggtgacatccgagtttacctgaatgtctgccccaacgggagaacagaaaccggagcagaaaacgacgacgacgacgacagtgaccgactcttgtatgcttgcagcctgcagcatctgcctcctgttgtgctagcctgcctactaccacgtttatatccgagtcaccgtgccccctacttcgtggtcgccgcgaagtggctggacgagccggaagtttcaagcttctgctctgttcttgatgagatctgggcagagcagcctgcagggcaagaggtggtgtacaaatgggtggactggctgagcacctcttcctggttttgcattgcttcagatgatcagattgtatttggaccagatgcagactcggctggtggtgatgaccgggcaatcggaagaagctgctcccttgattctatgatccctctaattcaacgttacagcaaggagagatcacatgaaattttcgctcgaagaatccatgagtgcggagtctgtctcagtgaaaatacaggcagaaacttcatacagctcccatgcagccactccttctgcgtcaagtgcatggagacgcagtgcaggatccacgtgaaggaagggagcgtggcgaggctgacatgcccggacacgtcgtgccgccggccgctgccgccggcgctgctgaggggcctcctcggcgacggcgagtacgcgcggtgcagcgccgcgtgcgtggcggccggcgacgacgcccagtgctcgaggtgcttcttcaccttctgcgccgtctgccgggagcggcgccacgtcggggacacctgcgtctccccgaaccagatgctcgacatcatgctggaacggcagaaggagaagaggccgttggcggcgccgtcgccggacagccaggcggtgtcgtcgaagaggaagatggaggagcttctgagcctccgcgaggtgatgcgcacgtcgaggcagtgcccgtcgtgcaagatggccgtgtccaagacggccggctgcaacaagatggtgtgtagcaactgcggccgccccttctgctaccgctgcagcagggccatcaccggctacgagcacttcgctggggagtgcaagctgttcgagagcgtcggcaaggggtggttcccggggcaggcgatgtggatgaacctcgaatacgactacgacgagatcgccgagatcgggacgccctcgtggatacgggctatcaggtatccctgccctacctgcggcgccaagcgcaccaagtcgggcaacaatgaccttctaacgtgcagaggatgccgaacccattactgcgcgctgtgctcgaagaaggtatggagcatcgccgagcactatgggccagcagaatga

SEQ ID NO: 13358 - DNA, 1032 bp, Oryza sativa
  Clone ID: TFbOSC401405j.C1.o1.fg
atggacggggagatgttcgggagtggccactggggtggttccttcccctacgcctccattcccaaggagagccagttcgtgtttgatgccaaggcctcgccgctgcagctgcagctcttcgggagcgccgcagttcctgcggtaggaagtactggttattataactacattgcaaacaaccacctctctgctatgaatcaagaaagaaatacaaacaacgatgttggtcatgaaaagcaactcaatcttcagatgtccctgaactactttcctgttgaaaatcttgatcggttagcacgtattggtaatccaagtgctgtatcaactgggctaagactgtcctatgagaacaatgagcacacttcaatcacatctggcagtggtaacatgtcatcattgcctatcatggcatcctttgttgatgaagtgatggctgaattagacaaagaaaacaaagagttcaactgttatttcggacttcaggtggaacaattggttaagtgcatgaaagatgtaaagcagaggcagatggttgaatttcttgcatcccttgaacgaggagtaggaaagaagctgaaggagaaagaactcgaggtggaggccatgaacaggaagagcaaggaactgaacgaacagatcaggcaggttgcattggaagtccagtcatggcagtcggtagcactgcacaaccagtctgtcgctaacagcatgaaaagcaagctcatgcagatggtagcccatagcagcaatctcaccagggaaggctctggcgacagcgaagtggacaacacagcttccagtcagaatgtcaatgctgtgcctggggttttcttccagtcaggcctcctcggcatcaacagcatggctgatggtgggctgggagcatgcaggttgtgcagaatgaaggaggcagcggtgctggtgatgccgtgtcgacacctctgcttgtgtgctgattgcgagaaaaatgctgacgtgtgccctgtctgccgcttccccaagagttgcagcgttgagatcaacatgtcatag

SEQ ID NO: 13359 - DNA, 4089 bp, Oryza sativa
  Clone ID: TFbOSC400522j.C1.o7.fg
atgaagagcaatgcctctcctgagcctgatgggatgaatgtagccttcttcaaggcggcgtggggatggataaaagatgacgtcatgaagctcgttgaagacttctataacacaggtaatcttcccaaagaactgaacaaaaccaatattgtcctcattcctaagaaaaacaggccagctaaccctgcagatttcaagtccattagtctttgtaatgtgatgtacaaaatcattgccaaatccattgcaaacataatcaaaggttttctgctgaaaattgatctctccaaagcttttgatagattggaatgggatttcattgcttctgctatgaaaaagaagggctttcactctaatttcatcaatttggttcagggttgcatcagctcctcttccttttatgtgacctttaatggtcaatcttatgatgctttcaatgctaatagaggtgttagacagggttgtcctctttctccttatctgttcgtgttggctcttaatgagctttctgatcagcttaatgaggatctccttaataatcagatgaaaggcattaaacttagccctcaggggccggccattcactctctcctttatgcagatgatttaatcattacaggtgaagctactgagatcgaagcaagaaaaatcaaagaaatcattgaggatttttgcaacaaatcaggccaaactcccaactggagtaaatctgccatccttttcagcaaatccactcctctttacatccagaattccatcaaaaccatcttccatgttgcttctgttgattccaataccaaacatttgggccatcccctctttgtcactaatagaacaaaaatttttgtctaccaattcattgtggataaattcaaagccaagcttactaatctaaaggctaacaaactttcccatgctggtaggcttaccttaatcaaaactgtttttgcctcccttcctgtttattacatggctaccaccctccttcccaaaaagatcattgccaaactcacttctatcatcagaatcttctggtggacaggagtgagggagggtcaggacaagaagcctctctgccttaaatcctggtctgatatttgcaaacctgttcaggatggtggtttaggtataagagatattcagatggcgaacaggagcctgattctaaatgctgcctggagactagtcagtaagcttgatgagccggtatctcaaatcctgaaagcggggatgtaccagtggcgcaagttcgagttcttcgaggagaaggcggccgggcggggcgtgcccggcgagatcgcctcccgcgtcagctgctgctccggcggccgcggccgcgtcgccgtcggctgcgacgacggcacggtggggctccttgaccgcgggttccgcctctcctacggcttccaggcctacgcctcctccgtcctcttcctccagcagctcaagcaaaggaatgttcttatcacggttggcgatgatgatcagccatcttcactatcgtcagcaatctgtctaaaagttttcgatcttgataaagtacaagaagaaggttcaagtacaacaagtcctttctgtgttcaaattttgcgcatcttcactaagcaatttcctcaggcaaagattacatcttttgtggttctagaagaagcacctcctatactgctaattgcgattggactggacaatggttccatttattgcatcaaaggtgacatcgcacgtgagcgtatcacgcgattcatgttgcaagtcgaggatggcaccagtttacctattactggtcttggtttccgagttgaggggcaagcacaccagttatttgctgtaactcctagttcaataaccttgtttagcttgcatgatcatccaccgaggaggcaaacgcttgatcagattggttgtgagaccaatgctgtggcgatgagtgaccgcatggatctgattattggtagacctgaagctgtgtatttctatgaaattgatggtagaggtccttgctgggcctttgatggtgagaaaaagtttgttggatggtttcggggctatttactatgcattattgaagatcagaggagccggaagaatactcttaatgtatatgatcttaagaatcggttgattgcacatagcatgccagtgggggatgtttcacacttggtctctgagtggggatatattattctgataatgagcgataaaaagattctttgcattggagagaaagatatggagagtaagcttgatatgttgtttaagaaaaatctgtatacagtcgcaatcaatcttgtacaaagtcaacaggccgatcctgcttcaactgctgaggttctaaggaagtatggtgaccatctctatggaaaacaggaatatgatgaggccatgtcccaatatatccacaccattggccatcttgaaccatcatatgttatacagaagttccttgatgcaaaacgcatctacaatctcacaaactatttagagaagttacatgatcgagggttagcatccaaagaccacaccacccttctgttgaattgctatactaaactgaaagatgtggagaagcttaaccatttcatcaaagatgaagatggggtaggtgaaatcaagtttgatgtggaaactgccataagagtatgtcgtgcagctggatatcatgagcatgctatgtttgttgccaaaaaggctgggaggcatgagttgtatttgaaaattttactggaggatcttggtagatatgatgaggcactgcagtatatatctagccttgaggcgaatcaagcaggtcttactgtaaaagagtatgggaaaattcttgtggagcatagacctgctgaaacagttgaaatactgttgagactctgtacagatggtggagatcctatgacaagaagaggttcaaatagcatgcatttgcttatgataccttctccaatggactttgtaaacatatttgtacacagcccgaaacatctcatggaatttctagagaattataccaaagcagtaaaggactcacctgctcaaacagaaattcataacacccttctggagttatatatatcaaaagatttaagtttcccttctatgtcacaagaaaatggctttgaggagcagaatagtaaggaaagaaaaggtaaagaagttgcaaatggctataaatctggcccaagggagaaaggaaatctgggaaaggaagatatgaatgtcgcaaaggatattgttgataggcaaaggaaagggcttgcattgctcaagtctgcatggacatctgagatggatgatcctctgtatgatgttgatcttgctcttatcatctgtaatgcaaatgcattcaaagatgggctattgtttctgtatgagaaactaaaactattcaaagaagttattagttgctacaagcaagctcatgatcacgagggtctaattgcctgctgtaagaagctaggagattcatctcaaggtggggatccatctctttggggtgatctgttgaaatattttagtgagcttggggaagattgctctaaagaggtcaaggaggtattgacctatattgaaaaggaggatgttttgcctcctattgttgtgctagagacattgtcgaaaaacccatgcttgacactgtcagttgtcaaggattacattgcccgcaaacttgagcaagaatcaaagctaatcgaagaagataggaaatctattgacaagtaccaggatgagacagaactgatgaaaagggagatagaagacctcaagacaaacgcaaaggtctttcagcttagcaagtgtacgacgtgcacctttacgcttgaccttcctgcggtccacttcatgtgcatgcactccttccaccttcgctgccttggggacaatgagaaagaatgcccagaatgtgctcccgaatatagatctgtcatggaggcaaagcagaagctagaacataacgctagagaccatgatctcttcttcaggcagctgaggggttcaaaggatggcttctctgtcgtcgcagactattttagcaagggcattgttaccatggtaatggtatttctccttgctgttcttgcaataatacgcaattga

SEQ ID NO: 13360 - DNA, 2450 bp, Oryza sativa
  Clone ID: TFbOSC406019j.C1.o5.gm
atgccgggaacggttttcgttgtctcacgtgagtcgtgcttctcggcagccattcaaatggtcacggagatcactggtgccgcggggtggaagggcacggatctcagcttgtgcgttgagaaaaacccagcaagcttgcaaggacaagatttagccgcactaggatcctcctcgggcttggatgtcgtcgacgttccgttctccgctcctacgggaggatccttcgacatggagtcgtccgaggttgtagccacggcgttctcgcttccggtcaatgatggaccagtcgagaccggcactgtggaatccgactattggcgacgtgataattctcttaagggcataccaaatttcaatgttaacaagtgcggccacttcttccatgcgggatgcatcgaccgttggctccgcaagtatcggcggtgcccgctgtgccgcggcgggctgtcgtcattgccgctgcttccgaaacctgacttcgtggcgtcgtatttgttgttcattgagacctactacgtgttcctccagtccggcggcggcggcgcgttccaggctgtggtgtacaaatcggcagggcagcaggaccggtgctacctcgccatggtgcgcgcgccgtccaagatcagatatggcagcgggcatgtaattcggagccaaaaccccgctggcaaaaatggtaccccaggtggagggggcgatatggaaagtcgggaatggatgtatcattggccgaggtttttgtctccatatagaaacgaagtggctaaatttattggtattgccaaggttcgcgctgagaagaacaatatgaggaagataatttgtccgtgtgctgactgtaagaatgaaatagcctgggactttgatgatgcttttaaagtgaaggagcacttagtaactcgcggatttatggacaagtacgaaatatggacacgtcatggcgaagaacaagtagacgagcctgaaaatgtagttccgacacaagttgaagacatggtgcatgacgatggttctgttgaggacaaaatcgacctagaggaaatgttacgtcatgcagaacccgaggtgctgatggggtcggcaagagggctaaataactttgaagctttacagaaggcagcaaaggaagttttgtacgataagtcgaagggctgtgacagtgatttcacaacactccgaaaatgctaccgaggcctaactcactaccatccagcacatatcaagcaaagaaactcatatgccccctttcacttgggaccccgtcagcctggtattgatatagacgtatttcttgaaccattgttggaagatatggccgatttatggaaagagggattgaaagtgtgggacgagtacttaggggaatacttcacagtgaaggcaatcatcttcgtgaccattaacgattatccagcaatgttttcagtttcaggtcaaattaaaggtaaaacaggatgtgtgatctgcttgaatggaacgtactataggtatctcccgggttccaacaagcttatgtacatgcggcaccggcagttcctacgcacaaatcacaagtaccataagatgaaggcggagttcgatggtactgaagagactgatcctgcaccaaaacctacatcgggagaaaatgtgtgtgcaatgacagagaaaattgtttgcgagtttggaaaaatgactaagaaaccatcaaaggggacaaagtacaagaaacccgagaagaatacgaagggaggggaaagtaagaaacaagatgacagttcgaagccagatgataaactccctcccccattcaagaagcattccatattttttaagtacctcccgtactggaaagatctggaggttcggcatgccatagacgtcatgcatctagagaagaatgtgtttgacaacatagttggaacattgttggacatgccgaagaagactaaagatggtctgcaatcaaggatggacctagtcgagatgggaatcagggaagaattacaccctcaagaaggagaaaagaatggcaaaatggttgcgcttggcccattgtacctccatcaaatgtggtcatacgagcgttacatggtggttctgaagggttacgtccgaaatcgtgcacatccagagggatcaatggttgagggttatagtactgaagaggttgtcgacggtgtctgtgtggaggcaattgatgaagccgaggaaaaacaatcatacttcgggtttattgaagaaatatgggaaattgactatgagcacacaatgcaattccccatatgtaagtgccagtgggtaaaatacccgaacggggtaaatgttgataagttcggtcttactgttgttgaccttgcgagagtgggtcacaaggatgatccttggaagattaagaatgtcgagacatctactcagaagaccgtgaagccttacatgcgcacggacggtgtgggcaaaaatgttaaagg

SEQ ID NO: 13361 - DNA, 2334 bp, Oryza sativa
  Clone ID: TFbOSC900035j.C1.o3.gm
atggcccccgatgtcctgggccagtgcacggatctcagcttgtgcgttgagaaaaacccagcaagcttgcaaggacaagatttagccgcactaggatcctcctcgggcttggatgtcgtcgacgttccgttctccgctcctacgggaggatccttcgacatggagtcgtccgaggttgtagccacggcgttctcgcttccggtcaatgatggaccagtcgagaccggcactgtggaatccgactattggcgacgtgataattctcttaagggcataccaaatttcaatgttaacaagtgcggccacttcttccatgcgggatgcatcgaccgttggctccgcaagtatcggcggtgcccgctgtgccgcggcgggctgtcgtcattgccgctgcttccgaaacctgacttcgtggcgtcgtatttgttgttcattgagacctactacgtgttcctccagtccggcggcggcggcgcgttccaggctgtggtgtacaaatcggcagggcagcaggaccggtgctacctcgccatggtgcgcgcgccgtccaagatcagatatggcagtaatatatgtgagcaggttacgtcgtgcgcctgcaaagatcaatcttcgcaggcgacgcttatatggcccgcctgcgaagatatggaaagtcgggaatggatgtatcattggccgaggtttttgtctccatatagaaacgaagtggctaaatttattggtattgccaaggttcgcgctgagaagaacaatatgaggaagataatttgtccgtgtgctgactgtaagaatgaaatagcctgggactttgatgatgcttttaaagtgaaggagcacttagtaactcgcggatttatggacaagtacgaaatatggacacgtcatggcgaagaacaagtagacgagcctgaaaatgtagttccgacacaagttgaagacatggtgcatgacgatggttctgttgaggacaaaatcgacctagaggaaatgttacgtcatgcagaacccgaggtgctgatggggtcggcaagagggctaaataactttgaagctttacagaaggcagcaaaggaagttttgtacgataagtcgaagggctgtgacagtgatttcacaacactccgaaaatgctaccgaggcctaactcactaccatccagcacatatcaagcaaagaaactcatatgccccctttcacttgggaccccgtcagcctggtattgatatagacgtatttcttgaaccattgttggaagatatggccgatttatggaaagagggattgaaagtgtgggacgagtacttaggggaatacttcacagtgaaggcaatcatcttcgtgaccattaacgattatccagcaatgttttcagtttcaggtcaaattaaaggtaaaacaggatgtgtgatctgcttgaatggaacgtactataggtatctcccgggttccaacaagcttatgtacatgcggcaccggcagttcctacgcacaaatcacaagtaccataagatgaaggcggagttcgatggtactgaagagactgatcctgcaccaaaacctacatcgggagaaaatgtgtgtgcaatgacagagaaaattgtttgcgagtttggaaaaatgactaagaaaccatcaaaggggacaaagtacaagaaacccgagaagaatacgaagggaggggaaagtaagaaacaagatgacagttcgaagccagatgataaactccctcccccattcaagaagcattccatattttttaagtacctcccgtactggaaagatctggaggttcggcatgccatagacgtcatgcatctagagaagaatgtgtttgacaacatagttggaacattgttggacatgccgaagaagactaaagatggtctgcaatcaaggatggacctagtcgagatgggaatcagggaagaattacaccctcaagaaggagaaaagaatggcaaaatggttgcgcttggcccattgtacctccatcaaatgtggtcatacgagcgttacatggtggttctgaagggttacgtccgaaatcgtgcacatccagagggatcaatggttgagggttatagtactgaagaggttgtcgacggtgtctgtgtggaggcaattgatgaagccgaggaaaaacaatcatacttcgggtttattgaagaaatatgggaaattgactatgagcacacaatgcaattccccatatgtaagtgccagtgggtaaaatacccgaacgggaagattaagaatgtcgagacatctactcagaagaccgtgaagccttacatgcgcacggacggtgtgggcaaaaatgttaaagggtaa

SEQ ID NO: 13362 - DNA, 452 bp, Oryza sativa
  Clone ID: TFbOSC900254j.C1.o3.gp
tgtaaatgcgattttttctttttttggttgctattccgagaaggttttatacacaaagctcacaaaaagtgctacacccgtaggagcactctcttgctgcgaggtatttacacggtacaggcacaaaccgcccgaaacggaaaaaaaagggacaaagtgaggggtgaaagtgcaaaaaaggcaaagagctctctctctagtttcctacgcccacacggggaggccacccggagacggtggcgcgtagccggcgcggggcggctcgtcggagaatcgaatcgagtcgaatcgaatccactcgctaagtccgggccaaggcggcggcggcggccggcggcgaggaggagtcggcgaggaggcgggagcggcagagcgggcaggtggcgtggtcgtagtcaagccatgtctcgaggcaggcgcggtggaagatgtgaccgcaggggaggcggttc

SEQ ID NO: 13363 - DNA, 1815 bp, Oryza sativa
  Clone ID: TFbOSC401130j.C1.o106.gm
atggcgaagagcgggcgacgggcgtggtgggggcgggcgtggcaggagcgcggcgtcgcggcggagggagtcgcactcgacgcggagggcgtcctggcgggagcggagggcggtgctaagaaggcggcgacggcggtccgggcgaagaaggcggcggcgtcggcggtggttcgggcagctgtatgtgatgaagacgccgccgttgaagcactcggcgcgggcgcagccgatcctggtgaagttgagcctaactatgaagacaaagtggctgcacttgtggaagtcaacaccggcggtgcagttgtcggtgtccctgtcgtacaagtgccgcttgggcaatctctgcctccaccgccggactcccaggcaactgaggcaagctccgcctctgccgctagccacgcgggcgatctccgcctccgcaaccggacttccggacgagctccgcctccgccgccggtagacacgaattggagcgcggccgagcacgatcacatcgccatagacatcggcgacagcacggccggctccgactccgacgacgtcccgagctgcgtggtgtgcacggagcccatcgagtgggtggcggtcggcccgtgcggccaccgcgtcgtctgctccccgtgcgcggcccgcctccgctccggacccaaccccgaccaccggtgctgcgtctgcaggacgctctgctccaccgtcgtcatcaccaaggcggcgacggccgcccacagcgtattcaccttctcagatcagtcgtcgatgccggtggccgccgcccaagacgacgggcggccggtgggtgcgtactggtgcagcgctgccatgtcggcctacttcgacgacaagaagcattacgatcaggtgaccaagcaggtggtggtggcagctgctgatcgctgtttcctgagaacgccgccgcggcggccggacgtggacgcgtcgccgctacgccgcctgtgcgtacgcatgtcgtggcgtggacatgtgctggcgctcctagttgttgtacttgtcactgcactcgtcggaggatgggtggggtatcttacctcaggggatgaaatgatgagcgacaggataggcattgtggcaggaattgccgctctatggggtgcacttgcagccgtcgtttacgtctacaccgttacgccaatctcgactggcccagttactatcgggaacgagaacggcacagttacgacttcgagaaacgacatcccgccgacaattcctcccacgcaagtggagaacggctgccacttcctcatatccaacaaccacgagttcaatctcagtgtgttgccaaggaacgagacggagcaacaacctcagatcggatccggccagaacgcccacccagcaactacaagcgctcgacacaatatcgagagaaagccctttcgtgccgccgctgggacgagggcatgcggcagcggcgcgggcccgtggcggcggcacgattggggctccggcacgcggtggcgaggcgtggcactgacagatagggtgatgtcgcgggcacggccatgcggcggcgggacgcgcgtggctgacgccgtggtggccgacgaggggtggccatgcggcggtggcatggccctgcgtgggcttggtggccgggtgaggttacaacgccgcacggcggcttacaagagatcacaactcaacaatgagtacggccggcgtggcgtggcagccgatggcagcgccgcggggcagccgaggcaggtgcggcgcggcgcgacgggcatcgacgtggtgcagccaggccacagtgactgtcggggagcggccgtgcgacggcgtagacactag

SEQ ID NO: 13364 - DNA, 927 bp, Oryza sativa
  Clone ID: TFbOSC411383j.C1.o3.fg
atggccccaggaagcagcattgtgaccgatatccctgagtcggattgtgtatctgatgggctctctgaggcactcactggcattaggcttgatggagattctacatgcaagccctggtctacatcacttgtcacagttgagctatcatcgctgacgggcttgaatgatttgctcgagtgtccagtctgcacaaactcaatgcgcccacctatactgcagtgcccaaatggtcacacaatatgctctaactgcaagcatagggtggagaatcattgccctacttgtcgccaagaactgggtaatatcagatgtttggctcttgagaaggtggctgagtcacttcagcttccatgcaaatatcaaagcctaggctgtgctgagattcatccttaccaaaacaaacttaagcatgaggagctctgcaggttcaggccatatagttgtccatatgcaggttcagaatgcctgattgctggcgatgttccgatgcttgtctctcatctcataaacgaccataaggtggacttgcatgaaggctgcacctttaaccaccgttatgtgaagtccaacccttatgaagtggaaaacgctacatggatgctgacggttttcaagtgttttggacagcacttctgcctgcattttgaggcattcctgctggggatggcaccagtgtacatggcgttcctgaggttcatgggcgaggacagcgaggcccggaacttctgctacagcctggaggtgggcgggaacgggcggaagctgacatggcagggcatcccccggagcatcagggacagccacaagaaggtccgggacagcttcgacggcctcatcatccaccggaacatggccctcttcttctccggcggcaacaggcaggagctcaagctgcgggttaccggccgcatctggaaggagcaatga

SEQ ID NO: 13365 - DNA, 1206 bp, Oryza sativa
  Clone ID: TFbOSC400186j.C1.o9.fg
atggccgtgcaggcgcagtacgtcgcccacgcctcccgctcctcctcctccgcggcgtacgccatcaggccggctctggagaacgcggcgccgagcagcggcgcatcggcgttgttcctggacgaggccgtctcagcggcgctgctacagcagcagcttgttgttgctgctgcggcggtgggcggcggcggcaacaacaacaacacggcggtgttcagtgacctgcgaagcgagcttacttgtagccagcgccgctttgacgacttcggcggcggcttcgtgccgcggaagcgcgcgcgggttggcggcgagggagaggcggcggcgggtctgttgatgagcagcagcgtcatggagggcggcgggcaccgcgcgctgttgccgccgccaccgccgcaggtgacgccgcaggcgttcggggacgtgcacaagagtagcagcagggtcgtcggctccggcgcggcgtccaccagcggccgccctgtctgcggtggtggcctcctgttgtcgcatctctaccgccagagcgtcgaggtcgacgcgctcgtccgcttcgaggtgcgcgccaccgatcgcgcatttatttatcgccatgggcgctggagctccgtgtcgttttgtctgctctcctctctcgaatgggcgtttgactcgatctgcacctacctacagaatgagaggctgcgcgccgggctggaggaggcgcggcgccggcacctgcgggcggtggtgtcggcggtggatcgcgccgccgcgcggcggctgcacgccgcggaggccgagctggagcgcgccctggggcggaacgcggagctcgacgagaggctccgccagatgggcgcggaggggcaggcgtggctgggcatcgccaagagccacgaggccgccgccgcgggcctccgcgccacgctcgaccagctcctccagtcgccctgcgccgccgccgccgccgccgccgagggcgagggcgatgccgaggacgcgcagtcgtgctgcttcgtgcaggcgcccgacggaggcgcagccgaggtgtccggcggcgggaacgggaggagggcgtgcagggcctgcggcgaggcggacgcgtgcgtgctgctgctgccgtgccggcacctctgcctgtgccgcggctgcgaggccgccgccgacgcgtgccccgtctgcgcggccaccaagaacgcctcgctccacgtcctcctcccctga

SEQ ID NO: 13366 - DNA, 819 bp, Oryza sativa
  Clone ID: TFbOSC900178j.C1.o15.fg
atgacgagcgcctccgagctcttcaccgcccgccgcgcccgcgccgcccgcctctccgaccccgatccggacccggatccgcctgcggacgcgctccatgacccgcacggcctcgccgatcgccgcggccggcgccggggctgccgcccgcgccgccagctcgacgccgccggggacgtccgccagcacctgcacaccggggccccgccctcccgccgccgcgcttcgtacaccgatcgtgtcttatcatacatagacaatagcaacattggggactctgcaactaggaggaaccgactggataggctgatgttcagaacaaatgagcggcttcctggtgctgtactgcaagcacaagcacgtgttctagagagactgagaggcatttctattggttcatctgtgtcaaggccatctatcacattggatgaattttcagctactgatgtgtttagaatcattgacttcgggaacagggatgctccatatgaagcaaataggtccagctcatcattggcccatccaagtagcgagtcagatgaagaaaggtcacccattgacaccagttccttaaaaagatcacgtgggctgagcaaggcggccttccttcggctacagatagagatttttgaggcaagcaaagatgacaacagggaggcatcaccagaatgctcgatttgccttgatggattctatgacggagatgagctcataaagctacgttgtgggcacaggtttcactcgaattgcctggagccatgggtacggaaatgtgctgattgcccatattgtcgaacaaacatacagtcacgatcctga

SEQ ID NO: 13367 - DNA, 465 bp, Oryza sativa
  Clone ID: TFbOSC423123j.C1.o8.fg
atggagagccaggagctctgggcgctgtacgtgggcgtggcgtcgctggccatcgggatgctcggggtgctgggcgtctggctctgctacctgttccaggccgtggcgcgggggccgcctccggacccgccgccgccgccgacgccgccctgcacgccggagacggaggaggacgacaagaacgggctctcggaggaggagctgaggatgctgggcgggatctgcgtggcggtggccggggatggcgaggaagaggaggaggagcagctctgcccgatctgcctcgacggcatggaggccgggcgcgccgtgcgcgtcctccccggatgcagccgcgcctttcaccaggactgcgtcgaccggtggctcaccatctcgccgcgctgccccgtctgcaacgcctgggtcaccacgcagtcgccggggacctcgccgccgcgcaccaagcctgctctgaattcttga

SEQ ID NO: 13368 - DNA, 444 bp, Oryza sativa
  Clone ID: TFbOSC491j.C1.o4.fg
atgccgttctccctgttactcttcaccggcgccgtcgctggagtcgcgatgttggtcctcccttggtggtgcgccgtcggcgaggacgacgacacctacatcgacggcgtcgtcgatgactcttacgactctgattcctggtacacagattatagcgacgaagacgacgacgacgttggcggcgacaataaggacggtttaacgccagaccagctgcggcggctgccgtggttcgcctactgcggcggcggcggcaggagctgcagcatatgcctggaggagatgcgcgacggcgagaggtgccggcggccgggtcgctgccggcacgcattccacgccgcctgcgtcgacgagtggctgacgacgagacgcacctgcccgtgctgccgtgagctcgtcctggtccctccggctgcaaggctagctgctcccacgtatcggtag

SEQ ID NO: 13369 - DNA, 1839 bp, Oryza sativa
  Clone ID: TFbOSC16830j.C1.o4.fg
atgacctcgccgggcgcctcctctttcgccgccgcgctcgtcgtcgaggacttcccgtgggtgaagagggaggaggagatggggatggacccggacaagtaccgcgaggtgttcgacctcgcgcagcgcggtgctcgcgccttccgcgacggccacttcgacgaggcagtttccttttactctaaagcacaaactttgagaccaggagatcccattatccttagcaaccgaagttctgctttctgtatgataagtcaagtgttgagggagagatcagcagctgactcagagtaccaaccattgaatggtcttgatcccacaacgcatgcggaggtagcgctcaaagatgcagagaaggtattagctatcggcagtaattctccaagaccatatcttctcaaggcatatgcgcttatcctgttaatgcttactgttggctgcttgttattgcctcctctaggtgctatgcatgacctgtacatgatattttctcccctcataagaaaactcatccttaagcagcacttcagaaaaccagaaaattgccccatctcgagtgccatcctcttctcaataagagtaaccattgaagttctaacagaagccatcacgcagcgccgccgtcgttgcatcgagctatctatggactggatgcggcggctggggatggggacgaatgatgaggacgaagtgatgggtgctagcctgctaggtttcactttcacctccctcaatgggctgcttagtattggtgacttgacttctcatgtctctctggctagtagttgtacttatgccaatgtccttcaggtgttggagcagtaccatgaggcacgggaggctattctttctgggcttcaagttgatcccctcagccatgtcctgcaaagctggctcagtgatctgcacagaaatacaagtattgcagctcgagcaagacgtccaacattagatagaccagatgattttgagtgcacattatgtttcaagctattgtttgaaccagtcaccactccatgtgggcactcattctgtcgctcttgtttacatcaatcaatggatcatggcaataaatgtcccatgtgtcggacagttctttttattggtccaaaaacatatcctataagtgtaacgctgagcaacataattcagaaaaattttccggaagaatatgctgagaggaagtcagaacatgagactatgacatatgcaggcgttgatttgatgcctctctttgttatggatgttgtactgccttgtcaaaagatggcactgaacatatttgaacctcgctacaggctcatggtaaggaggataatggaagggaatcatcgcatgggaatggttggtattgattctgctacgggtactgtagctgactgtggttgtgaggtggaaattctggagtgtgagccacttccggatggtcgtttttatctagaggtggaaggttcacggcggtttcgtatcttgcgatcatgggaccaagatgggtatagggttgctgaaattgagtggctccaagatatttcattaccagacggatcgcaggagagaaaagatctgatggaaagggctaatgcagcttcagaattggccaggacatatataaggcgagctagagaaatctcaaggcctgcgaggcgagcaagacagacagatcttgagagcatgcctggaccacaggatcctgaaaaatttagtttttggcttgtcaacttaataaatttgaggccgtcagacaggttggatctattgcgccttagtgatactcgagagagaatttctcgtagtcttagattgctgggtgatgcagaacaaatttgtcgtgtacagtaa

SEQ ID NO: 13370 - DNA, 2982 bp, Oryza sativa
  Clone ID: TFbOSC401429j.C1.o3.fg
atggcggacacggggagcctggagaagatggggcgagagctcaagtgccccatctgcctgagccttctcagttcggcggtatccatctcctgcaaccacgtcttctgcaatgattgcctcacggaatcgatgaaatccacgtcgagctgccccgtgtgcaaggtcccgttccgacgacgagaaatgcgaccagcacctcacatggacaatctggtcagcattttcaaaagcatggaggctgcagcaggtaccaatgttgtctcaacacaggaggctcctgtggtaaaacttgcagatggatcagattgtgtcaacagcgggaaaaattccaaaaggtcacaaaaatcattgacacgaaaaaggaaggtaacatccgagatggaaaaaaatacagcaaaggatgctacagcttctgcatcccaacctactacaaagccttccttctctactaacaaaagaatacaagtgaaaccattccctgaatctgagacaccaataagagctgagaagattatgaagcctgaagagccaaaaaataatctgaataatgatgttgaaggaaagaataaagcagtggcatcgggtcaacctggaagtccttcattgtcaccctttttttggctaagggaacaagaagaacaagaaggctgtaccgctgagacgttaagtgaaacgcaatctttagacacacccttgcgtcataatgcaccctcttttagcgatattaaagattctgatgacgaaatccctttaaatacaactccaaatagcaaagctgcggctacagaactctttgacagtgaaatatttgaatggacccagagaccatgctctcctgaattgtattccactccattgaaaaagcagagtaaagctaagagtaaactagatcaaattgaagagaagggtgatgaagaagatgtgcatattggtggttcatttgataagctgggtaatgcaagtaatgcagctcagcttgtcaatacaaaagcaacaaagcagaagagaaagaaaacaagtcccagtaacaaaaacagtgcaaaattgtccaatcgtgctgagccctgcataaaaaagtctgatgccaatcaacaaggttcaaatagacgtaaaagtgctgccctaaaatcttgtcagaaaagcagcagtgctgtagggaggaatacttcaggtagaagaaacaaggcctctagcaacagcaagccaattcatggctctagtgataactccccagagtcatatcttcctaaggagggtttggatgttgaagcacctgacaaacccctttctgaaaggatccaaaacttggagaaaactagtcgacgaaagggaagtgcaaggaagctggaaatggcagggaaaactatttcagatactacagagaagaatagtgagccaagaagtaagagagtcagaagaatgtctgaccacgctatagctaaaccggttgaagttccttcaggatctggaaatgaaacagaaataccacagcttcacaccctcacaaaaggcagcattcaacgcaaatcctccaacgctagaagacatagcaaagtttgtggagaacaggaaggtaagaataaacttgagaacacgacaatgacacctattattttacatgggaaatgccaaaataaagaggcagtatgtacagctccttcagtaaggactgcatctgttaagtacaagcaagcaaaatttagcgaacaaccagattgttttggaacggagaactttggaaaccttcaagcatgccctgcacgtaatgttttactgaagaagtgtgaggtatctactttgaaggtttcctgtgctttctgccagaccgatgtcatcacagaggagtctggagagatggttcattatcaaaatgggaaacaagtccctgcagagttcaatggaggagccaatgtggtgcactctcacaagaactgccttgagtgggctcctgatgtctacttcgaagatgattctgcctttaatcttacaactgaattggcgagaagcagacggatcaaatgtgcttgctgtggaattaaaggagctgcacttggatgctttgagatgagttgtcggagaagtttccacttcacctgtgctaaactaatcccagaatgcagatgggataatgaaaattttgtgatgttatgccctctacatcggtctacaaagttacccaatgaaaattctgaacagcaaaagcaacctaaaaggaaaacaacactcaaaggaataaccggcttttccaggtcatctcaaataggatccaatcaagattgtggtaataactggaaatggccatctggatcaccacagaagtgggttctctgctgctcatcactttctagttctgagaaggaacttgtatcagaatttgcaaagttagctggcgtgcctatttcggcaacttggagtccaaatgttacccatgttattgcatcaactgatctctctggtgcttgcaaacggacgctgaagtttctcatggcaatcttgaatggcagatggattgtctccatagattgggttaaaacttgcatggagtgcatggaaccaattgatgagcacaaatttgaagtcgctactgatgttcatgggatcactgatggtcctaggttaggaagatgcagggttattgacaggcaacctaagctgttcgacagcatgaggttctacctccatggggactacacaaaatcctacagaggctacctgcaagatctcgtggttgcagcaggtggaatagttcttcagaggaagcccgtatcaagagaccagcaaaagcttcttgatgacagctctgacctcctcatcgtttacagcttcgagaatcaagatagggcaaaatccaaggccgaaaccaaggctgctgatcgcaggcaggctgatgctcaggctcttgcttgcgcttctggaggcagagttgtgagcagtgcatgggtgattgactcaattgcagcctgcaatctgcaacctctttga

SEQ ID NO: 13371 - DNA, 2868 bp, Oryza sativa
  Clone ID: TFbOSC900234j.C1.o22.fg
atggcggacacggggagcctggagaagatggggcgagagctcaagtgccccatctgcctgagccttctcagttcggcggtatccatctcctgcaaccacgtcttctgcaatgattgcctcacggaatcgatgaaatccacgtcgagctgccccgtgtgcaaggtcccgttccgacgacgagatggatcagattgtgtcaacagcgggaaaaattccaaaaggtcacaaaaatcattgacacgaaaaaggaaggtaacatccgagatggaaaaaaatacagcaaaggatgctacagcttctgcatcccaacctactacaaagccttccttctctactaacaaaagaatacaagtgaaaccattccctgaatctgagacaccaataagagctgagaagattatgaagcctgaagagccaaaaaataatctgaataatgatgttgaaggaaagaataaagcagtggcatcgggtcaacctggaagtccttcattgtcaccctttttttggctaagggaacaagaagaacaagaaggctgtaccgctgagacgttaagtgaaacgcaatctttagacacacccttgcgtcataatgcaccctcttttagcgatattaaagattctgatgacgaaatccctttaaatacaactccaaatagcaaagctgcggctacagaactctttgacagtgaaatatttgaatggacccagagaccatgctctcctgaattgtattccactccattgaaaaagcagagtaaagctaagagtaaactagatcaaattgaagagaagggtgatgaagaagatgtgcatattggtggttcatttgataagctgggtaatgcaagtaatgcagctcagcttgtcaatacaaaagcaacaaagcagaagagaaagaaaacaagtcccagtaacaaaaacagtgcaaaattgtccaatcgtgctgagccctgcataaaaaagtctgatgccaatcaacaaggttcaaatagacgtaaaagtgctgccctaaaatcttgtcagaaaagcagcagtgctgtagggaggaatacttcaggtagaagaaacaaggcctctagcaacagcaagccaattcatggctctagtgataactccccagagtcatatcttcctaaggagggtttggatgttgaagcacctgacaaacccctttctgaaaggatccaaaacttggagaaaactagtcgacgaaagggaagtgcaaggaagctggaaatggcagggaaaactatttcagatactacagagaagaatagtgagccaagaagtaagagagtcagaagaatgtctgaccacgctatagctaaaccggttgaagttccttcaggatctggaaatgaaacagaaataccacagcttcacaccctcacaaaaggcagcattcaacgcaaatcctccaacgctagaagacatagcaaagtttgtggagaacaggaaggtaagaataaacttgagaacacgacaatgacacctattattttacatgggaaatgccaaaataaagaggcagtatgtacagctccttcagtaaggactgcatctgttaagtacaagcaagcaaaatttagcgaacaaccagattgttttggaacggagaactttggaaaccttcaagcatgccctgcacgtaatgttttactgaagaagtgtgaggtatctactttgaaggtttcctgtgctttctgccagaccgatgtcatcacagaggagtctggagagatggttcattatcaaaatgggaaacaagtccctgcagagttcaatggaggagccaatgtggtgcactctcacaagaactgccttgagtgggctcctgatgtctacttcgaagatgattctgcctttaatcttacaactgaattggcgagaagcagacggatcaaatgtgcttgctgtggaattaaaggagctgcacttggatgctttgagatgagttgtcggagaagtttccacttcacctgtgctaaactaatcccagaatgcagatgggataatgaaaattttgtgatgttatgccctctacatcggtctacaaagttacccaatgaaaattctgaacagcaaaagcaacctaaaaggaaaacaacactcaaaggaataaccggcttttccaggtcatctcaaataggatccaatcaagattgtggtaataactggaaatggccatctggatcaccacagaagtgggttctctgctgctcatcactttctagttctgagaaggaacttgtatcagaatttgcaaagttagctggcgtgcctatttcggcaacttggagtccaaatgttacccatgttattgcatcaactgatctctctggtgcttgcaaacggacgctgaagtttctcatggcaatcttgaatggcagatggattgtctccatagattgggttaaaacttgcatggagtgcatggaaccaattgatgagcacaaatttgaagtcgctactgatgttcatgggatcactgatggtcctaggttaggaagatgcagggttattgacaggcaacctaagctgttcgacagcatgaggttctacctccatggggactacacaaaatcctacagaggctacctgcaagatctcgtggttgcagcaggtggaatagttcttcagaggaagcccgtatcaagagaccagcaaaagcttcttgatgacagctctgacctcctcatcgtttacagcttcgagaatcaagatagggcaaaatccaaggccgaaaccaaggctgctgatcgcaggcaggctgatgctcaggctcttgcttgcgcttctggaggcagagttgtgagcagtgcatgggtgattgactcaattgcagcctgcaatctgcaacctctttga

SEQ ID NO: 13372 - DNA, 708 bp, Oryza sativa
  Clone ID: TFbOSC29125j.C1.o6.gm
atggctcggcgagtgcgcgggcgcgcgcgctggggccacgaggtagtgagggttttaggccgcggcgagcacgtgttggcgcccgtctcaccttcacctaccatgcgtcacttgctgcagtcgtcggagcacctgaccgccgcgacggcgacggcggcggcgtcgggcggccggggcgtccacacggacacgttcctcatcctcgccgccgtgctctgcttcctgctctgcgtcgtcgggctggcgctggtggcgcggtgctcgcggctgtgcaacccgtcgtcgttcgccgtcgaggcggaggaggcaatgcccccggcgccatgcaaggggctcaagaggaaggcgctgctgtcgctgccgaccgtgtcgttcgccgaggcggcggcggcggaggaggaggaggagcggccggagtgcgccatctgcctcgccgagttcgcgcgcggcgacgaggtccgcgtgctcccgccgtgcggccacggcttccacgccgcctgcgtcgacgtctggctcgtgtccacctccacctgcccctcctgccgccgcgccatcgtcgtcctcgcggcgccgtcgcctgcagtcaccgccgccgccaccgaccccccgccgccgtgctgcgccgccgacgcggcacaggcgtcgtcacagccaccgcaacccaccggcgccagcgaccgcggcggctgccggacatcggtgccgtag

SEQ ID NO: 13373 - DNA, 699 bp, Oryza sativa
  Clone ID: TFbOSC407333j.C1.o3.fg
atggatccgtcgggcgccttcttccacgcggctccccggagcggctcgaatgtgtcgctggcgtcgctggcgaggacggccggagggaggaggatgatgcacagggtcttccgcggcgtcatcaccttcatcttcgccatagctggactgtttcttggagcggtgactggcgggctgatcgggctggccaccgagagcggcctcttccgcggcaccggcatcggcgccatcaccggcgccctcgtctccatcgaggtcgtcgactcctccatccgcgtctggcgatcccgccgatccgggatctccagcatctgctatgtgcttaatgtgatctacagcctcctgaccggcaggcttgtccgcgagaaggtcgatccggcggtgcagcgggtggtccggagccagatgaatgcagtggattcatcgcccttcagggagtcccctgacctgttcgagatcgagggcaccaacggcatgccacgggcatccatcgacaagctcccggaggtcaggatcactgaggagtacaggaggaacgccattggtgacctctcgggatgttcagtttgcctccaggatttccagacaggtgagaaggtgaggagcttgccggattgctggcacgtgttccatgtgccgtgcatcgacggctggttgatcaagcatggatcctgcccgttgtgccggaggaagctgtga

SEQ ID NO: 13374 - DNA, 801 bp, Oryza sativa
  Clone ID: TFbOSC422826j.C1.o4.fg
tgcctcgtgcacgtcggcctcgtctgctccgactcccgccgccgcccggcccatgctcggagctccgacgtcgagtccgccgacggtgacgccgcgggcgctgggaccgacagctcggacagcgacgacgacgacgacgagggtagggagcagaggagcagttttgcgaagcgttgtgagtcgataaacacgatggtgtcatttctgtggtggataattgggttctactgggtggtgtctggcggggatgtgctcgagcaagatgctccaaggctgtattggtattgtggccctaaacctgtacccatcactgactactttatgatcgtacaatcaaatgttcacatgctaagtgttgtttttctagcatttgatgtcttcttcgctgtgttttgcgttgctatggcctgcttcatcgggatcgcattgtgctgctgcttgccttgtgtcattgcaattctatatgcactggctggccaggagggtgcatcagatgcggatattggctttcttcccagatatagatattctgatcccagtgaggatggacaaaaaggaactgacgagggagttatgatccctgttctgaataatagcggaacatcaaccagtgaacgtattctccttcatgaggatgctgaatgctgtatctgcctctcatcatatgaggatggagcggagctatctgccctcccttgcaaccatcacttccattggacatgtattaccaaatggctacgcatgcatgcaacctgtccactttgcaagtacaacattcttaaaggcagtgaaagtgcatga

SEQ ID NO: 13375 - DNA, 570 bp, Oryza sativa
  Clone ID: TFbOSC102233j.C1.o1.fg
atggcgagaatgctccttgaggcggccgcctccggctcggtggaggactcactcaactcggacctcgtcgtcatcctcgccgggctgctctgcgcgctcatctgcgtcctcggcctcggcctcgtcgcccggtgcgcgtgcacgcgccgctgggcgcgggccgccggcggcgggacagcggctggcggcggcggcggtggcgccgccgcggcgaacaagggcgtcaagaaggaggtgctgcggtcgctcccgaccgtgacgtacgtctccgacggcggcggcggcgaggcggaggagtgcgccatctgcctcgtggagttcgaggacgggcaggccgtgcgcgtgctgccgcagtgcgaccaccgcttccacgccgcctgcatcgacacgtggctgcgcgcgcactcgtcgtgcccgtcgtgccgccgcgtgctcgtcgccgccgagatgccccccggcgagcggtgcggccgctgcggcgcgcgctccggcggccgcggcatcggcgcgctgctcttgaattactggaaggcgccggcctgcgacgccgaggggccagagttggcgtag

SEQ ID NO: 13376 - DNA, 653 bp, Oryza sativa
  Clone ID: TFbOSC400945j.C1.o17.gm
atggatcgaagacggctacaggcacgagccggcatcgacgaccatcgactggagtcgctgcaccggccgaggctgggggagacgagggaggaggcgtgcgccgtgtgcctgcaggatttcggggagaaagacgaggagctcaggatgatgccgtgctcgcactcgttccatcagcgctgcatcttcggttggcttgcgatcagagacaactgccccgtctgccgctcggcgatgtcctcgtacaacgatgttttggaggagctgcacgctgagctagagcaatggatacaggggacgtacggtgagcgcctccggcgtgtgttgctgccgcagatcgatggaggtggatgcctccgcggtagtcggacgctattaacgcaggaagaagctcatgagatcattcgcgagcgcttgaggtctgacattcgtcgggggcgcatagaactggacgccgacttcttgcagcagcttgttgatcaggttcgcgatcatattcttcagcgtcagcgccgtggcactgccactgccattgccatggatggagtactggaggaggatgcgtacaggaacggtgggttcggcgctgtccccgcgtcgagcaaggccatggtcgaactgcaggaggcgatggcaagcgacgccagggaacgcgg

SEQ ID NO: 13377 - DNA, 354 bp, Oryza sativa
  Clone ID: TFbOSC8676j.C1.o2.gm
atggatcgaagacggctacaggcacgagccggcatcgacgaccatcgactggagtcgctgcaccggccgaggctgggggagacgagggaggaggcgtgcgccgtgtgcctgcaggatttcggggagaaagacgaggagctcaggatgatgccgtgctcgcactcgttccatcagcgctgcatcttcggttggcttgcgatcagagacaactgccccgtctgccgctcggcgatgtcctcgtacaacgatgttttggaggagctgcacgctgagctagagcaatggatacaggagcgtaggacagtgagcacaaagttagtaggggcgcaggccgcagggcagaaattaggatag

SEQ ID NO: 13378 - DNA, 405 bp, Oryza sativa
  Clone ID: TFbOSC964j.C1.o2.fg
atggacgcggaggatttcatggacagctggctcatgtggggcaacatctttttcttcttcctcgccctcgccatcaccgtggaggtcgatctcatccgcctccgccgcaacgacgacggcaataacaagtcggcgcaccagtacgacatgctgatcgagaggctgctgctgctacgacctaaagacgaccaagacaacgagcagtgcgtcatctgtctgtcggagaacgaggacgatgtcgacggcggcggcggcgagcgggggagagggaggatgctgccggggtgcgcgcacgcgtttcacaaggattgcgtcgtcaagtggctgcgcaaccgcacaacatgcccgctctgccgttctgacgtcgccgtcgccgccgccgccgccgcagataacatggtctga

SEQ ID NO: 13379 - DNA, 852 bp, Oryza sativa
  Clone ID: TFbOSC23981j.C1.o3.fg
atgtcaggaggtaggcaatcatactggtgctaccaatgtagacagcgggtgaggccccgcggccaggatatggagtgtccctattgtgattccggttttgtgtctgaaatggatgatgttgatgctctcatgcgccactttgttgggatggatcctgatttccatcgtgatccaagattcggtatcatggaggcaatctctgctgtgatgaggcatggcatggcgggaacgaaccgggaagttgatgtgagaggaaggccaaacatattttctgacctggagatggagtttggctcagggccatggttgctcttccgtggccagcttcctggtcatctctcagaagacaatggttttgatgtattcatcaatggacgccgtggtgttggcatgcgcagagcaaacattgcagactactttgttggacctggactggatgatctgattgagcaattaactcagaatgatcgacgagggccgccacctgccactcaatcatcgattgatgctatgcctactgtgaagattacacagaggcatctcagtggagactcacattgccctgtctgcaaggacaagtttgagctgggatcagaagcaagggagatgccatgcaagcatttataccactctgattgcatagttccttggctggaacagcacaattcctgccctgtttgccgatatgagttgccaccacagagctctactggtgctagctgctcgcgcacaagatcaaccaaccaaagtcagagttcaagtagcaatgggagaaccaatggacgtcaaaggagaaggaatccgttctcgttcctatggcctttccgatcatcaagctctagctctcgttag

SEQ ID NO: 13380 - DNA, 1551 bp, Oryza sativa
  Clone ID: TFbOSC423203j.C1.o5.fg
atgccgatcgcctccaagctcgtctacttccagcgccgccgcccatcgccggcgccgccggagccggagccggagcctcccgaccctcgccgcagcctgccgagccggagccggagcctccgccgcacgccgccgcaagccgctatttcccgttcattctcttttgatggttcctttgctgtggagcttggataccaagtgcgtcgttgtcaacacgttcgcatccttggaggccgcctatttggacttgaagtgtcctcccgtcgctcaaggtcgttagccatggccttcgtccagcgaccgtggctgaccggcggtgctaccgacagaggtgggtgcctggctggacgcctttcccgatggcgccgtcgtcgtcaccgccgcagcgctgccgaaagggttcgaggcggcgacaatggcgtggggacgggcctggtcatccgcgggtgggcgccgcaggtggcgatcccgcgccaccgcgccgtggggtggtccctgatgcactgcggcacgaacacgatgctggaggcgacgtcggcgggcgtcgcgatgctcacgtggcccatggtcgccgaccacttcgtgaacaagattttgctggtggaggccggcgtggcgatgcacctggcggagggcgcggacgccgtgcctgactctgggcagatggcgaaggcgatcgccgccgtggtcggcgacaaggggaagcccttcagggagcgtgcagtggcgcttgcccgcatggctgcagcggcggtagcagagggtgggacttcgtatagggacttggaaagagggaggaaatggggaataagggagaagagacgaagggcaaatgagtccaacgatatttttctccacttcgatctaacgccgttacctcataatgtgacggaagtgctacgggtcgaaggaaaaacgggtcaggaacatgttccaggaagcaaaagagatacctcaaagggtgtcgcatctgctggaaacataacaggacaagcaggcagcacgggctccagctcaaggctaaaccgcagcgtatcagatcatggccggcttcctgattccgttcagcaggctagggaacggctacttcagaggcttaacagcgtggacttatcaggaagaaggcaaaatacatcgttgtcatcagaaaccattcatggtggagtagccccgggcgtctccaccaccgcagatagcatattcagcagtctaaccagttgcttccacactgacgtatcgatcgctccctgcaaactccaagagagcacagctgaaaccttcaacaccgcagataagcatacgttcatcgcgcattgttctgaaccggctcctacacaagaagtagcaagctgcagagtaacagatgatgacgaactcgcgggaccttcaacggagtgctctatatgcctggagagatgtggggatgcagatgggctcctcgagctgcggtgcaagcacatcttccactcggcctgcctcgagcgatggctgcgctctcgcagcgactgcccctactgcagggccagcgtgctcctaacagcagaaggatga

SEQ ID NO: 13381 - DNA, 582 bp, Oryza sativa
  Clone ID: TFbOSC900293j.C1.o3.fg
atggggagcgtgaagaagaaggccacggccatggcgcagaggagcgcccaccacggcaatcgtacctcatccttgaagacggtgcagagcaccagcgcctccgccatggccaacgcggcggctggcgccggcggcgaggacgccgggagacctcaggctcaggttcaggtggcggcggtggaggtgcggtcgtacttcccgttcccgtacgccgccggcccgttccggccctccgcgggcggcggcggcggcggcgtgagcttagggactcatcaggctgatcagccgccggcgccggaggtggtggcggcgcagcagcagctgccgcacttcccgtacgcgccgcggggcggtggcagcgccagcgcgtcgttgtcggtggagtgcgcgatctgcctggagcggctccggcgcggcgagctgtgcagcgagttgccggagtgccgccacgtgttccaccgggactgcgtcgcgctgtggatcaagagcaagagcacgtgcccgctgtgcagggcgcggatctcgccgtggttctcgggatcgatcggagcgccgccgccgccgctcgctgacatggtgtag

SEQ ID NO: 13382 - DNA, 1074 bp, Oryza sativa
  Clone ID: TFbOSC400184j.C1.o5.fg
atgggttcgcgttccggctcgtcgacgacgacgagtacgccgccagtggcgccggatgagaaccggccgccggtggtcaaagggccggcgatcttcagctacacctgcgctggcctcgtcacgggcgtcgcgctcgtcgccgtcgtcgtcttctactgcaaccgccacgtccggaggcgcgcgcatgtcgtcgtcgccggcggcggcgggcgagaggacgacgacgtgcgcagcgtcgctggcgtggcggccaagatcccggagttcgcgtacaccgggtcggcgagcggcggcgagggggcggcgcagtgctcggtgtgcctcggagcggtgcggggcggcgagatggtgcggcggctgccggcgtgcaagcacctgtaccacgtggagtgcatcgacatgtggctggcctcgcacgccacgtgcccgctctgccggacggaggtcgagccgccgccgggggacgacggcggccgacctgcgccggcggcggatgagactccgggcaacggtgatctggaggcgcggattgggggaggcgtggaggcgggcacccaggcggagatcgggggcggcgagggcgcggaggagatcggcgaggaaggcgtcgatagtgacgccggcgggagagatcgccgcgggctggtggacgacctggcgagagatgagagcggccgatgttgccacggaatggatgtggcaaaaagtcatattgcaacactttacatcgtttggcagaggagatttgcgagggcggcggcgagggagcgtctggagaggaggccggcagccgtggctgctgatgaggcgatgcggctacgaggtgaggaggcgacacagggaggagggcgaaggtgtaggatcaatccgatgcgaggtggaggcgcggaggagattggagagggcggcggcgatcgcgggtctggagaggaggccgacgggcgtggaggaggcgacgcggcggcggggcgaggaggcgacgcggcggcggggcgaggaggcgacgcagcggcgtggggaggagatcaatccgagagaggagatgagcgatcgcgtgatgggggaggagattga

SEQ ID NO: 13383 - DNA, 789 bp, Oryza sativa
  Clone ID: TFbOSC900112j.C1.o5.fg
atgcccggcgactcggcgtcgtcgacgctgcagtacacgggcatcggcgcattcgtcgccatcgtcggcatcgtcgtcctggccgtcatcttctacacccgttcgtccgcccgtcacgccgcccccggcgcggcgcccgacgcggtcaccgcgctccaggggcagcagcagcagcgcggcctcggcctcggccccgacgacgtctccgtgctcccgacgttcacgtaccacgccgccgccaccgcctcgcccggccgatgcggcctgatcggacgcggggacgcgaaggcggcggcggactgctgcgccgtctgcctcgacgagctcggcgagggcgccgtcgtgcgcatgctgccgtcgtgcaagcactacttccacgccacctgcgtcgacgtttggctgctgtcgcgggccacgtgcccggtgtgccgggggagcccagggcaggagaaggtccgcctcggcctcgcgtccctctcaccgccgctgccgcagctgcgccggtgcgcgccgtcgccgcccaaggaggccgccgccgccgccgctgccgatacgtcgagagccaacgacgatgactcctccgcagccgcgtcgaggtcgccatccccgataagatcgagcacgcgtttcgacctcgcggccgccgccattgacgccgccgcccgtagtccggcaatgtcgccgtcgccgactcgcccgtggactccggagcgtgtggcgcgggtgtcaaggtcaccgtctcccgtgacgacgacggcgacgaccgatttgcacgtggtcgaagtgtag

SEQ ID NO: 13384 - DNA, 627 bp, Oryza sativa
  Clone ID: TFbOSC34548j.C1.o2.fg
atgtcgtcgtcgccggcgccggtggagtccccgtggctgacgatgcgcgccatgcggcgcgttggcggcgcggacggcggcggcgggcagcggagcgcgctgatggtggcgtcgtacccggtgctgctgctgctcgtcgtcctcgccgcgttcgtcaagtacgtgtggatcgcgctggcgctctacagcgcgctcctgctgctgttctcgtgcgcgtcgcgccgcctggcgctggcggagcggctgccgtcgccgctgggaggaggcggaggaggaggaggagtcgccgcggtcaccgcggcggaggagctccagggcgcggcggcgcggggcggggtgtccggggagacgctggcgtccatcccggcgttcgcgtacgacgcgtccgcgcacggcggcggcggcgaggcggcggcgcagtgcgcggtgtgcctggaggcgctgcgcggcggcgagacggcgcgccggctgccgtcgtgcgcgcacacgttccacgtcgcgtgcatcgacatgtggctgggctcgcacgccacctgtcccgtctgccggcgccgcgtcgagcgcaagcacaagggcggcgtgctgccgccgatgccgccggagccggagacggagccgccggtgtag

SEQ ID NO: 13385 - DNA, 705 bp, Oryza sativa
  Clone ID: TFbOSC401411j.C1.o7.fg
atggcagccaatgttggggaatccacaagtggcagcagcagcggcggtgccgattctgggggaagcttcgagtgcaacatatgctttgagcttccgcaggagcctattgtcacgctctgtggccacctcttctgctggccatgcctctacaagtggctgcacatccactcgcattcacctgagtgcccggtctgcaaggctgttgtcgaggaggataagcttgtccccctctatggccgtggtaaggaccgtgttgacccaaggtcaaagaacgtccctggggctgacattcctaatcgcccagctggacagaggcctgccacggctccgcaggccaatcctaacacccacttccccaatgccaaccccaacccttggttcatgggtggaggcatcccactagccaatgcacggtgggggaattacaccttctcggcggcatttgggggtttgttccccctgctcagcttccaagtccatgggttcccagatgcaaccgcctatgggcagcctgctggttttccctacggatatggacacggccacggtcacggtcatgggcacgcgttccacggcggacatgcccatgctgctgctgctccccgccatggaccgcctgggcaacaacagcaggcggatgtgtacctgaaggcgcttctcatcctggttggttttcttgtgattgcaagcctcatcacattctag

SEQ ID NO: 13386 - DNA, 588 bp, Oryza sativa
  Clone ID: TFbOSC404615j.C1.o8.np
atgtcttgtacctccccagacccgcccgattactgctcggccgcatcgcctgagcttaagctataccaagccttcatcttctccgtgccggttttcttcacgttcgtcttgcttctcttcttctacttgttctacttgcgacggcgcagagcaaactggcagtccttgcgcatgaggactaataacttgatacggggagataaccccagattggagtgcggcataaagaaggagatgcgggaaatgttgcctgttgtggtcttcaaggagagcttcttgatcagggaaacacaatgctctgtctgcttagcagactatcaaccggatgagcggctccagagaatacctccttgtggccataccttccacatcgattgcatcgaccactggctctcgacaaacaccacttgccctctttgtcgagtatccctccttccatcccccaaaaccgccagcattgatccagtggatttggaagcacagaccgttgaagagaacagctctttggatgaaaaaaggtgagtaaactacaggatgaaaggtacacaaaagcgaaatttcccctcatgtcatggtggcaaccaaaaa

SEQ ID NO: 13387 - DNA, 627 bp, Oryza sativa
  Clone ID: TFbOSC900112j.C1.o22.fg
atgtcgtcgtcgccggcgccggtggagtccccgtggctgacgatgcgcgccatgcggcgcgttggcggcgcggacggcggcggcgggcagcggagcgcgctgatggtggcgtcgtacccggtgctgctgctgctcgtcgtcctcgccgcgttcgtcaagtacgtgtggatcgcgctggcgctctacagcgcgctcctgctgctgttctcgtgcgcgtcgcgccgcctggcgctggcggagcggctgccgtcgccgctgggaggaggcggaggaggaggaggagtccccgcggtcaccgcggcggaggagctccagggcgcggcggcgcggggcggggtgtccggggagacgctggcgtccatcccggcgttcgcgtacgacgcgtccgcgcacggcggcggcggcgaggcggcggcgcagtgcgcggtgtgcctggaggcgctgcgcggcggcgagacggcgcgccggctgccgtcgtgcgcgcacacgttccacgtcgcgtgcatcgacatgtggctgggctcgcacgccacctgtcccgtctgccggcgccgcgtcgagcgcaagcacaagggcggcgtgctgccgccgatgccgccggagccggagacggagccgccggtgtag

SEQ ID NO: 13388 - DNA, 1155 bp, Oryza sativa
  Clone ID: TFbOSC419415j.C1.o1.fg
atggcgggaaggtttcttctcggcggccgggagatcgtcaggacgggggatgatggcccgttggatgatggtcctgccgtggcgccggcggcggggtcgtcggcgccggcgacgtctgcggcggcggcgagggtgacgccggcggtgctgttcatcacggtggtgctggcggtggtgctgctggcgtcggggctgctgcacgtgctgcggcggctgttcctcaagagccaccgcgccaacgccagcgccgaggcggtggagcgccagctgcagcagctcttcagcctccacgaggacggcgccggcggcgcggggccggggctcgatcaggccgccatcgacgcgctgccggcgttcacctacgccgagctgctcgccggcgccgccgcgcccaatggcggcggcgggaacgggaagaggcagttcgactgcgccgtctgcctctgcgagttcgacggcggcgaccgcctccgcctcctcccgctctgcggccacgccttccacgccgcctgcatcgacacctggctccgctccagctccacctgcccgctctgccgcgccgcgctctccgcccgcgccctcgccgccctcgccgccgccgccgcggacacccccgccgccgcgcaacaccgccagcccgacgtcgaggaccagaagctggaccaccaccacccgccgccgccgtccgacgagcccgcgaccagcttcgtgctctccgtcaggctcggccggttcaagaacacgcagcgcagcgacggcgacgccgacgcgagcggcggcggcagccgctgcatcgacgcgcggcggtgctactccatgggctcgtaccagtacgtgctcgccgacgacaacctgctgatctccgtgcactggcgccccggcgatggcattagcgccgccaccgccgccgccgccgcgggcgccaatgtcgccacggcgcgcactggcattaagcagggcggcggcggcggaggcggcaagaaggtgttcggccgaggcgacagcttctcgatgtccaagatctggcagtggcgcggcggcgacaggaggctcccagtcctccactccgacgcctcgccgccggcggacgacggcttgccgtgggcgacggcggcggcggcgagcacgcgaacgaggcaagaaagcgacacctga

SEQ ID NO: 13389 - DNA, 1008 bp, Oryza sativa
  Clone ID: TFbOSC401520j.C1.o14.fg
atgtcgtcgacgatgccggcgcagggcggcgtgcggcaccaccggacgtgccgcatgtactggtgctaccagtgcggccgcgccatccgcatcatctcctacccgtccaccgacgtcttctgcccgcgctgcttcggcaggttcctccacgagatcgacccgccgccgcgccccgcgccgcccccgccacacttcttcccgcagccttaccacccgcactacgacggccacccgcgccgctggctcatatacggtggcgaggcgccccccgtggcggcgccgggccgcgcgttccgccagcctgcgcccgcggtgccaggacgcgcgttccgccagcccgggcccgcgcccgcgccctctccagcgccggcgccgcctcgccgacgcatgccgtccccaccgccggtggcgcggcggccgtctactccaccggccatcgaccctgggaactatttcaatgggcccaacctgaacaacctcatcgaggagctaacccagaacgaccggccggggccggcgcccgcgccgtcgtcggccatcgactcgctcccgacggtgcagatcaccggagcgcacctgtccgacggctcgcagtgccccgtctgcaaggaggacttcgagctcggggaggccgcgcggcagatgccgtgcaagcacgtgtaccactccgactgcatcgtgccgtggctccgcctccacaactcctgccccgtctgccggtaccagctgctgtcctccgccgccgccgggtccaacgccaacagccgagctcgccgcggcagcgccaacaacggtggcggcggcggcggcggcgatggccgggacagggagcagacgatcgtgaggtgggggcccttctcgtggatgtggccgccgcgggggctcgaagaccccgacgacgggtgggagtacggacggcgaggaaggccagaggcgggcgacgccggcggtagaatgtgtaacgaccatggaaatttccgaaagttggtgacaatgatggatggctga

SEQ ID NO: 13390 - DNA, 736 bp, Oryza sativa
  Clone ID: TFbOSC401716j.C1.o23.gp
accaacaaatatacggtatttcctcgcaaaatgatactacttatacggtaatattacaagcctgtacgtaactgtaagcgtcctgtacctcctaacctccacaacaactgcccttgctagccaagatcgaaatcgaatggacggtggactactgtgagtaacctacaaactgaacagacgagcgggcccacccgtcatcctctcacagcaccaacgtcggaaaatatctcacggccatgggccatggcctggcccaaggagagatttttttacataggtccaaaacaagaaaggagattttttacatgggtatgttacactgggcccacagcggctgggggaagcgggggcccacctgccccggtcacgcgatgaccaccgtcacggcggcggcggcgggggcgtcgacctcgctccccggccgccggctgcccgcggcggcggcggcggcggttggtttgtgcttggtggtggcgccgtggaggacggagccccggcacgtggggcaggagtcgtgggagacgagccacgtgtcgacgcagcggacgtggaagccatggccgcagcgcggcagcacgcgcaccttctcgccgtccgcgaactcgccgaggcagatggcgcagacctccgccgcggcggcggggctccctccaccacctccgccgtacacctcgatggggatgctcctgagcgcgcgcttcttgagcccgccgccggcgcccgccccctccacgcc

SEQ ID NO: 13391 - DNA, 627 bp, Oryza sativa
  Clone ID: TFbOSC401716j.C1.o25.fg
atgggggtgcacacgaagtcgatgagctggtacatggggacgccggcctcgccgtcgccggggagcgccggggaggcgcagcacgcactgagcagcggcgggggagggggcagcgacgccagcttcgacaccaacatggtgatcatcctcgcggcgctgctcttcgcgctgctgttcgcgctcgggctcaactcgctcgcgcggctcatcatccggtgggcgcggcgggcggcgacgggggaaggcgccggcggcggcgtggagggggcgggcgccggcggcgggctcaagaagcgcgcgctcaggagcatccccatcgaggtgtacggcggaggtggtggagggagccccgccgccgcggcggaggtctgcgccatctgcctcggcgagttcgcggacggcgagaaggtgcgcgtgctgccgcgctgcggccatggcttccacgtccgctgcgtcgacacgtggctcgtctcccacgactcctgccccacgtgccggggctccgtcctccacggcgccaccaccaagcacaaaccaaccgccgccgccgccgccgcgggcagccggcggccggggagcgaggtcgacgcccccgccgccgccgccgtgacggtggtcatcgcgtga

SEQ ID NO: 13392 - DNA, 525 bp, Oryza sativa
  Clone ID: TFbOSC422293j.C1.o7.fg
atggtggctgtgccggtggtggccgacgatggaggcggagggcatggggcgaaaggggaggagagtgtgagcgggagcgtcgcgggcatttcgccgagcatcctcatcatcgccgtcatcgtcgtggtgatgctcctcgcctccgtctccatccactacttcatccgccacctgtgccgccgctcgtcggcgtcggcggccgcgtcgtcctccgcgccggtgctccccgtcgtggtgcgccccgcgtcgtcggcggccgtgggggagcaggtggtggggaaggcgtcggcggagcgcgcggcggagatggagcggctcatctcgcggctgccgctgttcacgctggcgtcgtcgctggcggcgctccccaagtcgtcgcgcgactgcgccgtgtgccagagcgcgttccgcgacgacgacgagctccgcctcctcccggcgtgccgccacgcgttccactcccgctgcgtcgacccgtggctccgcgccaacccctcctgccgtcccaaaaaaaaggcaacctag

SEQ ID NO: 13393 - DNA, 732 bp, Oryza sativa
  Clone ID: TFbOSC403264j.C1.o6.fg
atggccgcggcggaggagcagctcgccacgacgccggagatggagatggagatggagtatatcccactcgatggttacaacagccactacgtgcgcgacgacgatccttaccggcgttaccgcgagctccggatgctcgcgccgccggcgaacgagatctccggccgcctcctcgaggcggcggacgaggacgccgccatgtcgtcgtcgctctgggacgatgagttcgagctcaccggcggcgccgacgccgaccgcttcaccccgcccggcccgcgcctcccgcgcccgcccacccaccacctcaacatcttctcttcccggctgcagcgcctcgcgtccacccgcgcgccgccgccgatgccgccgccgatcgacgatggcgacttcggcgtcgtcttcttgacaggcggcgcccggcgccatgtcgccgtggccgccgccagggtggcgccggcggataccagctgcctcgggaagagcaagtacgaggaaccgcgcggcggcggcgagacggcgatgggcggcgcggattcgacggggtgcgtgatctgcatcgcggagttcgaggtgggcgacgagctgagcacgatcccgtgcgcgcacaggcatcggttccacgacaagtgcctcgccgagtggttgaagcgaagccgctcctgcccgctttgccgccatctccttcccgccgtcgttcccgccaatacccgccccaacatccattttctttaa

SEQ ID NO: 13394 - DNA, 870 bp, Oryza sativa
  Clone ID: TFbOSC400555j.C1.o38.fg
atggacgcgccaccggcattccgctcctcgtcgccgtcgtcgtcgaacgcgagcgtcccgatggttgtcatcaccgtcgtcggcatcctcgcggcgttcgcgctgctcgcgagctactacgcgttcgtgaccaagtgccaggcgctgcgcgggctgtggtcccgcggcgcgatgccgtggcgcgggcacggcggcggcggcgcgcggcggcgggccgcgcgggaggcgtcggtgatccgcaccgtggcgaccgaggagcgggggctcggcatgccgtttatacggatgctccccgtcgtgaggttcacggcggcggcatgcggcggcgccggcggcgaaggtggcggcggcggcgtgggcgcgaggatatccgtgtcggagtgcgccgtgtgcctcagcgagttcgtggagcgggagcgcgtccggctgctgcccaactgctcccacgccttccacatcgactgcatcgacacgtggctgcagggcaacgcgcgctgccccttctgggggagaggggaaaaaatgggaggaagaaagggaaggggggattcgcaccaccaccaccacaaccacaaccaccggccggacgacgagctcatcaacagcatcgtgatcgaggtgagaggggagcacgagagctgggttagccaccgcggcggcgccgccgccgcgccgcctgcgaccaagcggacgccgcagcggcggcggaagccggagagcgtgggcgacgaggccatcgacacgaggaagaagtacgacgaggagttcgcggtgcagccgatgaggaggtcgctgtccatggacgactcctgccacaagcagctctacgtgtccgtgcaggagttcctaacccaacagaggcaagtgtaa

SEQ ID NO: 13395 - DNA, 540 bp, Oryza sativa
  Clone ID: TFbOSC402160j.C1.o16.fg
atggcggaggtcggcggtggcggcctcccgccgtcgcgcgccgtgctcgcctcgcggttccgttccaactccgaccacctcatgcggctccactccacctggatcaacagcgccgccacgcccgccgctgcgccgtatagccgcgagtcgctcgcgatgctcgccgcgcggctgctctccgtctccgacgaccatctccagcgccagcagcagcaacatgtctccatgattatctccacctccctgcccggctgcaccaccggcggcgtggcgcccgcattcaaggaggcgatcgaggcgctcagggacgtcgtcgtcgaccagctggcgccggccgcggagtgcgcgatctgcctccacggccaggacgcggcgacggcggcggcgggacggtggaaggagatgccgtgcgggcaccggttccacggcgtgtgcctggtgaagtggctgcgcgtgcacggcacgtgccccatgtgccgccaccagatgcctgcaaaggaggcggcggcggctgctgctgctgagggacgccggagctga

SEQ ID NO: 13396 - DNA, 1326 bp, Oryza sativa
  Clone ID: TFbOSC900249j.C1.o21.fg
atgggaggggcgcacttccccggtgagggcgaggtggtggccggggagggcgacgccgtcgtccccctccgcgacgtgggcaagatggagcacgggtgcgagcattacaggaggagatgcaagatcgtggcgccctgctgcggcgaggtgttcgcttgccgccattgccacaacgatgccacggcttcaggtgatcggcataccatttgccgccaggatgttgaaaaagtagtatgtctactctgtgatactgaacagccggtgtcacaagtgtgcataaactgtggtgtcaatatgggagagtacttttgtgatgtatgcaagttttatgatgatgatacagagaaagggcagtttcattgctacgattgtggcatatgcagggttggtggcaaggaaaactacttccactgcgcaaagtgcgggtcttgttatgctgttgctctgcgtgataaccatcagtgtgtggagaactcaatgaggcagaattgcccaatttgttatgagtatctatttgattcattaaaaggaacacgagttctcgactgtggacacacgatgcacatggaatgcttttctgagatggtggaacataacaaatacacttgtccaatatgctccaagacagctcttgatatgacacatcactgggcattgttagatcaagagattgaagcaacaatcatgcctcccgtctaccgttacaagatttgtcttcgttttacacagccgagagagccggcgcattgggaggggattcaaggtgttcgacgatttgctcaagagggcatcgggtgcagggattttattccgttccacatgatttttgggctggccatgggagaatactgcagttcgtcatcgaatcaatccaaggtacccatcatcctcctcttttcagcatcaacgatcgtacaatctagtatagtgaattggttctctgtacacagctctagtggcaccatactgatgataatgacgtgcatgcatcctttcgtgtcagctatgcgtttgaagattgagaaatgcttgctatcctttgaacaaattgtggttctgaaataccatggctctttctccgaaaacattacgcgtcttggaagaacaaaagttaggtcttgtgttgcacatgttaaagaatcatgggtacagtgttggaatgcaatcacaagcacagtgctgaaatgcattctcacacagccgcaagcccgcaatactatggaagataatgaaaatacaaaggtgagagctgtcaatgcagatataaaggataaggatatcattctcttgtcctgctggatgtttgcgtcatgcactaaaatatga

SEQ ID NO: 13397 - DNA, 453 bp, Oryza sativa
  Clone ID: TFbOSC400945j.C1.o1.gm
atgggaaatttctcgtcggaggaggagccgccgccgtcgccgtcgccgccaccagcggacgaagacgtattaccgttcgaagagtacccgccgccatcgtccgacgaagaggaggaggaggagatcaaccaccccacgccacagacctccaacgaggcggctgacaggcgccctggattactcccggcctcgcgcaaggccatacagggcctgcgtgaggtgacggcggccggcgcgggagaagacgagtgcgccgtgtgcctgcaggatttcgaggcgggcgacaagctcaggatgatgccctgctgccacaccttccaccagcgctgcatcttcgactggctccgcctcagctgcatctgtcctctctgccgccacactctgcccacgcagaatgtggaggacgacaggcttgggcgcgctgcccacacagtggcaggatcaaccggctga

SEQ ID NO: 13398 - DNA, 2445 bp, Oryza sativa
  Clone ID: TFbOSC418226j.C1.o1.fg
ttgcctatcaggttaactataaaccttctcttttcagatggtacttgtgcacccatagagagggacactcttagaagtcttgtggaatctggtgcaactgaaagttcaggttgtttgcctggttgccacttgggaagtgatgcccctccattacatctatccacagctaatgctcttggggatatcttttttccatcaagtgatcttttgcaagcaaatgaggagtgtgctttggctgctctcactaaattaccagaaaatgaccgcagtaagcaactacagagtactagtagcaacctgttgtccagcctcaataatgtcgtacaagcattaagtaatcttcagttgaagcacaagcagttagcagaggattatcaaaatcaaagagattccagtgcccgaaaaagagctgaacatagacgtctaaaagaggagttggccagtgctgcttctgagttggaagaaactaactacaaactggcagcacttaaagctcaaagagataatacacaaggagctcgaatcccatatcctacattaggaaacaaaaatatgcctgaagataaggaattgatttcaaagcggttggtggaaattaagagattacatgaagagagaattgaaattttgaacaaaatagcaacttttcagaatatcttgatggatttcaagagcattcgttcttcaaaagcttttcagcttgttaatgatcgacttcagaagtcacaagcagaattggatcactaccagacattattagagaaattacaggttgataaggataagtttgtgtggcaagaaaggcaatttaatttgaaagttgatctggctgagattcctgagagggtttctacatattgtgagtctagcattgctgatctcaagaaggatattcagaaactatgtgatgaaaaaaacatgcttattctcaaacttgaagaggcttcaagagaacctggtgcggtagttactattcactttaccaagagtaactttcaaacttgtcttgctaaagcagctttagtgtcatcgataccaagggaaatgggcgcgatgcagagtgaaatgaccaaacacaaggaggcttccttggagttgaattctttgcgagcagaagtccattcactttctcgcattctgtccagaaaggaacgtgataatgaagaagcatcatgcagatctgcccgtgcgggatctgatataacacaacttcaatcagtgatttctgatctgaagcaaactaataaggagcttaagttgttcgcggatatgtataagcgtgaatccactgattccagggaaataatggaatccagagatagggaattccttgaatgggctcatgttcatgccctgaaatcatctcttgatgaaagtaagctagagcagcgtgttaaggctgccaatgaagctgaagcaatcacacagcagaggctagcaactgcagaagctgagattgctgaatcagggcagaagcttgggacttctagaaagtacagaattatgcttctgaacattgtttctcttagaactgttgaagtaggggtcacttctcttttaggggatctagtcagtttatcccatatgctgaagtctaaacaggaagaatgtgaagcttacagagtggaggtcgagtgtatcgggcaagcatatgaggacatacaggcacaaaaccaacaattgctacagcagattattgaaagagatgatgataataccaaggatgttagatttggttatattgttaatttgattgttccggagactcagtacttcattgaaaagctgtttacttgcgttaagttgatttttatggagggtgttaaagcaaaacagacacaagatgctttgcatttggaaacatattctttgcgcagaaacttgcagcaggaaagctctttgatggatctgtacaaccagaaaattgtttccttagaagatcagcttaaaatgtggtctgatcgggttgggaaacttcaagaggatggatggcaacaatctgtttcattgagtaattaccaaagaaagctggttgatgtgcacagagatgctcaaaagcttatgcaatcattggatggaatacaagcgaatgttggaagcagtcgtttggaagtcgctgatctgcttatagaacttgagaaagagaggtttagtaagaagagaatagaggatgatttggaggttatgtcaaggaaagctagctctcttagagccaaggcacgtgaatcagcagtcctggaaaagcttcgtcatgaggtcaaggagtatagggggatattgaagtgtggtatctgccatgataggcagaaggaggttgtgattaccaagtgctaccatctcttctgcaatcagtgcatacagaagtcccttgggaaccgacagaggagatgtccttcatgtagcttgagttttggggctaatgacgtgaaacctatctacatatga

SEQ ID NO: 13399 - DNA, 762 bp, Oryza sativa
  Clone ID: TFbOSC400220j.C1.o16.fg
atggaccagatttacatggctgctgtcaataacaagacttcattgcctgatgatgagccaatgaagaaaattagtggagatatgcctgtgactgctggaaacgcttgctttgactgcaacatttgccttgattttgcagcagagccggtggttactctttgtggtcatctctactgctggccttgcatctatgagtggctatgtccaggggttggatcgactgccagtaacaacagcagtttggcaaggcgacagtgccctgtgtgtaaggctacactctccccagacatgctggtgccattgtatggtcgtggggggagtctgaagaaatcactgaatggtgtgcccattccacgacgaccaaccgtgcagcgggaggcggttgagcatcaaaacacacacaataacatcgatgatcggcaccatgagaacatggaacccagccctccaccacaaccgctgcggcattcgagccatcattccagtgcaactgaatttgattttatttacccgccatcaccaattgggcgtggcttgatccactcgacggctggtggtgtgcttggggggatggcagtggcggtgctaccatgggcattccgtggccaggtgccaccgagcatgttcatgagtccccactatgtcacggcacacaatatgagctctagagcgaggagacatcagatggaagttgagaggtcactgcatcagatctggttcttcctcttcgtttttgtggtgctgtgcctgctcttgttctga

SEQ ID NO: 13400 - DNA, 498 bp, Oryza sativa
  Clone ID: TFbOSC405087j.C1.o5.gm
gaagagaaagaaaggttccggaatatcaaaaaacctcctgtgccccccccgaggccccgaagcccttcgttcgtgtggagggcgccgctgttgcccccccggttccgatcccaccgtgtgccggcaacaacggtgaagccctccgcccgcccggttgtagccgacgacgtggcgctcttggcgtacgcgtacgagaagaagaagaagaagaggagagggagcgacggcgacagcggcggcggcgacgacggcgacggcggcggcgaggagtgctcggtgtgcctcggcgagatgaggcaaggggaggcggcgaagcggctgccggtgtgcctgcacgtgttccacgaggagtgcatcgacatgtggctcggatcgcacgccacgtgcccgatatgccgctctccggtggacgccggcgccgtggcggcgcgggtgcagcgcttcagcagatgtgttttcatctgcatctactttgagttggatccgtttgttgattga

SEQ ID NO: 13401 - DNA, 963 bp, Oryza sativa
  Clone ID: TFbOSC900068j.C1.o18.fg
atggcggcggcgggggtgtcgaggagcatggtgctgacgctgctggggttctgcgtcagcgtcctcttcatcgtcttcgtctgctcccgcctcgcctgcgccctcctcaggcgacgccgcggccgcgcccgcctccgccgcgcctcccctctcgccgtatcgggggtcctctccatctacgtcgaccgccacggccaccaccagccctcgtcggccgccggggccgcttccgggaccgggggcctcgaccccgccgccgtcgccgccttccccacccgcgccttctcccccgccgcctcctcctccgcctccgcctctacccagtgtgtagtctgtcttgcagaatacgaagagaaagatgtgctccgtgttcttccctactgtggccacggctttcacgtggcctgcatagatatttggctaatgcaccattcaacatgcccagtttgtagaatttcgttgtgcgactaccctgatagcaagcacacgatgtctcctgtaccaagtgcagtgataataccattacctccatgttctcctgaagcatcaagatcagatcaatgcaattgcctattcgtcggaacaggtcattcgccaaggacatcgcaggttctcagaaatgaacctgaccaggtgaaactacctgtaatattagaaacatcgacacagggggatccgtggattgctgtcataggttcagatggtgatatgatatctcttctgaagccaggggcctccagtggcagaagaacagcctatatgtttgtccacgcatggatgtcggccggtccaatcatggctcatacaatagatctgaactttgtgtgctcaaagcatcagcagcagcaatggttcttcttccctgctgcaacagggaaaagtcgtgttgaaccaagagatgctgacgcagggcttcactcatgtcttctccccgaccttcgggaattagctctgaagatctga

SEQ ID NO: 13402 - DNA, 879 bp, Oryza sativa
  unsure (1)..(879): unsure at all n locations
  Clone ID: TFbOSC900298j.C1.o20.fg
atgcggggcgcactcgccgctggtggcggcatcccgagttacgcgcaccgcgacggcgacggcgacgttgagtgcgcggtgtgcctacggcgaggtggagcagggggaggcggtgcggcggctgccggcgtgccagcacgtgtgttccacgccgcgtgcatcgaccggtggctgcgcgcctgcgcgcgagcgccacctgcccggtttgccggangaggaaaagagaggaaagtgttctgtcntgttcccattgttctaaagctcttgctcgccgtcgtcccgctcgccgtcatcgccggcgtgctcgtgtacgtcgccggcgtcccgtgggccatctccatcgtcgtcctcgtcgtcgtcttcgtcgtcgtgcacagggcgcgccgtggcaggtcaccggcggcgggaggaggaggaggaatggtccgggatgatcaagaaccgacggtggcgcggccggcggcgccaagcgccgtcgtcgttgtggtggcgccgccgctgccaccgccgttcccgatccaccgtgtgccggcaacaacggtgcagccctccgcgccgccggttgtcgccgaagacgtggcgctcttggcgtacgcgtacgagaagaagaagaagaagaggagagggagcgacggcgacagcggcggcggcgacgacggcgacggcggcggcgaggagtgctcggtgtgcctcggcgagatgaggcaaggggaggcggcgaagcggctgccggtgtgcctgcacgtgttccacgaggagtgcatcgacatgtggctcggatcgcacgccacgtgcccgatatgccgctctccggtggacgccggcgccgtggcggcgcgggtgcaggtgcaagtgcaagtgcaagtgctatcatgttag

SEQ ID NO: 13403 - DNA, 642 bp, Oryza sativa
  Clone ID: TFbOSC400259j.C1.o108.fg
atggacgtcgaacagctgcagcagcatgccaggaggcttctgtcgaacggcagggtggtgtcggcggcggcggccgccggcgcgtcgcctggtccggctgggcgcgtgttggaaggcggcgcggcggcggcggcgcgtcgtccggcaccgttcagctcgctggacgcgacggtgatcacggtcctgtccctcctcctctgcgtgctcgtcgtcgggctcgtgctccacgcgatcgcccggtgcgcgttccgcgtcacgcggcgcatgtgctacggccaggagccgcccggggatcacggcgacgaggcggcggcggagcgatgcgcccgggtagccaggaagaagccgggacgcgccatcgcggagaagatcccggcgatcgtctgcccggccggcgggctcgatcggctcgccggctgcggctcgacggagtgcgccatctgcctctccgagttcgcgcagggtcaccgcgtccgcgtgctgccgcgctgcggccacggcttccacgcgcggtgcattgaccgatggctcgccgcgaggcagacctgcccgacgtgcaggcgggagccgtttgcggcggccgcggccgtgcagctgcaggtttaccctgacgccgccggcggccagcacgagacgccttag

SEQ ID NO: 13404 - DNA, 546 bp, Oryza sativa
  Clone ID: TFbOSC407812j.C1.o3.fg
atggaggtgtcccacatggccaactgcagcaacgtctcctcaccggagcagcagccgatgccgccgtcttcggcagcggcgtcgtcgccgtcgccgccgcagcttgactacgacgtggtggtgatcctggcggcgatgctgtgcgcgctggtgtgcgcgctggggctcaactcgatgctccagtgcgtggtgcggtgcacccggcgcgccgtggcggaccccgtcggctgggtggagcaccgccgcgccggcgcggggctcaagcgcgaggacgtcgtggcgctgcccgtcgccacgtacgtcgcctcgccggcgccctccgtcgccggctgcgccatctgcctgtcggacttcgccgacggggagagggtccggctgctcccggcgtgcggccaccggttccacgtcgtgtgcatcgacaggtggctcctggcgcactgctcctgcccgacgtgccgccgccgcccctcgccagaggccgacggccacggcgccgtcgtcggagaagaccaccaccatcgcctgcaagttttgactgctgcttaa

SEQ ID NO: 13405 - DNA, 1161 bp, Oryza sativa
  Clone ID: TFbOSC408022j.C1.o9.fg
atggcctcttctccccctacaacaccaaatctcggttcgcagcctacatgggtgccctatgagccaaccagggattgctcccagggcctctgcagcatgtactgcccgcagtggtgctacttcatcttcccgccaccgccgccggccttcgacatcaccggctccagctccgacgactcctccggcccaaccttctcgccgctcgtcatcgccatcatcggggtgctcgcgagcgccttcctcctcgtcagctactacaccatcatatccaagtactgcggcaccttcagctccctccggaacagactccttggctccagcgctcaccgcggcagcggcggcggcgccgacggcggagacaattccaggagccaggagccgtggagcgtcgcgctgtcggacgggatggacgagacgctgatcaacaagatcacagtgtgcaagtacaggcgcggcgacggcttcgtggacagcacggactgctccgtctgcctcggcgagttccgcgaaggcgagagcctccggctgctgcccaagtgcagccacgccttccacgtcccgtgcatcgacacctggctcaagtcccactccaactgcccgctctgccgctgcaacatcgcgttcgtcaccgtcgggatggtctcgccggagccggaggcccgcgttccacgggaggataggagagacaaccacgagctggtcctgacaattgacaacccggagcatgtgcgcgaggagccacagaacgtggtgaccggtgtcgccgtcggcaacggcggccgcaaccacgaggcgaaggatggtccggggaggtcggaagatgcaaatggcacagctgagatcagagaagacggcgccttgatgccgcccacaagggcgccgtcgtcgttgtcagacacgcaccgtgaaggccggatgtccattgccgatgtcctgcaggcgagcctggaagacgagctgatggtggccagggagagcggcctcctggcaggctcttcggggtcctcaagacggtgtcacggggagcacagcaaggacggcggcggccgcagtggccgggcattgccggacggcgcgaatatgaagagattggcgccggccgggagatcatgcttcagcagcaggagtggcagaggaaaggactccgttcttccaatgtga

SEQ ID NO: 13406 - DNA, 3468 bp, Oryza sativa
  Clone ID: TFbOSC401134j.C1.o46.fg
atggcgacgccgacgcccatggcgggggaggggacgctcgcggcggtgatgccgcggtcgccgtcccctacggcttcggcggcggcggggtcggcggcggaggcgccgatgctgatattcctctacttccacaaggcgatccgcgcggagctcgaggggctgcacgcggccgccgtgcgcctcgccacggagcgcgccggcgacgtgggggcgctcgccgagcgctgccgcttcttcgtcaacatctacaagcaccactgcgacgccgaggacgcggttatctttccagcacttgatatccgagtcaagaatgtcgcaggaacctattctcttgagcacaaaggggaaaatgatctcttcagccagctgtttgctctgttacagctggacattcaaaatgatgatagtcttcgaagggaactcgcatcctgtacaggggccattcaaacatgtctctcccaacatatgtccaaagaagaagagcaggtctttccattgcttacgaagaaattttcatatgaagagcaagctgatctagtgtggcagttcttatgtaacattcctgtaaatatgatggcagagttcctcccctggctttcgtcttcggtttcatctgatgaacatgaagatatccgtagctgcttatgtaaaatagtacctgaagagaaactccttcagcaggttgtcttcgcgtggatcgaagggaaaacaacgagaaaagtaacagagaattccaccaagtctaattcagaagcaacctgtgattgcaaggatgcctcctccattgatcatgcagataaccatatttcttcacatgaagattctaaagctgggaacaaaaagtatgcagaatctattgatggtcaggttgaaaggcatcccatagatgagattctgtattggcacaatgctatccgtaaagagttaattgatatagcagaggagacaagaaggatgcagcaatctggaaatttctctgatatatcatctttcaatgcaaggctgcagtttattgcagatgtgtgcatcttccacagtattgccgaggatcaggttgtgtttcctgcagttgatagtgagctgtcctttgtgcatgagcatgctgaagaagagcgccggtttaacaattttagatgtttaattcagcaaatccaaatagcaggagcaaaatcaactgcactagacttttactctgaattgtgttcacatgctgatcagataatggagacaattgagaaacacttctgtgatgaagaaaccaaggtgcttcctcaagctaggatgcttttctctcctgagaagcaaaggcaacttctgtataaaagtttatgtgtgatgccactgaagttattagaacgtgttctcccatggttagtgtccaagctgagtgatgaggaggcatcttcttttcttgaaaatatgcgcttggcagcaccatcatcggaaacagcactggttacccttttctctggttgggcatgcaaagctcgttcagaggacaaatccaattctggggagtacttatgcttaacatctggagaaatgagatgcctattggatgaagttgatggactggaaaaatgtcggccattctgtccatgtgcttcacgtagcaatacagatgcttctctgcatccgcagactgaaaatggttctaggccaggaaagcgaggaaatgatgcagaatctgttcctggtactaatggaagtgacttgtctcagactgatgacactgaagcacgtccatgtagcaaaaaaccttgctgtattcctgggttgagagtagaaactggcaatcttgctattagttcatcgctggcttctgcaaagtcatttcgctctctatcatacaattcttctgctccttcattatattcaagccttttttcttgggagacagatgcatctttatcttgttcagatggcatatcaaggccaatcgatactatattcaaatttcataaagcaattcgcaaggacttagagtacctagatgttgaatctggaaagcttattgatggtgatgagtcttgtcttcgccagttcattggaagattccgtttattgtggggtctttacagggcacacagtaatgctgaggatgaaattgtttttcctgctttagaatcaagagagacattgcacaatgtcagtcactcgtacactcttgaccacaagcaagaagaacaattatttggagatatatctgatgccctcgctgagctttcgcagctacatgagaggttgacccacccccacattgaagtcagtgaagcagagaaaaacgattttaattcctctgatgagattgattggactagaaagtacaacgagcttgccacaaagcttcaaggaatgtgcaagtctatccgggctgcattgactaatcatgtccatagagaagaacttgagttgtggccattgtttgatgagcatttttctgtggaggaacaggataagcttgtaggtcgtataattggttcaactggtgctgaggttctccaatcgatgctaccctgggttacttcagcacttactcaggaagagcagaacatgatgctggatacatggaaacaggccactaagaatacaatgtttggcgagtggctaaacgagtggtggaagggagctccgacatcatctgattcttcagaagaggcatcctctgctccagaagatagtcatttacaggacaagattgaccagaatgatcagatgttcaagcctggatggaaggacatatttcgaatgaaccagagtgaacttgaggctgaggtgcgaaaggtttcacgagatcctacacttgacccaaggcggaaggcctatcttatccaaaatctcatgaccagtcgctggatagctgctcagcagaagctaccagagccaaaatcagaagagtgtagtgaaggtgccggtatccctggatgtgctccttcatatcgagaccaggagaagcaaatatttggttgtgagcactacaaaaggaactgcaagcttgttgctgcatgctgcaacaagctgttcacttgcagattctgccatgataaaattagtgatcatacgatggaaagaatacttatgttgcctgatcatactagagaaagcgacacaggagatgatgtgcatggtcttggtgttgatttcttccattgcatgaagtgcaattgctgccttgggatgaaattaacagaacacaaatgccgggagaaagggctagagacaaactgtccaatctgctgtgatttcctatttacatcaagcgcggcagttagagctcttccctgtggccatttcatgcattcagcttgctttcaggcatacacttgtagtcactacacttgtcctatctgctgcaaatccttgggagatatggcggtgtactttggcatgttggacgccttgctggctgctgaagagcttcctgaggaataccgtgatcggtgtcagggttgttctcttgcttcttga

SEQ ID NO: 13407 - DNA, 453 bp, Oryza sativa
  Clone ID: TFbOSC8662j.C1.o1.fg
atggccgatgaacagatcagagacctgaacttgtcggagacccatacgttgctgctcatcaacctttatttgtcacacgtacaggggccgagctacgttccacacggtgttgaatcagcatacatccacatcaatcgtgatatcgaagaagatgacgacacgtacagtgatgacgggttctgcgccgtcccggcctccagcgacgccatcgctgcgctgccagtgccagagacgacggtgagtgagaccgagacgagggaggaggaagcatgtgcagtttgcctagagggatttaaggagggtgacagagtcaagaagatgccttgctctcatgacttccacgcgaattgcatctctgaatggcttagggtgagccgcctctgtccacactgccgttttgctctgcctgctgagagggattctgaacagaaaaacccagaaggggaagcgtga

SEQ ID NO: 13408 - DNA, 336 bp, Oryza sativa
  Clone ID: TFbOSC8664j.C1.o2.gm
atggcgaccacaggacgattgctgctgccccacgacatcaacggtcgcttcggctccgtcccggcgtgcagcgaggccatcgccgccttggaggagacgtcggccggcgaggcgaaggagaaggactgctccgtgtgcctggaggccttcgaggaggagagcgacaagctgatgaggaagatgccgtgctgccatgccttccatgagagctgcatcttcgagtggctgcaggtcagccacctctgcccgctctgccgcttcgcgctgcccacccaggcggaggcggaggcgggactgtggccattgctcacgcctggttctggttcggggacatga

SEQ ID NO: 13409 - DNA, 792 bp, Oryza sativa
  Clone ID: TFbOSC23746j.C1.o8.fg
atggaagggagggtgctgcggcggagtgtcacgctggcggaccagctggccgccgtggggcccgcggggacggccgccgccaccgccgccgcggggtcctgcaacctccgcgacctcctcaagctccgcgacgaggacgacctcgccgcgggccgccgcgccgcggtcaccctcgcgtcggccatggcggccgagaggttgacggtggcgcctgcgtcctcggctgccgcggcggcggcggcggcgcgcaccttgctggatatcatccgggatgaccagctcccgtcgtcttccggtggtggtggggaaggtggtgaccccctcgtccgccgcgcggtctccctgcctgctccggttacggcgactcctcctcctccgccgccgccgccggagacgccgccgcgacagctgccgtctgtgtcgccgccgacggtgggggaggaggaggaggaggagcagggggagagggtgtccctgatggcgctgctggagcagacggagcggcagtggagcgccggctcgggcgcgaccgtgcagcagcatctcgcgtctccctccgccgccgcatcggcatcggtatcggcggcggcggaggacgaggcggaggcggaggcggggaagggggcggcgggcggcggctgctgctgcgtgtgcatggcgcgggccaagggcgccgccttcatcccgtgcggccacaccttctgccgcacctgcgcccgcgagctcctcgccggccgcggccgctgcccgctctgcaacgccgccatcctcgacgtcctcgacatcttctga

SEQ ID NO: 13410 - DNA, 1005 bp, Oryza sativa
  Clone ID: TFbOSC401719j.C1.o43.fg
atggacgacgacgcctcctcctacacctactgttgccacagctgcgacagcttcgtccacccgcacccccacctcgacgccgctgtgctctgtccccactgcaacgccgccggcttccttcacgaccacgagatgcctcccgccgccgaccactccccgttcaacccccccgtcatcgtcctccgccgctccgcatcccccgacgacgccaccaccttcgatctcctctacgacgacggcgcctcctccgccctccgccccctcttcgaccgcctcctcctccgcatcccctccgcctccgacaaccccaaccccccggcctccaaagccgccgtcgactccatgcccaccatcctcatcggggcctgccacctcgccgccgactcccactgcgccgtctgcaaggaacccttccacctcgccgccgaggccagggagatgccctgcgcccacatctaccaccacaattgcatcctcccctggctcgctctccacaactcatgccccgtctgccgccaccgcatgcccaccgatgaccacgactcgaccaatgctgctgctgctcaggctgccgccggaagcagcgacgaggacgccaccaccgtgggtactctcaccatttggaggcttcccggtgggggatatgcggttgggaggtttgctgctgctggtgggacaagagccggtgagagggagctcccggttctctacacccagatggatgatggcggcttcaacggcggcggcggctcgggctcgccgacgatgatcgggtggtcatctagagggagtcgttcgtcccagagacagagaagcatcatcccacgcttgtttcgcaacatgtttgcatgctttaggcatcatgatgcaactgcagattcaggagattattcctcacgggctgggaggagatcctcctcctctgtcttcacccgcagcctgaggagccagatcacgagctggagatcggaagatggccaccccgatgccattgctactagatga

SEQ ID NO: 13411 - DNA, 903 bp, Oryza sativa
  Clone ID: TFbOSC405090j.C1.o1.fg
atggccgcgctggtcctcagcgtcgtcggctgcttcgcccccaagagcgtctggaaggcgtccgtgctcgccgggatggtgctactggccttcggcgtcgccgactacctcgcgccggcgagctggtgccgccgccgcggcgggacgaacacccgcgccgcggagcgggaggctcagccgggagcttcttcctccagcacgttcgggctcgagaaggccgcggtggacgcgctgccgacgttcgcgtacgcgtccggtggcgctggcgccgcgcagggcggcggcgacctcgaggccgggaacggcgagccgtgctcggtgtgcctggaggagctgcatgccggcgagatagtgcgggagatgccggcgtgcaagcacctgttccacgtggagtgcatcgacatgtggctgcactcgcaccggacttgcccgatgtgccggtgcgacctctcgccgccccgggaagtggccgcgaaagaggccacggcggcggagacggcggcgccgccgggtgatgacgccttgccgccggataggatagcccagaggggaatattccccctagatgatggatggattaatccggccgatttgcccggatacagccgcccgagcgctcgggcgagcggggcgagcgacgaggtgggtcacgtcacccctctcaccatgcgagaacaacgacgacgcgagggaggcagtgggatgcaagctcggctgccggcaagtgggtgcgagtgtggtggcggcagcggaaagaaggggggcagcgagcccgaaggttggaggcggcggcagcggaaagaaggggtggcggccagcccgaaggctagagacggcggcaacgggaagaagggacggtggcgagcccggaggagaatgaatcaccgccgccgactaggatga

SEQ ID NO: 13412 - DNA, 1008 bp, Oryza sativa
  Clone ID: TFbOSC900298j.C1.o27.fg
atgtcgaacgtgttcgcgaggatatcggcggcgacgctgcggggcggcggcgaggaggagcggggcggcggccgcggccgccgcgcatgctacggcatcgcggcgtccttcgcggcggtgctgctgttctgcgtgctcgccgtcgtcggcagcgtctggaaggcgtccgtgctcgccgggatggtgctactggccttcggcgtcgccgactacctcgcgccggcgagctggtgccgccgccgcggcgggacgaacacccgcgccgcggagcgggaggctcagccgggagcttcttcctccagcacgttcgggctcgagaaggccgcggtggacgcgctgccgacgttcgcgtacgcgtccggtggcgctggcgccgcgcagggcggcggcgacctcgaggccgggaacggcgagccgtgctcggtgtgcctggaggagctgcatgccggcgagatagtgcgggagatgccggcgtgcaagcacctgttccacgtggagtgcatcgacatgtggctgcactcgcaccggacttgcccgatgtgccggtgcgacctctcgccgccccgggaagtggccgcgaaagaggccacggcggcggagacggcggcgccgccgggtgatgacgccttgccgccggataggatagcccagaggggaatattccccctagatgatggatggattaatccggccgatttgcccggatacagccgcccgagcgctcgggcgagcggggcgagcgacgaggtgggtcacgtcacccctctcaccatgcgagaacaacgacgacgcgagggaggcagtgggatgcaagctcggctgccggcaagtgggtgcgagtgtggtggcggcagcggaaagaaggggggcagcgagcccgaaggttggaggcggcggcagcggaaagaaggggtggcggccagcccgaaggctagagacggcggcaacgggaagaagggacggtggcgagcccggaggagaatgaatcaccgccgccgactaggatga

SEQ ID NO: 13413 - DNA, 1287 bp, Oryza sativa
  Clone ID: TFbOSC100279j.C1.o12.fg
atgagcaattcgacgtggcagccgtcgccgccgcagactccggcggcggcggcgtcgtcggcgtcggggattgacggcgtggagaacaagataagcccgagcatcgtgttcatcgtggccgtcttggcgatcgtgttcttcgtgtgcgggctgctgcacctgctggtgcggcacctgctgcggctgcaccggcagcggagggcgagggaggacgccgagagcgcgacggcgttcgaggggcagctgcagcagctgttccacctccacgacgccggcgtcgaccaggccttcatcgacgcgctcccggtgttcctgtaccggaacgtcgtcggcgtcggcggcgaggatggcaaggacccgttcgactgcgctgtctgcctgtgcgagttcgccgccgacgaccagctccggctgctgcccaagtgcagccacgcgttccacctcgagtgcatcgacacctggctcctctcccactccacctgcccgctctgccggaggagcctcctcgccgagctctcgccgacgtgcacccccgtcgtcatggtgctcgagtccgagagctcccgcgacatggtccacgccgccgacgatgagccagccgacgtcggtggcgaagacgcgccgggagcggaggaggtggtcgaggtgaagcttgggaagttcatgtgcgtcgaaggcaacgtcttcttcaacgtcaacgccatcgccggcgaaggggatagagccggcacgagcagcaacggcaatggcgacgccaatgccaaggctggtggtctcgggcaaagacggtgccattccatgggatcctacgagtacgtcatggacgcgcacgcctccctccgcgtgtccatcaagccgccgaggaagaagccggcggcggcggcctccaagtcgcgccgccgcggcgccatgtcggagtgcgagttcggcgcctccaagcgcggcgagtcctcgctccgcctgccgccgttccgcgcgacgccgcgcaagaaccccgacgacgacgcggccgcggccgccggcgcgaagctcgccaaggacagcttctccgtgtccaagatctggatggtgccgtccaagaaagagcccggcgccgccgccgagaggcgcgcggtgtcgttccggtggccggcggcgaaggactgggacgtcgaggccgggagctgcggcgggaacagcgccgtgtcgtcggtggcggcggaggagcgcccgtcgttcgcgaggaggacgctgctctgggtcgtcggaggcagcaggcagctcagcagagtcgggagctgttcatga

SEQ ID NO: 13414 - DNA, 624 bp, Oryza sativa
  Clone ID: TFbOSC411506j.C1.o3.fg
atggcgtcgttcctcgactcgttctcctcgctcggcgtcgggtacgcggtcgccatcgcgctcggcttcctcgtcctcctcgcgtcgctgctcctcgccttctacttctgctcccgccgcggcggggccggggtcgtccgccgcggcggcggccagggggtccactccgcgcgccacgccgtgtcctccgcgtccagctccgggcacatctccatcaccgtcccgcgggtcatcttcgtcgcggacgactccgactccccgggctcctcgtcccgcggcggcgccgggggcggcgcggcgtcgtcgcccgtcgggctcgaccccgcggtgatcgcctcgtaccccaaggtgcccttctctagggcggcgacgggggcggacgccgaggccgcgtgctcgatctgcctctgcgagtacaaggaaggggagatgcagcgcatgatgcccgagtgcaggcacaggttccacctcatgtgcctggacgcgtggctgcggcggagcgcgtcgtgcccggtctgccggtcctcgcccatccccactccagtctccactccgctcgccaccccgctgtcggagctcgtcccgctatcacagtacgccgccgaccgccggcgccacaggtga

SEQ ID NO: 13415 - DNA, 2472 bp, Oryza sativa
  Clone ID: TFbOSC900235j.C1.o2.fg
atgcccgcgcagaagcggccggcaccggaggcggcgtcggctccagcggggggagacgggcacgtggaaggaggaggtgctggtggtggtggtggcgcggacgaggacgcccaccgcggcggggagcgctccccgaaggtgatgaacggtggcgggccggagaaggagaaggagcggcgggacgctgattctgatgcggaggaagaggaggaggaggccggcggcggcggtggtggtggaggggccgacgaagaccgcgacagcccgtcttcggagagcgacggcgacatggacgagtttatactagtgaaattaatggatatacggaaagaagtgcagtgccctatatgcttaggcattatccggaagacaaggacagttatggagtgtttgcaccggttttgtagggattgcatagataaatccatgcgactaggaaataatgaatgcccagcatgccgcacccattgtgcaagtagacgttctttgagggatgatcctaattatgatgctttaattttggctttgtatccagatattgacaagtacgaggaagagatccaagcatccatcgctgaaacatttcgaagacaatcagaagcactcgtgaagaagcgttccgttgcaaaagcaacaggttcaactattacgagaaggaccaggggtaatatgcgcgcaaaaaggaggggacgaactagttcccctgatattgttgcaactgacaatgaggatgaggatagagatgaaaatggcaatgagggcagcaaagagtcgtcttctgttgatgaccgttccccagatgtaaggcagaaaagagttcggaggtggcccgtgccacgatcatcccctgctaagagcattgggggtattgatagtagctttgaggatattgatgacttaggaagtggcagagatatcatgagtacttctccactacgcggagagatgcttgcctggggaaaaaatggcacccgcagtcaaacccggcatggcaattctggtggttccagtggaaggatggcaaagggtggtcgtgttaccaagttggttgaatacctacgtaataccgatgaattcgataataagttcaacttatatcttgttctacttccacttaatggacaaagcatgcctaaattggagaagccctatctcagttgccaaccgacattctctgttcgccatctttgccagtttgttgctctccaattgtctcgccatgcgaaagaagtggagatattcatcaggaagaaccccaacaatggatgctttgcatccatagatactagtgcagatgagataaaactgaatcatgacgccttagaaagattggaggaagagaaatctctttcagagctgtacccttcacttgcctctggccatggggatctggctccatggactcggtacggtgccttgaacaatgaacagatggtgggttgcaggaagaatcgtgaagtgatcaagttgctgttgaccggtgcaggtctgaccgtctgccatgccatgttaccgctgaaactagccgactggccttcgacgctcacgcagtcccgctgccagtcaaactggccgatgagtttggaagtgctctctgagtccctcttgtgctttggtgctacctccgtcaccgtggatgacattgccgctgccggaaatctcgatgagatcaccattacctccatttttgctcatggggaagatgtgggctcgtgcgtatcgagtgctgcaagctcagctggattggagtacaatccggtgtatgaaagctctgtaggaaagcaatgtgattgggtgacggttgtgcaggaaacctacgagtccacaaaagtcattgatggtctttgggtaattcctaaatggagaactcccccagatccacaggctatcaatataatcatcaatccaggtctggcttttgggactggggagcatcccacaactaaactgtgccttctgcttctacgggaaacagttaaagggggtgaacgtttcttggactatggaacaggcaccggagttttgggaattgcagctctgaagatgggtgcggcactgtccaatgggatagacatagaccctcaagctgtaacctctgcttgtgaaaatatgatgttgaatggtatagattccaacaaaatgcttgtttacttggtaccaactaatgctcagtctgcatgctttccaagtaatattgacaaatcagaagagaacaggcccactggtaaccttgagttgaagtcgtcaaaaggatcatatgacattgttgccgcaaatatactcctgaatcccctgctggagctggttgaggacattgttggttatgcaaaatctggtggaatagttgctgtctcagggatattaagtgaacaggtgccgaaagttgaagaagcttactccagatacttggagaacatctcagtgtcagaaattgatggatgggcctgccttcggggaaacaggagagcatag

SEQ ID NO: 13416 - DNA, 1311 bp, Oryza sativa
  Clone ID: TFbOSC400351j.C1.o25.fg
atggaggcgctctcccggaccgagcgtgtaggaggaggaggtggagccatggttgaagtggccttcgcttcgtccgccggatcctccgccgcggccccgcgccgccttcgtggggagctcgtcgtcagggacgctattccgtatgccggggtggctcctccgccgcccgcgctgccgctgccgcagccgcagctgcagccgcaggtgcaggctacgacgagtgggggcggcggcggggggaagattagccccgcggtgctgttcatcatcgtgattctcgcggtggtgttcttcatctccggcttgctccacctcctggtgcggctactcatgaagaagcagcatcgccgcggaggaggagggggtgcggcggccggggtgtcgcggtcggccgccggggatgacgcggggggaggaggggacgcggcgctgcagcggcagctgcagcagctgttccaccttcacgactccgggctggaccaggcgttcatcgacgcgctgccggtgttcgcctaccgggagatcgtcgtgggcggcggcggcgacggcgacaaggagcccttcgactgcgcggtgtgcctgtgcgagttcgacgccgaggaccgcctccggctgctgccgctgtgcgggcacgccttccacctgcattgcatcgacacatggctgctgtccaactccacctgcccgctctgtcgcggggtgctctttgtccctgggctcacggagaacaatccgatgtttgatttcgatgaggggttggaagaagggaggctgtctgaagattgcgataacggattcggatatcccgggcacaaggctacggaggggatgcagacgccagggactgagaagagggtgttccctgtgaggcttgggaagttcaagaatgtcgggacccagggcgctgtcgaaggcggtggcatcggcaatgccaatggtgctgtcttgaggagagaggaaggggagagcagcagcagcagcttggatgcaaggagatgcttctcaatggggacttaccagtatgttctagggacctcagagctcagggtgtctctccagccagaccgaattagaaatggcggcggcggtgtgacgagggcaaggccgacagggttaagctctgtcaatgctgagatcatggaggggaagaagatatgcgcacggaacaaaggggagagcttctctgtgtcgaagatttggcagtggtctaatctgaagggcaagctacctactggctcagatgaatgttcggaagcagggagccttccatggatgaagagaggtggcattggggatacatcaaatatgtga

SEQ ID NO: 13417 - DNA, 1281 bp, Oryza sativa
  Clone ID: TFbOSC401057j.C1.o12.fg
atggggaacatgggcagcagcggcggccaccgtcgccggaacaacggccacggccggcatcaccaccatggtcagcccaccgcgccgccgccgccgccgcagcagcagcaacaggaggtggcgccgaaccgctacgtgttcgcggcggcgagcccttacccgccgcagtacccgaatcccaacctgccgcagtactacccgcagtacgggaacttctacccgccgccgccgccatcgatgccagggccgctcccggcgccgtacgaccaccaccaccgtgggggtgggccagcacagccgccgccaccaccgccgccaccccagccgatccatgccgcaggggagttcccgcctgctatgctgcaacagcatccccactaccatggctggggtggaaacttctcgtatggtccacctacccagccgccggcgccggcgccgccgtatgttgagcaccagaaggctgtcaccatccgtaacgatgtgaatctcaagaaggagactctccgggttgagcctgatgacgagtgccctggacgattcctcatcaccttcacctttgatgccaccgtcgctggaaggagcatgactgtttacttctttgcaaaggaggagctgaactgtaaccttacagcaacgaaagaagatttactcaagccagtcactgtaacatttaaagagggtcttggtcaaaaatttaggcaaccttcagggacaggaattgacttctcgttgtttgaagatgctgaattatttaaggagggagagatggatgtatatccacttgcagtgaaggctgaaacaacattctcaattggtcaattctcagaaggggaagaacaaaagtcacaaactccaaattcacagatcacccaggctgtatttgagaggaaggagaatggggattaccatgttcgtgttgttaagcagatcctttgggtcaatggcacgagatatgagttgcaggagatttatggaattggaaactctgttgaaggtgacaccgaagggaatgatcctggcaaagagtgtgttatctgcctatcggagccaagggatacaactgtcctcccatgtagacatatgtgtatgtgcagcgagtgcgcaaaggttctgaggtaccagaccaaccgatgtcccatctgcaggcaacctgtggagcgtttgctcgagatcaaagtcaacaacaaaggtgaagagcaacagcagcagcagataccacaaccaccaccacctccttcaaccgcgcctccgcaccaacagcaagagtcgcaagcgtga

SEQ ID NO: 13418 - DNA, 402 bp, Oryza sativa
  Clone ID: TFbOSC401965j.C1.o31.fg
atggtggtggtggtgagccatgtcatggcgctcctgtcgtcggcgctgtccgggaagaaggcggcggcggaaggtgacggcgacgacgacggagggcagtgccggtgctggcgggacggcgacggcgtcggcggcgggcaggcggcggcggcggggtgctgcgtgtgcatatcggggttcagggacggggaggaggtgcggcggctgccgtgcgggcacgcgttccaccgggactgcgtcgaccggtggctggcgctctactgccggcggcggacgtgcccgctctgccgcctccacgtcggcggcgccgtggtggccgccgccgtggccgggctcgacgagctccagctcggcgacgacctcgtcatctggttctcctccctcttcgtcgccggtttctag

SEQ ID NO: 13419 - DNA, 513 bp, Oryza sativa
  Clone ID: TFbOSC20545j.C1.o13.fg
atgtctctcccgggggtgagcgcgtcgacgttcaagtcgccggtgttcatcggcctcctggccgtcatgtgcgtcgccgtcgtgctcctgctgcaccactgcgtcctcgtcaccttctgcgacaccaggaggcgccgtcgacgccgacgccgccggggcacctccacgcagcagcagcacgtgcagcagggggaggacgacgacgacgacgacgacgaggacgacatgatgagctcgtcgtcgcaggcgaagctggtggtgtgcccgtacaagaaggcggaggagtggggcgaggcgatgtgcccggtgtgcctgtcggagttcggcgacggcgaggcggtgcgcgtgctgccggagtgcatgcactacttccacgtggactgcatcggcacctggctccgcgccaacaccagctgcccgctctgccgcgccgacaccacgcccagctccggcgatctccaccaccacctctccatctccgtctccctagaagaaatcctagtgcgcacctag

SEQ ID NO: 13420 - DNA, 492 bp, Oryza sativa
  Clone ID: TFbOSC900108j.C1.o13.fg
atggacgacgacggcgactggatcacagcgaggtacctcctctcgtcgatcctcgggcggaacccgctcgtcgtcgattacgtggacgaggagtccttccccgtcgaggaccctcccccggtggccggtggcgcccgtggagggaggcaagcggtggtgtcgcagccgccggtggtgcgcgcgacggcgggcgtggccgggacggtgtgctcggtgtgcacggaggagatcgcggtggcggacgccgtggtgcgtctcccctgcgcgcactggtaccacgccggctgcatctccccgtggctcggaatccggagcacatgccccatgtgccgcgccgagctgccggccagcgacgacgccgccgaggaaggcggtggtgccggccgggagaagccgccgcgcgcgggccgcgccgggactagcgccggcggcggtgtcaggcgtgacgcgtcgtatgagctcctcgccggcggcggcgtcttgtctggctga

SEQ ID NO: 13421 - DNA, 1242 bp, Oryza sativa
  Clone ID: TFbOSC412800j.C1.o2.fg
atggggtcgccgcgaggacgccgccgcggcgacaatggccgcctcctcctcctcgccgccgccgccgtcgtcattgcctcgctggtcggcggcggcgcggcgcagccgacgacgtccgggcccggcccgaactacttcaaccccaagagcttcaacccgtccatggccgtcgtgatcgtggtcttggtcaccgccttcttcttcctcgggttcttctcgatctacatccggcgatgcgccggcgggccgttgggtgggcccggggggtatggcgtcggcggcggcggcggtggacgtgtgggtggtgggttcacgtttgcggcggcgcggtcgaggagggtgagggggcttgaccccgccgtgctgggcgcgttcccgaccatggcgtacgccgacgtgaaggcgcacaaggccggcaagggcgcgctcgagtgcgccgtgtgcctcagcgagttcgacgacgacgagacgctccggctgctgcccaggtgctcccacgcgttccacgccgactgcatcgacgcgtggctggcgtcccacgtcacgtgccccgtctgccgcgccaacctcgccttcgacgccggcgtcccgccgccgccgctggcgccgccgcatgcgttgaccaccgggcaagatgttgcggctgcgccgccgcagccggcggcgccagagcaggtgacggtggacgtcgtcgtcgcggatgccgaggagacggaggagaggatcaggagggaggaggcggccgagctgatgcggatcggaagcgtgaagcgcgcgctgcggagcaagtccggccgccggccgccgcagttcccgcggtcgcacaccacggggcactcgctcgccgccgccgccgccgtgcccgccaccgccgacgacgccgcggagcggtacacgctgaggctccccgatcacgtgctccgggaaatcgtcacctcggcgaggctacgccgcacgacgagcctccaatcgttccgcaccaccgccgccgccggcggcggcgcccgcgccgggaggagcgtccggctcggccagtccgggaggtggtccaacgtgtcgtcgctgatgcgcacgttctcggccaggctgccggcgtggggctccgctcgacgcggcgccgaagccgactctccggggaaggacggcgccaaggtcgccggcgactgcaccgcctccgtggagcaacactgcgacggcggcggcggcggcgcgtgcccacgtccacttggtgaccatgtatga

SEQ ID NO: 13422 - DNA, 549 bp, Oryza sativa
  Clone ID: TFbOSC423581j.C1.o8.fg
atgagcgcggggagcccatcgccgggtggcggcgatggcggcggcggcggcgggagtatatttgggtcgggtggcatcggcgggttcggctacggcgtcggcgcctccgtcggcgtgctcctcgtcgtctccaccgtcgcgctcgccatctacttctgcagccgcacgtccatgccggtggccgccgccgccgccggccgcccgccatctccgcctcgaccacgcgacgacggcgacgtcgagaccggcaccggcatcgacgacgcgacgctggaggcgttcccggaggtggtctacggcgaggcgaggaaggctcgcggcggcgcggcggcgacgcagacgtgctgccccgtgtgcctggagaactacggcgacggcgacgtgctccgcgcgctgccggactgcggccacctgttccaccgcgagtgcgtggacccgtggctccggcagcggccgacgtgccccgtctgccggacgtcgccgctgccgagccccatgccgacgccgctcgccgaggtgacgccgctggctctcgtcaggccgtcgtga

SEQ ID NO: 13423 - DNA, 1731 bp, Oryza sativa
  Clone ID: TFbOSC401769j.C1.o7.fg
atggaatggggagacacagcaggatggctagcggaagaagataatgccatcgaaccatcgctgagcggcggcggcgggcgagtgcagggtacacggatcgcgctcggccaggctgcatccggagctgtgtgtctcggcgcaggaaaagatcgcgtcccggaggcctacgtcgtcgtcgtccatggaagaagaaggggaagaaggcttcgggtaagggcaatgttgaagttgaacaatgggcgaaccgcggtctcgccgctgcggggctctggagccgtgggggcagaggcgtacctggaaggaatcgactcctcccgctgggcgacggcggtggcggcggcggcctcgatggggacggtcagcaggttgtctttgaaacatttactcaggtgttttgacttctactctattgataggaagttttgcaacggtaccaacctcaatacactgtatcagtaccactggtctatgagactctctacaggttcttggcacagttggtacccagtaaagcacacggaaatcaaggtagtgagcatagagaatagtgaggttctcgcagatggttcaaagggggttgtgaaagtcagaggacctcaagtgatgaagggatattacaaggatcattttttccagtttactgatgccaagatgatgggttgctccttccaaatcagccctattctaattgttaacgaatcatttacggtggataatggtttgctaacatccactttgaaaataaggagggacaagtttcgctcagcaaatgaaacagtagatcacttgtttgtgtcttgtccactggctagatttgcttgcaatgtgattgcaagtgcttttggacttgaaaagatcaatagcattcaacacttgttggaagcttggttaaatgaatttgacaaaaagaagaaacaactagttgcagtggggattgcagccacactaggtcggtggaaggccaaagaagtctacaatgtgggttcgacacttcgacttgctaaagcaggttgcaaaagagattatataattccaagtatggctggaactttgatagaagacggctggagcttgtgggcatatattctgccgtttatgcctggcgcattacatgtctcgaggacctgcaatcttattggttgcgtgatttcaatcctgcaccctggtaagggaaatgcagatgaagttgacgggatcagatcggaagatgtggcttgtctcatttgccaggaacttttgtttgacccatcggtcctgaattgtggccatgtttactgcatgccatgtttaacatctgtgggtggagaggaacttgaatgccaattttgtggagctccacatcccgctgaacctacagtatgctcaaatctgaagaactttctgaaacatcgcttcgaagaactgtataactcaaggcaagagaaaagttcaggtgttccaagcaggaaggaaggcactcgcaaagggaaaccttcagagatattgcatacccacgttggggtgggctgtgatggttgcggggtcttcccaatccaagggagaagatactcatgcaaggagtgtgaggcaccaggtttagatctgtgcgagaaatgcttcatgacaggatctactgcagagggacgctttgatcagaagcatactgcagatcatgacatggaactggatgactcattccttttccccaacttagtggattacatggatgacctatatatcgatatgacttga

SEQ ID NO: 13424 - DNA, 942 bp, Oryza sativa
  Clone ID: TFbOSC400772j.C1.o73.fg
atgggcaacatcgcgagcagcggcggcgctagcccacgtccgccgccgccgcatctcgaagcctatagacacggggtgccgcccccgtactaccacagctaccctcgtccgccccccggcgccgccgcgccgccgccggtgccggtgcctgcgcacgtggagcggcacagggccgtggcggtcagcgtcggcgtcaacgtcaagggggacaccctgcggctggtgcccgacgacgacgacgacgatggccgcagcctactcctcgccttctccttcgacgccgatggccccggaagcataactgtctgcttctttgcacaagaagataagtgtgccttgaagaccgcaaaggaaaatttgcttcaacctgtgaccgtgccttttaaggaaggtcgaggtcaggagttcaagcaaccaagtgggtcgggaatcgatgtctctcgttttgaggaatctgagctaactaatgttggggaaggtggtgtattccctgtagcattcaaagtacaaatggatgtgtcaggcaaccaagaatcagaaggggcacatgagaccgaacaatcgaaatatcttgttaaatatgctatatttgtgaagaaagacaatgctgaatatggagttcatgttgtgcagcagatcctttgggtaaatggaatcagatatgtcttgcaggaaatatatggtattgggaacacagctgataagaatgctcatgaggatgattccgggaaagaatgtgtggtttgcctttctgaaccaagagatactgctgttcttccatgcaggcatatgtgcctgtgcagggagtgtgctcaagttttaaaatatcagaccaacaaatgcccaatatgcaggcaacctgttgagggccttcgcgagatagaggttgataacaaaccgattccccaacaaggatctcagcagttaacagcacctcaataa

SEQ ID NO: 13425 - DNA, 912 bp, Oryza sativa
  Clone ID: TFbOSC400964j.C1.o102.fg
atgacgctctcggagcagctgtccgcgcccgaccaggccatccgcgacttcctcaagatcccacacgacggcctcggcggcggcgacggcgagggagggaggatccccgccgccgcgggcgcctccggtggcggcggtggcgtcggtggcatgatcaactggaagccgctgcgtgaccggctccggctacgccgcgccgcgagcgcgtggatgtccgcgtcgcccaagcccgccgcgtcgaacagcggcggcggaggcggcggcggcgcgacgctgagcagcagcaacagcggcagcaaccacagcaacaagtacaactactcccccggcgaggccgcggcggcgttctcgcgcaccttctcccgcacgcggtcgctccgcccgacgccgaccttctcgcgcgccacctccacccgcctcggagccacagccttctccagcggctccaggcgcgccgcggtcgacggcggcggccacgccaatgaggacgacgacgaggaccacaccgacgacgacgacgacgacgacgaagaggagcaaggcaaggacgacgcgcccgcggcgcagatgtcgctgatggcgctactggagcaatcggacagccagtgggactcggaggacgaggacgaccaaggccacggcggtggcggcggcggcgggggcaacggcggcggcggcggcggcggcggcgcgcgcaagaacggcgacggcgacgacgacgaggacgacggcgaggggcgggaggaggagatggtgcacgtgtgctgcgtgtgcatggtgcgccacaagggcgccgccttcatcccgtgcggccacaccttctgccgcctctgctcccgcgagctctgggtcagccgcggcaactgccctctctgcaacggtttcatccaagaaatcctcgacatcttctaa

SEQ ID NO: 13426 - DNA, 1047 bp, Oryza sativa
  Clone ID: TFbOSC416024j.C1.o2.fg
atgggcgtcgccgccgccaacgtcgccgccttcgttttgctggccatcgcgcccgtggccgccgcgccgtcgtcgccgcctcgatctggcggcgactccctgagtttctccgacgtgatcagcatctccttcttcatggccgtcttcttccccgtgttcatcgtcctcctcgcgttcgcgtgcctccgcctgttccggccgctcgacgacgacgacggcgagcccgcgctggcggacacgtcgtcgtcggagtggtcccgccgggggggagggggcggcaacagggcggggctcgacgccgcggagatcgcggcgctgccgctggtgtcgtaccgcgacgccaggcggcaccggatcggggacgcgcggggcgacccgctggagtgcgcggtgtgcctcctcgagttcgaagacgacgacgccctccgcctcctcccggcgtgcccgcacgcgttccatcccgagtgcatcggcctctggctcgagaagcacgtcacctgcccgctctgccgcgccaacgtcctcgacgcgccgccgccgccgccccctcccccgccttcgctggagcaggacacggcgtcgccgccgccggctcacgagacggtggtggtgatcggcgacgccggcgccagcgaggaggcggaagcggaagagaggatcaggatccagtgcctcgcgggggtccgtcgcgcggcggggcggcaggctctcccgcggtcgaactcgacggggcacgagcgcggcggcggcgggatggagcggttcgcgctgcggctgccggagcacgtccgcctcgagatcctcatgtcgcacaggctgaggcacgtgacgagcgcggtggcgtccgtgcgcgtcagggaggggagcgcccacgacgccggcgccgtgcggaacgccgtggcgaggctcctgtcgctgttcgtgcccggagccgggtggaagggagacgacgagggcaagtccagcaaggcggcggaagggtcgtctcgccggcggcgcgacgagtcggcgaggggaggagtcggagaagagaagaggagcgagtaa

SEQ ID NO: 13427 - DNA, 732 bp, Oryza sativa
  Clone ID: TFbOSC900160j.C1.o18.fg
atgagcgaggagcagggattgattcattgtgctgcgctgttgctactgctgctgctggaacacgttggagatgcagccgggagggctaatgctatccagaggaactatggtggagcatgtgtgcagatgaggttgtcgtgcagctcactggcgccattctttctttacctcatccagtggctggattgtggctgctgttatgctcttcccagttatctaggcctttttcacattctcatttgcaaggtttatgcagatggagatagctcagtatcaacgtatgaaaggcgtgcaagccttagagaattctatgccttaaacaatctctgccttccagcgatcatctaccctatccttcaacagcttgagggtagtttgattgagagggacctgaaagggaaagggcgatgtaaagacatagtgagtaggaagcggctcgaagattggaggaagctttgtaacaaggatgtggaaagggaggatgaatgtgggatttgcatggagacatgcaccaagatggttctgcctaattgcagtcatgcaatgtgcataaaatgctacagggactggtatagaagatcagagtcttgccctttctgccgaggaagccttaaacgaattcgctcaagagacctgtgggtgctcacaaattacaatgatgtggttgatcctgtaactctagaaagagaaaatgtgaagttcattgtattgctcatggtctctttgttatga

SEQ ID NO: 13428 - DNA, 504 bp, Oryza sativa
  Clone ID: TFbOSC400184j.C1.o4.fg
atgagtatgccgccgccggtgccgcaggagaaccagtccgttggcaaagggacggccatcttcagctacacctgcgtcggcctcacgggcgtcgcgctcgtcgccgtcgtcgtcttctactgcaaccgccacgtccggaggcgtgcgccagtcgtagccgccgagggcgccggcggcgccggcgggcgagaggacgacgtactgcgtggcgtcgctgacgtggcggccaagatcccggagttcgcgtacgcggggtcggcgaggcacggcggcggcggcgagtgctcggtgtgcctcggcgcggtgcagggcggcgaggcggtgcggcggctgccggcgtgcaagcacctgtaccacgtggagtgcatcgacatgtggctggcctcgcacgccacgtgcccgctctgccggacggaggtcgagccgccgccgggggacggcggcggccgacctgcgccggcggcagatgagtcgtcgccgacggaggcgctgccaccggtgtag

SEQ ID NO: 13429 - DNA, 1203 bp, Oryza sativa
  Clone ID: TFbOSC900298j.C1.o28.gm
atgacgagagcaagccgagcgtcgctgctactgttttgcttcggcgggggagatgatgattacgagtgccgggcgtgctacggggtctccgtggcgtgcgtgtcgctgctcctgttctgcgtgctcgcggcgtcggtcagcgtcaccaaggcctgcgccgtggcggggctcgccgtgctgctgttcggcgtgatcgggtggttcgtgccgctgtgcggcgcggggggcccgcccgcgcgcgccggcgccgccgcggggggcggggggcggggagcgggcgccgcgggggtgacgcggtgcgcgtgccggctcgtcggcgcggcgctgatcgccacgctgccggcgttcgtgttcgagggccccgcggagggcggcgccggcggaggcggcgggagcaagcacggcggcagcgtgctgtgcgcggtgtgcctggaggacgtggcgcgcggcgagacgccgcgaatacctcgggccagaaaccttaaaaccggccgcgccgcggggccgacgccgacgccgagagcgcgcacccggcgcgccacgaccgggctgcagatgtttaacggcgaacggcgcccggcggcgagccagcgcggcggggatggtgggtacctcgcgtgctactccgtcgtcatggtctgcgcgtcgctgctgctgctgtcggtgctcgccgccacggtgagcatcgccaaggcgtgcgtgttcgccgcggcggccgcggtgctgttctgcgccgtcggctgcgtctcgcggtggtgcggggatgccggcggggctccggcggcgctgccgacgacagcagcggcggcggaggaggcgcgggcgagggcgcccgcggcggcggcgtgcgcgacgtgcgggctcgtcggcgcggcgatcgacgcgctcccggcgttcgcgtacgcgcgccctgcggccgacgacggcggcggcggcggaagcaagtcggggaggtgcgcgctgtgctcggtgtgcctggaggacgtccaggccggcgagatggtgcggcagctgccggcgtgcaggcacctgttccacgtgggctgcatcgacatgtggctgcactcgcactccacgtgcccgctctgccggtgcaacgtctcgccgccggcgaccatcgtggtgaaagccacagccacgtcgacggccaccgccgcggcggcggcgcagcagctaccggctgacacgttgccgccggtgtga

SEQ ID NO: 13430 - DNA, 426 bp, Oryza sativa
  Clone ID: TFbOSC932j.C1.o2.fg
atggacgcggaggatatcgtggactgtctcatgtggggcatcatctttttcttcctcctcgcctgcatcggcgtggccctctgcttcctcgccctcaccatcgccacggtggtcggactcatccgccgccgcaacgacgacgccaataacaagtacgacatgctgatcgagaggctgctgctacgacctaaagacgaccaagacaacgagcagtgcgtcatctgtctgtcggagagcgaggatgatgtcgacgacggcggcggcgagcgggggagatggaggatgctgccggggtgcgcgcacgcgtttcacaaggattgcgtcgtcaagtggctgcgcaaccgcacaacatgcccgctctgccgttctgacgtcgccgtcgccgccgcagatgacattattagcaccgcagataacatggtctga

SEQ ID NO: 13431 - DNA, 2160 bp, Oryza sativa
  Clone ID: TFbOSC20084j.C1.o3.fg
atggcggtggcgaagtgggagcgcgccaagcgcgcgcttgccaccaggctctgcgtccgcgcgccgagggtgcgggcggcggcggcggaggcggagggggagggggaggagggggaagggagggggaggtcggtggccgcctcgccgcccgcgcatgtggcctcctcgcggcggctgtcgaggtgcgggagcaggagctccacgaagatatgtgccatttgcctcggaggaatgtgttcaggcaatggccaagccttgttcaccgcggaatgctcccacaagttccacttccactgcatctcctccagcgttcgccacggcaacaccgtctgcccgatttgccgcgccgtgtggaaggagctgccgttccagggccctctccctgcagcagcagcagcagatgctagtcttcttggaacagctcgagtgaaccctcacccactggatgacaggcatcagcatcagcgaatggccgttgtccgcaggctgtctcgcggagacagcgtgacccggcaatggcagctcccgatctttcgtacgctggatggcggcattttcgatgacgatgaacagttggatcttcatcctgctgaagatgtggttggaactcaggatgttgattcgatcgtcgctgatgaaatggcgcctgcttctgttgggatcacgacgtacgctgcgttcccggcgatggaggagtctgtgatggttgaggagtttgcggtgttgatccacctgaaggctccgtcttctccggcgacggtgacctcccgcgcgcccatcgacctcgtcaccgtgctcgacgtgagctggagcatggccgggacgaagctggcgctgctgaagcgcgccatgagcttcgtgatccaggcgctcggccccggcgaccggctgtccgtcgtcacgttctcgtcgtcggcgaggaggctgttcccgctgaggaagatgacggagtccgggcggcagcgcgcgttgcagagggtgagctcgctcgtcgccgacggcggcaccaacatcgccgacgcgctgaggaaggcggcgagggtgatggaggacaggagggagaggaaccccgtgtgcagcatcgtcctcctctccgacggccgggacacctacaccgtcccggtgccgcgcggcggcggcggcggcggcgaccagccggactacgccgtgctcgtcccgagctcgctccttcccggtggcgggtcggcgcgccacgtgcaggtccacgccttcggcttcggcgccgaccacgactcgccggcgatgcactccatcgctgagatgtccggcggcacgttctcgttcatcgacgcggcgggctcgatccaggacgcgttcgcccagtgcatcggcggcctactcagcgtggtggcgcaggagctgcggctgagcgtcgagtgcggcgacgacggcgtgctgctgacctccgtcaggtcgggcggctacgcgagccacgtggacggcgacggccgcggcggcttcgtcgacgtcggcgacctctacgccgacgaggagagggacttcctcgtcaccgtgcgcgtcccggcggcgcgcggggtgtccgccctgatcacgccgagctgcacctaccggagcacggccaccatggagaccgtccgcgtcgggggcgacacggtgaccgtccctcgcacggtggacgcccccgtgggctacgacggcatgtcgccggaggtcgagcgggagctgcatcgcgtccaggccacggaggacatggccgccgcgcgcgccgccgcggagcggggcgacttcgagctggccgccgccatcctcgacgagcgccgcggcgtgctcgagtcgcgggcggacgacgacccgcagtccgtggcgctggcggcggagctgagggagatgcaggacagggtggagacgcggcagcggtacgaggagtccggccgcgcctacatgctcgccggcctgagctcccactcgtggcagcgcgccacggcgcgcggcgactcgacggagctcaccagcgtcatccatacctaccagacgcccttcatggtcgacatgctgcagcgctcgcagacgctccagccggaggtcgtcgtggcgatgagccgctcggcgccgctaccggcgccgtccctgtcgctgtcgccgccgccgccgccgtcgcagctgcggcgccgctcgtga

SEQ ID NO: 13432 - DNA, 1500 bp, Oryza sativa
  Clone ID: TFbOSC400622j.C1.o109.fg
atggaggaggccggcgacgaggagggagagcaggggcttcgcctcgggggagtgggggacggcgccgacggcgaggaggaggtggctcgaggagtggtggcgccgcaggtgctcgagctgagctcgtccagctcgggcgaggaggggggctcttgggaggaggaggagagccagggatctgtcgaggtgacgagaggcgggggtggagatcgcgaggctagggtttccgagagccgggacagcgcggaggtgaacggcggcgaggcggagagccagtcccttcccggctgccccatttgcatgaacgcgtggaccgcggatggcgcgcatcgcgtaagttgcattccttgtgggcatgtctatggcagatcttgcttagagagatggttactgcagtgtcggaagaaacctgcgacatgtccccaatgtggtaggaggtttaaactaaataacattatcaacctctatgcaccagagatttctgttccaaataatgatcttgaaaagcaagtattgtcattgagggagaaaaatgaatctcttgagaagcaaaatcaagaattggtccaggagataaatgagcacaagaggcagattatactgcagcaaaatttcataaatgaatcaagcttaaagagaaagaacgagtttttccttgatggagctcgagtcatgggcatagatgcatcgagccagattatactcacttctggcagggcacctggaattggtgctgaacatgtcctcacaaaggctcctggctggtcctgttcaggcgatcaaaatagtccgaatcacatatatgctggactacagaatggcatgctgttgacctttgatattcgccaaactgttgcaccgttgcattccatgatgggtctatctacacaccctgttcatacgatccactctgttgtagatggcggtggttccaggaaggtcatttctgcatcttccataggaccctgcatctgggatgttgacgggagcagaaacaggccagatttgctaaatggaatggaaaaccacggagtctgcatctctcttgcgtgcaatcctccatcaagtgatctcctagtggcttccttccggccaaaagttgagctgtccgacgacggcacatctcaagccggcaaatcacagtcaccgacaccctctgcatcagggaagctaggctgccatgcactcataaggaggacgagcaacacgtccttcgccagagaccaaatctgcagaggcaatgtgagtggattgcgaatgtccaaatccgcaatcatacccttcaccggaagaagcaatcagcaacatctcttcgcctatggcgacgagtcgctgcgcggagtccggacatggcggctgccttcactccagacgtttgctgatctcaggccacaccggcaaccgatccttgatctgaggtttgcagagagctcgtcgacaggggaaaggtaccttggatgcttgagcgaggacaggctgcaggttttcagagtaaggtag

SEQ ID NO: 13433 - DNA, 528 bp, Oryza sativa
  Clone ID: TFbOSC400283j.C1.o29.fg
atggacctcgtcggcgccatggcctcgctcgtcttccttcaccttctgtgtgcggggtggcggatgctgaggatgtggacggcggcggggtggccgtggccgtacctggcggcggggaccctggatcaggcgctgcgaccacagtgcaagctgtgtaaacagaagatgatggccggcgccgtggtccgcgcgctctcctgcgaccacgtcttccacaaggcctgcgtcgacgagcgcctccgcaaccgcaagcacggcatgagatgcagaatatgcaaccgtgtcgcccgctgcatgctgccgtggaaggcgtcgccggcgaacctgatagaccacaacgctcagaggtttcagcacatccgtgctcgcggcggcgtcaggacactggaccgggcgctgaacgacgcatgcccgatctgccagcacaggatggtggcccgcgacgatgtccgcacgctctccggtgggcatgacttccatgaggattgcgacatcgcgaagtggctccgcgacaacaagaaggcctga

SEQ ID NO: 13434 - DNA, 708 bp, Oryza sativa
  Clone ID: TFbOSC401583j.C1.o29.fg
atgggaggattttgctgttgcctctgcactgacgatttcgaggagtacgctcatccaaataaccctatctataggcaaggtgtatgcctaaggaattttttccacaacttttttggcgggtatactgccacattccagaggctcgaatctagacctagcaacccagctcaaggggctgctccattggcatccactaatccaagtaccaatataactgacaattcattatccgaaacttatcaccttgtgtccagacctccaccgtatgatactgatcctagatatgcccgtgttcaaagagagggtttggtatctaggcgtgaaaagtctataaatctaacacaagaagagtcactggctcttaggcgaaatggcagcagctctggcattgaacatttagctgctcagaagaaatggagcagcactgaacctgagggtgaatataaagtccatcgctctgaatccaccaagagtttatccgcaaaatcgtataacagcagttttgcagttgtcacttcagaagatgaagatgtctgccctacttgtctagaagaatacactccagacaatccgaagattatagctaaatgctcccatcattatcatcttagttgtatctacgaatggatggaaagaagtgatacttgtccgatttgtgggaagtggaaggcaaaagatctacagtgtgatatgctggagagtctgtaa

SEQ ID NO: 13435 - DNA, 669 bp, Oryza sativa
  Clone ID: TFbOSC415227j.C1.o3.fg
atggaggtggcgccggcggcggccatgacgagggcggaggaggagagtcgccgtcgcgcggcgacgcgcctccccaggctgctccgcggcgtcgtctccggcatgctcaccggtatattcgccgtcgctgggggcttgacgggggcggtcaccggagcattggccgggagagcctccgacggcggcgttctccggggagctgggctagggacatttgctggtgctgtcctctccattgagatccttgaggcctctcgcgcgtattggtgccaagatcgatcaagctcgcctggttcattgtccatgggtgattttgtaaagcagcttattcatgctcgttttgtgcaagagcagaatgaggcatcaggacatatcacatatcgttggcaggttggtattgcagacgttgtcaatggtgctgtacatgaaatcctaggagatgttccatccggagaagggctttcaaaatattctttaatgaaattgccataccatgtcgtgatagatcataataatggctcaattggggaaagtttgtcttgccctgtttgcctgcaggatgttgtggctggacagacggtgaggagattgccgaaatgctctcacactttccatcagccttgcgtggacaaatggctcgttggccatggctcgtgccctatgtattaa

SEQ ID NO: 13436 - DNA, 1047 bp, Oryza sativa
  Clone ID: TFbOSC401237j.C1.o13.fg
atggcctccgaggacggctgcggcggcggcaacccgccgggggacgcagcggccgcgccgccggtgtggaacgccgcacctgcggcgggagctggctgcggcgatctggaggaggacctccggttccagtgctgcgtctgcctggagcttctgtacaaaccagttgttattgaggatgagaagcgtgtggatacatattctccacaaatcattgagtttttaaactccaagagcaacaattgtgaaattgatggggagaatagacctgaagaaagtaatagtcgacctccacaagaagttacatctgatggcaacactatcaatgggcatccgaagaaagttaagctggaggacgtgtcatgtgctctttgtaaggagctgttgtatcaacctgctgttcttaattgtggtcatgtgtactgcatgtcctgtttgtcgtccttggatgatggtgcactcaaatgccaagtttgtggaggtcttcatccaggagattttcctaatgtttgcttggatttggaccattttatcgaagactattttccagcagaatatgacttaagacgagagaagattaagcttttgaagggtgaatgcaatcaaggatcatcttcaggtacttcatgcataaaagaaggcaggggtagaccaacaaataaggaaaaccgtgcacatcaggatgatgacttgtcagatgttcatattggggttggatgcgattcatgcgggatgtatccaatacgagggaagaggtacaaatgtaaggactgcactgaattaattggatttgacctctgcgaagaatgctacaatacaaaatcgaaacttccaggccggtttaatcagcatcatacccctgaccacaggatggaacttgatcattcagcactcttcaataggttgatgaggctacaagggatacacgaggagggcccaggagagataatcatagaaggtgcatttgttgctcctgacgctgtggtgcatataatagcagatgatcatgaggaaatcgaggataacggtgaggatgatcacttgctctag

SEQ ID NO: 13437 - DNA, 696 bp, Oryza sativa
  Clone ID: TFbOSC18908j.C1.o4.fg
atgggcgccaatgacggccacctcgacgccaccagcaacaacaggggcggcctgcacgagcagaccaccaccggctgcctccccgtcgaccagtcctgcttcgcgctctcccggctgtcgtaccgccgcagcagcagcagcaacccgcgcgcgtgctgctccaccacctcctacctcgaggtcctcgccatctccttggcctcgctgctcgtcatcgtgctcgtgctctgcgccatacggtgctaccgcatgcggcgcgcggtgaaccgggtcacggtggcagccgcgtcggcggcggcggcggcggcggcggccgggaacgtcaccaacaagaagcggccggcgccgggcctcggcgaggacgccatcgccgcgctgcccaagttcgagtaccgcggcacgggcgacgagtgcgaccggtgggagtgctcgatatgcctctgcgcggtggccgacggcgaggtggccaggcagctgcccaggtgcatgcacctcttccaccggggctgcgtcgacatgtggctcgtcgcgcacaccacctgccccgtgtgccgggcggaggtggtggtcaacaaaccgccggacgaggacgacggcaggtgcgcggagacgccggaggatgaggccgcgccgccggcgtcggcgctggagccggcgagattggagaatggcgagagggacttggaggcgcaatag

SEQ ID NO: 13438 - DNA, 558 bp, Oryza sativa
  Clone ID: TFbOSC404797j.C1.o3.fg
atggccacggcgaacggcgtcgacctcgcgacggcggggctcctgcggctgctggcgatggggatggggccgtccgtgcagattccgggagaaggcggggttccggtgatgatggtgcagcacatcatcatcggcgacgacggcggcgacctgttctccggcgggctcggcggcggcgtgccccccgcgtcgaaggcggcgatcgcctcgctgaaggaggtgaaggccggggaggacggcgaaggcggggactcgctgggcgactgcgcgatctgcctggacgccttcgccgccgggaaggagatgccgtgcgggcaccggttccacagcgagtgcctcgagcggtggctcggcgtccacgggagctgccccgtctgccgccgcgagctccccgcggcggaacaacaaccaccagaggagcagcagagcggcggcgcggacgccggcgagaggcggaggccgagggcggtggtggtgagctacgtggtgctcggagacggcggccgcggcggggagagaggggagccatggaacattaggatagaggacgtggattag

SEQ ID NO: 13439 - DNA, 507 bp, Oryza sativa
  Clone ID: TFbOSC926j.C1.o2.fg
atgcggcggctgggtgacgtcgtggaggcgcctgcgctggtgctgacgccggcctccatgcagcaggccggcgggagggggagctccggcgccttggacgccagcatggtcgtcatcctcgccgcgctgctctgcgtcgtcatctgcgccctcggcctcacctccctcatccgctgcgcgctccactgcgcccgcggcctctcccccaccacggcgacgccgacgccgtcggtgtcgacagctgccacggccgggctgaagaagacggagctgaggaggattccggtggaggtgtacggcgccaagcaggccggcgtccccgacggcgagtgcgccatctgcctgggcgacttcgccgacggcgacaaggtgcgcgtgctcccgaggtgccaccacggcttccacgtccgctgcatcgacacgtggctcgccgcgcacacgtcctgccctacttgccgggactccattctctccgtccatggagtcgtcgccggcggccaaacatag

SEQ ID NO: 13440 - DNA, 900 bp, Oryza sativa
  Clone ID: TFbOSC400397j.C1.o48.fg
atggcggaggaggcggcggcaggcgggctgtactactgccacatgtgcgcttcgacggtgagcgccgtggcggcggcggagggggaggtggagatcaagtgcccgtactgccacagcggcttcgtcgaggagatcgagtccgcgcgcggcgtcgccaccggcggcggcggcgcgatctcctccgtctgggcccccatcatcgacggcatggttggcggcggcggcggcgacgccgtccgccgccaccgccgcagccgtcgcctcgcggacgccgccggcgcggacgacggctactaccgcgacctggccctcctcgacttctccgagagccggcggcgcaccgccgcgctgctgctgctcatgcaggagtttcgggagcgccagctccagcgcctcgagtccgccaccgccacgatctccgccgccgcggccgaggccggcgccgtcgtcgggacctcgagagacgcggagggcgtggcgctggccgactacttcctcggccccggcctggacgccctgatgcagcgggtgggcgacggcgacgcggggcggcagggcacgctcccggccaagaaggaggccgtggagtccatgccgacggtggaggtggccgccgggggcgactgcgactccgcctgcgccgtctgcctcgaggactacgccgccggcgagcgcgccacggaaatgccgtgccggcacaggttccacgccaagtgcatcgtgccgtggctcaagatgcacagctcctgccccgtctgccgcttccagctccccaccgacgacgacgacgactcctccaagtccgcacgcggcggcgccgcccactccggcggcggccggcggttgtcccagccgtcgccggcgtcgacgggggaggcctgggcaggttgccggccgtga

SEQ ID NO: 13441 - DNA, 538 bp, Oryza sativa
  Clone ID: TFbOSC401498j.C1.o12.gp
atagtttaatttgtttttttataacttgtaaaagttaaaatttaatttacatttttataacgatataacacatgttaatacatcatctcaaatatttttaaattttttcataactgtttgactaacatacgaacaaccagaaaacgtcccctccagttgaaaatccactgtccacgcgcccacacgaaacctagctaataaccatctatctttcggcgacgatctcccccgtggcggggctactactcctccctgccacggtggtctccacggccgccgccgccgccgccatcttccgctccccctccggcgcccggccaaccacgtcggcgcggcacacggggcaccaccggctcttcctcagccacgagtccacgcacggcgcgtggaagctgtgctcgcaccgcggcagccgccggcaccggtccccggcctccagctcctccaggcacaccgcgcagtccccgccgccgccgcccttgacgacgtcgtggcacggaagcgcgccatatctctttttgcggacaggccccgttcc

SEQ ID NO: 13442 - DNA, 567 bp, Oryza sativa
  Clone ID: TFbOSC402160j.C1.o21.fg
atggagacggaggaggacgaccatcgcctgcacccccgcacgcgcaccatcgccgacctgctcaaccagctcgaccagatccactccacctcggcgacaagaaccaccggcggcggcggcggcgtggcgcctgcctcggacgaggcgatcgaggcgctcaaggacgtcaccggcgacatcgatcagctaccggcggagtgcgcgatctgcctccacggtggcctggacgcggcggcggcgcccgcggggtggaaggagatgccgtgcgggcaccggttccacggcgggtgcctggagaagtggctgcgcgcgcacggcacctgccccatgtgccgccaccagatgccgaccactaccgcgccgccgccgcctgcagccgagcaggaggattatctggatggtgatgaggaggaggacgccggcgacgacgacgaggtggaggctggtgtggggccgctgccgttggagttgcgagtggtggtagcgcactcgagcggcggctatggaggagtggcggcgtcggcttcgactacgaggcggctccttgcatggagcacgacaatctaa

SEQ ID NO: 13443 - DNA, 525 bp, Oryza sativa
  Clone ID: TFbOSC406125j.C1.o2.fg
atgggttcgcgttccggctcgacgacgacgagtatgccgccggtgccgcaggagaaccagtccgtgggcaaagggacggccatcttcagctacacctgcgtcggcctcacgggcgtcgcgctcgtcgccgtcgtcgccttctactgcaaccgccacgtccggaggcgcgcgcctgtggtagccgccgagggcgccggcagcgtcggtgggcgagaagacgacgggcgcggcgtcgctgacgtggcggccaagatcccggagttcgcgtacgcggggtcggcgaggcacggcggcggcggcgagtgctcggtgtgcctcggcgcggtgcagggcggcgaggcggtgcggcggctgccggcgtgcaagcacctgtaccacgtggagtgcatcgacatgtggctggcctcgcacgccacgtgcccaatctgccggacggaggtcgagccaccgccggaggacgacgacggccgacctgcgccggcggcagatgagtcgtcgccgacggaggcgctgccaccggtgtag

SEQ ID NO: 13444 - DNA, 522 bp, Oryza sativa
  Clone ID: TFbOSC412156j.C1.o1.fg
atggcgtcgccgtcgtcgtcgtcggtgatctccatcttcctcctggtggccggcgtcgcgctgatgctggtcgtccacatcgtcgtcgtcttctgggcgctgcggcgcgggcgcggggcgtcgcgcggcgaggaggaggcggcgcccgggcgcgcggcggaggggaacggcggtggagcccgaggaggaggagggaagggcctgtccgccgacgagatcggcgcgctgccgtgccacgacgtcgtcaagggcggcggcggcggggactgcgcggtgtgcctggaggagctggaggccggggaccggtgccggcggctgccgcggtgcgagcacagcttccacgcgccgtgcgtggactcgtggctgaggaagagccggtggtgccccgtgtgccgcgccgacgtggttgcccgggcgccggagggggagcggaagatggcggcggcggcggcggccgtgaagaccaccgtggcagggaggagtagtagccccgccacgggggagatcgtcgccgaaagatag

SEQ ID NO: 13445 - DNA, 714 bp, Oryza sativa
  Clone ID: TFbOSC412156j.C1.o1.gp
atagtttaatttgtttttttataacttgtaaaagttaaaatttaatttacatttttataacgatataacacatgttaatacatcatctcaaatatttttaaattttttcataactgtttgactaacatacgaacaaccagaaaacgtcccctccagttgaaaatccactgtccacgcgcccacacgaaacctagctaataaccatctatctttcggcgacgatctcccccgtggcggggctactactcctccctgccacggtggtcttcacggccgccgccgccgccgccatcttccgctccccctccggcgcccgggcaaccacgtcggcgcggcacacggggcaccaccggctcttcctcagccacgagtccacgcacggcgcgtggaagctgtgctcgcaccgcggcagccgccggcaccggtccccggcctccagctcctccaggcacaccgcgcagtccccgccgccgccgcccttgacgacgtcgtggcacggcagcgcgccgatctcgtcggcggacaggcccttccctcctcctcctcgggctccaccgccgttcccctccgccgcgcgcccgggcgccgcctcctcctcgccgcgcgacgccccgcgcccgcgccgcagcgcccagaagacgacgacgatgtggacgaccagcatcagcgcgacgccggccaccaggaggaagatggagatcaccgacgacgacg

SEQ ID NO: 13446 - DNA, 2481 bp, Oryza sativa
  Clone ID: TFbOSC400860j.C1.o53.gm
atggcaggatcgactctgttccgatggctcttcttactgctggccatcgtgtcgcttgccgcggcggatagcggcagcggcgaagcagagaccaccgtccccggacaaattcgcctgagctgcggcgcgtctgcctccgccaccgacggggacggccgggcgtgggacggtgacgccgtgtccacgttcgcgccgtcggtgaccggcgtcgcggccgacgcgtcgtaccaggacccctcgctgccttcccccgtgccgtacatgacggcgcgcgtgttcagctccagctacacctactccttccccgtcaagcccggccgcgtgttcctccgtctctacttctacccgtccgcctacggcaacctcggcgccgccgccgccgccgcggacgcgctgttcggcgtcaccgcgggcggcatcacgctcctccgcgacttcaacgcgtcgcagaccgcgctcgcggtcggctacgcgtacatcgtccgcgagttctcgctgaacgtcagctccggcgccacgagcctcaacgtcaccttcgccccctcgccgcgtggcgcccccggccacgggtcccaccactacgcgttcgtcaacggcatcgaggtcgtgcccacgccggacatgttcacgacgccggtgcccgccttcgccaacggcgggcgcccgaacccgatgcccctccgcgccgacacggcgttccagacgatgtaccgcctcaacgtcggcggcgaggccatcaccccacgggacgacgccggcggtttctaccgcacgtgggacaacgacgcgccctacatcttcggcgcggccttcggtgtgaccttcgcgaaggacagcaacgtcagcgtccggtacaacccgccgtcggtgccgaagtacgccgcaccggaggacgtgtacgcgacggcgaggtcgatgggcccgaacgcgcagatcaacctcaactacaacctcacctggatcctccccgtcgacgccggcttctactacctcctcaggttccacttctgcgagatccagtacccgataacgaaggtgaaccagagatcattcttcatctacatcaacaaccagacggcgcagtctcagatggacgtgatagtgtggagcggagggatcgggagggcggtgtacacggattacctcgtcgtcacggcgggctccggccagatggatctgctggtggcgctgcacccggacctcagctccaggccggagtacttcgacgccatactcaacggcctcgaggtgttcaagctccacaagtacggaacccacagccttgccgggccaaacccgccgatcccgctgaagcaggtattcagcacggtggacggaagcagatcggagtccaggaagaagagcgtcgtctgcgccgccgtcggcggtgtggccgccggttgcttccttgcggtgttggttgccttcgccgtcgcgtgggctgttcgcaggaggcagaggaaggccgcggcggagaaaccggctgatgggcttcttggcccaacaaaaggctccgccctttatgacccgtttggtgaaaggtacagcatgaacactgcggtacaggggtcgtcgccgccgccgccgccgccgccgccgctcccacggacgcgccgtgaggtgcacaacgtcgaggcggcggacgcttctccggtgcggcgtaatggggtttgtgaggggaagaaggaggtggtgggcgacgagaagcagcggctgatcgagtcgctgccgctgttcacgatggcgtcgtcgctggcggcgctccccaagagctcaccggactgcgccgtctgcctgtcgccgttcacgctggacgccgagctgcggctgctcccggcgtgccgccacgcgttccacgccgcctgcgtcgacgcgtggctccgcaccaccccgtcctgcccgctctgccgcgccaccgtcacgctcccgcacccctcgatctccgccatcctcgccgccgagcagccgccgccgccggagccgaggagcagggaccgttccaggagcttccgcgtcgagatgggcagcgtcagcaaccgcagcgcgtcgacggccaccggcggcaacgcccgccccacctactcgctcggcacgttcgactaccacatcgacgaggaggtcgaggccgtcgtctcccgcgccgcgcccatgacaaccaggagcgccgccgcagtcaaggaagacaagccagcagccgagcagtctccaccgcctcccggcgaggcggtggccgaagcggcgggcgcgacgcgcggctggctgcgggagtacgtggaacggctggccacctccgcgtcatccctatcgtccttctccgggcggtggagctcccggtggagccagagctaccagagccaccatagccacagccaggaggagccatggctgtgggacgcggaggcggtgaggatgtcgccgccggggacggaggaggaggagacggcgttcatggtgctgtaccggtggatcgcaggggcgtaa

SEQ ID NO: 13447 - DNA, 1080 bp, Oryza sativa
  Clone ID: TFbOSC400939j.C1.o46.fg
atggcgtccactctctcgtctccgtcgccgccgtctgccgatcccgtcaccggatcctccgacgccgcctcgtccttcctcccgtctctcctcatcatcgctgctcttcttgccttcgttctactagcgtcggtctcgatccacctacttctcagacttctgtccaggtcgtcgccgccgccgccgccgccgccgccgctcccacggacgcgccgtgaggtgcacaacgtcgaggcggcggacgcttctccggtgcggcgtaatggggtttgtgaggggaagaaggaggtggtgggcgacgagaagcagcggctgatcgagtcgctgccgctgttcacgatggcgtcgtcgctggcggcgctccccaagagctcaccggactgcgccgtctgcctgtcgccgttcacgctggacgccgagctgcggctgctcccggcgtgccgccacgcgttccacgccgcctgcgtcgacgcgtggctccgcaccaccccgtcctgcccgctctgccgcgccaccgtcacgctcccgcacccctcgatctccgccatcctcgccgccgagcagccgccgccgccggagccgaggagcagggaccgttccaggagcttccgcgtcgagatgggcagcgtcagcaaccgcagcgcgtcgacggccaccggcggcaacgcccgccccacctactcgctcggcacgttcgactaccacatcgacgaggaggtcgaggccgtcgtctcccgcgccgcgcccatgacaaccaggagcgccgccgcagtcaaggaagacaagccagcagccgagcagtctccaccgcctcccggcgaggcggtggccgaagcggcgggcgcgacgcgcggctggctgcgggagtacgtggaacggctggccacctccgcgtcatccctatcgtccttctccgggcggtggagctcccggtggagccagagctaccagagccaccatagccacagccaggaggagccatggctgtgggacgcggaggcggtgaggatgtcgccgccggggacggaggaggaggagacggcgttcatggtgctgtaccggtggatcgcaggggtataa

SEQ ID NO: 13448 - DNA, 1224 bp, Oryza sativa
  Clone ID: TFbOSC417199j.C1.o1.fg
atggctgtaatatgctttgaagaatctattcatctgttgctttgcttgattggtttcagaatcattgtctccatcaactggaagaggtatcgtctctgcgcccacccgttgcacatatggatcgtggttgactacaccaccgtcttcatcttccgccttctcatgttcgtcgataatggccttgccgccggcatgggattagcacttgacaatgtctacacatgtctatttgtaaaatttggtcatcttcgacatttccatttacccgaggaaggacaaaaatggggcttccttatatggctgcttttcagctactgtggtctcgcctgtattgcgtgtgtggctgttggaaagtggctaagccgaaggcatgctctccagcagagggcacaacagggaataccagtctctgaatatggggttttggttgacatgatccgtgtgcctgattgggcatttgaggccgttggcttggaaatgagaggaatgggccaagatactgcatatcatcctggtctttatttaacagctgcccaactagacaaaatttccatgtatttatttgctagcgatctcagagatgcaaagaagtctctgaagacttctggatttgtattaaggagcaaagtaacactgaaatccagtgtcattgagcagaatgattttaaattggtcctccttctgcagagagaggcagttgaggcactgattcaagaactcccgaagttcagactgaaagctgttcctacagactgcagtgagtgtccaatctgcctggaggaattccatgttggcaacgaggtccgtgggctcccgtgcgcgcacaatttccatgtggagtgcatcgaccagtggctccggctgaatgtcaagtgcccccgttgccggtgctccgtcttccccaacctcgacctgagcgcgctcaacaacctccggccatcctccgagccggaccggccgtcggccagcgaggtgacagcggcgacgatggcgcggtacgtgaggtcgtcgcagccggctgggcagagctacctgctgcggctgcaggggctgctgctgcggcaggtggtggttcggcacggcggcggcgacgacatggcgagcgccgagaacggcgcttctcatgtggccgccgcggtgaccgcgccggcgaccaccggcggcgtggagagcgagctgcctagcatagtggttgacggtgggcatcagctgccggatcgctga

SEQ ID NO: 13449 - DNA, 1164 bp, Oryza sativa
  Clone ID: TFbOSC419721j.C1.o4.fg
atggggacgcgcgagctcctcgtcgttcttgccgtcgtcgtcatggccgccgtcggcgccggcgcgcagtcttcttcggcgtcgccggcgccggcgacgtcgcaggcaccgacggtgcggcagcagacgccgttcgggcggaccatgtcgaccgtcatcacggtgtccatcagcgtgttcttcttcctgctcttcttctgcgcgtacatcaaccagtgtcgcctcgccgaggccggggacgccagggccgcggcggcggcggcggccggcgggggagccggaggagggccgtccaggagagggaagcgcgggctggacccggcggtggtggccacgttcccgatcgtgccgtacagggaggtggtgaagcacaagatcggcaagagcgtgctggagtgcgccgtgtgcctgacgtcgttcgacgacggcgacgacctccggctgctgccgcactgctcgcacgcgttccacccggagtgcatcgacccctggctggagtcccgggtcacgtgcccgctgtgccgcgccaacctcgagaagcctccgccgccgccgccgccgctgccggcggcggcggcggcgtccccttcgccggagcggtcgccgcggtgccagccttcgccgccgccgccgccgccgccgcacgccctggtgataccggtggaggacgaggaagacgacagcgacgaggacgacaggaaggaggaggccgtggagctcgagatgctgcgcagcgagcggcgcgccgcgaggctgccgaggtcgcactcgacggggcactcgctggtcgcgtcggcggccgccgccgccgagtccggcgaccacgagcggttcacgctgcggctgccgcagcacgtgcgggacgaggtgctccggtcgctccgcctccgccacgccgccagcctggtcaacctctcggacatgagctccgaggggagctcgaggggaggacggcgtgcattaggcctcgccttcggcaacggcggcgggagcagccacggcggccgccggtggcaggcgttcttggcgaggacggtgtcatgggcgcgaggcggaggcgacggctcggtgcgcaggggctgggacggctcgacgagaagaggaaaagatgacgccgagtcgagcagaaagggggcgacctcaccggcggccggccggccgtga

SEQ ID NO: 13450 - DNA, 885 bp, Oryza sativa
  Clone ID: TFbOSC401716j.C1.o124.gm
atggcggcagcgcaggacgcgtcgtcccaggcgttggggctccggtggcgctacggcgacgtcgacgacggcaacttcgcggtgcgcggccgcgcggtgccgctcctcgtggcgctcctcttcgtcctcgtctgcttcgtcgccgtctccctctacctccgctgggcgtgccactgccaccgctacggccgcgacacgacgccgatgcccgccaccaccagctccggcttctcctcgtcgcacgctgcggcgaccgcgccaggttcagcctcatcggtgaccggcctcgacgacgcgacgatagcgagcatgcccgtggcgctgtaccgggccgtggcgtcggctgcaggtgatggcgacgacggcggcgccgcgcagtgctcgatatgcctcggggagttcgaagagggcgagaaggtgaaggcgctgccgctgtgcgggcacgggttccacccggagtgcgtggacgcgtggctccgctcgcggccgagctgccctctgtgcaggagctcgcttctcccggccgcggccaccaccaaaccggacgtcgccgggagcgatgctgcggccggcggcggcgagcagcttcagggggcgttctctagattttgggacactggattagcttcaatattcatgctcctggccttctcctccaactccggcgacctcctcttcttctctgacgctggcgacactttagactccggtagaggaccctacagcgacgctggagctgtggtgttggaagagggcggtgggctgatgttggtggcggggcatctcgtcgttgacggcttggggaggcagtcggcggcacgatggggcggtggcggcaggggatcaggcatagcggagaaatgcgtgatggtggcggcgaaatga

SEQ ID NO: 13451 - DNA, 513 bp, Oryza sativa
  Clone ID: TFbOSC20545j.C1.o14.fg
atgtccaacaacaacggcaaccccgggtactacaacaacaggaacgccggcgatcagtcggactacaaggcgacgatcgccatcctgttcagcgtcttctttgtcgtcatcctcatcaggctcatccacttcatcatcaaccagtcaaacaaccgcgctccggcgaacggtggcgccgccgctactagcgacaggcggctgggaggcggcggcggcgtttcacgtgtgccggccagacttccccgtcagcgtccgggcggcgccggcgccggcaacggcaccgctatggcgtggcagccaccgccgtgcaccagcacgtaccggagggacgacgggtggaaggagacggcgtgcccggtgtgcctgtcggagttcgccgacggcgagctcatccggctgctgccggagtgcatgcactacttccacgccgcctgcatcgacgagtggctgcgcacgcgcgccacctgcccgctctgccgcgccgcgcccgccggcgatgtctccacggcgtga

SEQ ID NO: 13452 - DNA, 414 bp, Oryza sativa
  Clone ID: TFbOSC28130j.C1.o1.fg
atggttgatctgtcaggcctcgagatattcctcgccgtcgtcgcgctcatcgccgcgatctgtgccatctcctggaccgtgcgatgcttaatcggccggcggttcgaggtcgccaccggcgatcccaacggggagcgccaagggttgctgaacaaggaggaggtcgtcatcatcgacgtcgccgccgccacggaggcgaggggcgacgacgtggcgctctgcgcgatctgcaaggggaggctcgcggtcgcggtcgcggacggcgggggacagccgtgccggcggctgcggccgtgtgggcacgtctaccacgcggagtgcatcggcctgtggctgcagagggggacgacgtgcccggtgtgccgcgccgacgtcgttgcctcgcggaacgaaatcgtcggcgcgatggcgtga

SEQ ID NO: 13453 - DNA, 639 bp, Oryza sativa
  Clone ID: TFbOSC400203j.C1.o24.fg
atggggtgcccggtctgctgctactccgagctgctgctccccaagcagctgctccacctcctcctgctgctcggctacatccgccgtttcctcctctgggcgttccacgccgtcggcctcggggacctgctggatctcggggacgagcagcaggcggtgctgcaggaccacgcgcgcgagcaccgcgcgccggcgcaggcgctgccgccacagcagcagcaccgccgcgccgagttccggacggtgccggcgatggtcatcgaggaggttctgccggtggtgcggttcgacgagctggtggccgcggccccggcggtttgcggcggcggggactgcgcggtgtgcctcagcggcatcggcggcggcgacgaggtgcgcaggctcagcaattgccgccacgtgttccaccggggctgcctggaccgctggatggagcacgacgaccagcgcacctgcccgctctgccgcgcgccgctcatccccgacgagatggccagcgcgctctggggcgccgccggcgtgtccgacgcctccgacttcgacttctcctacttcggcgcgcccctcacgccgatgcccacgccgactctgctacggccgcacgagctgctgctcactggccttggcggctaccagtaa

SEQ ID NO: 13454 - DNA, 1082 bp, Oryza sativa
  Clone ID: TFbOSC400203j.C1.o25.gp
ggtccaaaatgccacagatggttgcatccaaaacgccaaactgaacaaatttaatcagcacaaagattcactacttctcaaacctggaagatggaatcttctgtacaaaaacaaaaacaaaaataaaaatctactaatcatctagccttttttggggggtttgctttactcatttttgcctatgtacagttgaaggcgcctcctgttcttggtcttccccgaacacgacgaccaattcagtcgttgtaaaaactgcgcattccgggtcgccggtgccctgctgtgcagtaggtggatattgccaactccgtgaaccaacagcggcggttcactggttactggtagccgccaaggccagtgagcagcagctcgtgcggccgtagcagagtcggcgtgggcatcggcgtgaggggcgcgccgaagtaggagaagtcgaagtcggaggcgtcggacacgccggcggcgccccagagcgcgctggccatctcgtcggggatgagcggcgcgcggcagagcgggcaggtgcgctggtcgtcgtgctccatccagcggtccaggcagccccggtggaacacgtggcggcaattgctgagcctgcgcacctcgtcgccgccgccgatgccgctgaggcacaccgcgcagtccccgccgccgcaaaccgccggggccgcggccaccagctcgtcgaaccgcaccaccggcagaacctcctcgatgaccatcgccggcaccgtccggaactcggcgcggcggtgctgctgctgtggcggcagcgcctgcgccggcgcgcggtgctcgcgcgcgtggtcctgcagcaccgcctgctgctcgtccccgagatccagcaggtccccgaggccgacggcgtggaacgcccagaggaggaaacggcggatgtagccgagcagcaggaggaggtggagcagctgcttggggagcagcagctcggagtagcagcagaccgggcaccccatcccgggcagacgcgaaggcgagaacgagaagggaaggctccgtcgggagaggtgcttcccgcgctcacacgacgtgtcgcgtggaggcggtgcgcctgatatgatgat

SEQ ID NO: 13455 - DNA, 1527 bp, Oryza sativa
  Clone ID: TFbOSC400099j.C1.o27.gm
atgctggcggtggtcggggcggcgctgctggtggtgctgtacgcgaggctggtgagccgggtgttcagggcggcgaggcggcggtggcggaggaggaggaggcggcggctgctcatgatcccgggctcccccgccgacgactcgttcgcgacgttcaccacctacgacaactactaccacaccttctcgccgtacggcctcgacgacgccgccatcaagtcgctgccgtcggcgcagtacctcaagtcgtcggcgatggcggcgcgcggcgggggcgggggaggcggagccgacaccgccgcgcgcgactgcgccgtgtgcctgctcgagttcgccgacggcgacgagctccgcgcgctgccgctctgcgcgcacgcgttccacgcggactgcatcgacgtctggctccgcgcgcacgcctcgtgcccgctctgccgcgccgccgtcgcgctcccgcccccggtcgcctccccgctccgcgccgcccgccgcgtgcgccccagcctcgacgacctcctcttcttccaccccgtcccgcaaccaccccacgccgccgccgacccctccgccgcgccggcggagatcaccccggcaagcccggaccacgtcggcccgagagacgatttcctcctcaagcgctcctactccttcggcttcgagcgccacctcctcgccgtggaggccccctccaccgcgtccccgccgtggcgctaccgcctcaacatcggcggcggcggcggcggcgcggacggcccaaaccgcggcggccgcagcagcttctggagcaagcgctggccatccccgttcggcggcggcggcggcgccgccgccgcctcccgcgtcttctccttccgctcctaccgctccgccgccgcgaaatcctccccgttctcccgccgccgcggcggcaccggccccggcggcgccaccgcccccggaggcgggttcttcatgtcgctcgcgtcagagccaccctccatcctcgccgcggcgaggcgcgccagcgccgccgctgccgcgtccagccggctccggtgcggcgaccccgaggccctcctctcgccggaccggctcagccgcgccaccctacaagtcaccgccccaccgcgagaggagggcgggcatggccttgccctgctcctatggctcccactgcgccgccctgcccttccccgccgtggtctccagggcggcctcctcgccgccaccgcgctcccgggggagaaggcccagcctaccacccgccggatgcttccacgccgcgccaagggacgccgctctggtgtccggctccgctgctggtggcgtgagcaggaggagtccattgtgacaaggaggaaagggttggtaggcacggatgaagatcactccgacaccttaatcgcgctgcagcatccaccagtttatacgctaggcactgacagcaccgaggactacctccatttcgatgttaaagatgctccttttgaggttcaccgtattgaccgtggtggggaggtgacatatcatggtcctggacaggcctag

SEQ ID NO: 13456 - DNA, 1167 bp, Oryza sativa
  Clone ID: TFbOSC900069j.C1.o6.gm
atgctggcggtggtcggggcggcgctgctggtggtgctgtacgcgaggctggtgagccgggtgttcagggcggcgaggcggcggtggcggaggaggaggaggcggcggctgctcatgatcccgggctcccccgccgacgactcgttcgcgacgttcaccacctacgacaactactaccacaccttctcgccgtacggcctcgacgacgccgccatcaagtcgctgccgtcggcgcagtacctcaagtcgtcggcgatggcggcgcgcggcgggggcgggggaggcggagccgacaccgccgcgcgcgactgcgccgtgtgcctgctcgagttcgccgacggcgacgagctccgcgcgctgccgctctgcgcgcacgcgttccacgcggactgcatcgacgtctggctccgcgcgcacgcctcgtgcccgctctgccgcgccgccgtcgcgctcccgcccccggtcgcctccccgctccgcgccgcccgccgcgtgcgccccagcctcgacgacctcctcttcttccaccccgtcccgcaaccaccccacgccgccgccgaccccctccgccgcgccggcggagatcaccccggcaagcccggaccacagccaccctccatcctcgccgcggcgaggcgcgccagcgccgccgctgccgcgtccagccggctccggtgcggcgaccccgaggccctcctctcgccggaccggctcagccgcgccaccctacaagtcaccgccccaccgcgagaggagggcgggcatggccttgccctgctcctatggctcccactgcgccgccctgcccttccccgccgtggtctccagggcggcctcctcgccgccaccgcgctcccgggggagaaggcccagcctaccacccgccggatgcttccacgccgcgccaagggacgccgctctggtgtccggctccgctgctggtggcgtgagcaggaggagtccattgtgacaaggaggaaagggttggtaggcacggatgaagatcactccgacaccttaatcgcgctgcagcatccaccagtttatacgctaggcactgacagcaccgaggactacctccatttcgatgttaaagatgctccttttgaggttcaccgtattgaccgtggtggggaggtgacatatcatggtcctggacaggcctag

SEQ ID NO: 13457 - DNA, 1140 bp, Oryza sativa
  Clone ID: TFbOSC900395j.C1.o11.fg
atggcgacgccacgatccccaagcccccgtggcgacgcgcgcctggactcggcaccgctcctcggtggcggcggcggcggtggcggccgtcgccacggtggcgcgctgcggcggccgtcgctccggggagcggctcggttcctgcgccggagcggtcgccgggcgatgcgcgagccgtccctgctggtgcgggaagcggcggcggatcagctggaggagcggcaggccgactgggcctactcccgccccgtggtggcgctcgacctcctgtggaacctcgccttcatcctcgttgccgccgccgtgctcgcgctgagccgcgaagagagcccgtccatgccgctccgcctctggatcgttgggtacgccgttcagtgcgtcctccacatggcctgcgtcgccatcgagtaccgtatgcgccgcggccagagcggtgaatcccccatggccgccgacgaggagacaggaaccgatggatcgtcgtcgtcaagtgacgaggacgccggcgagcgtgctccccgtggccgcaatggcgattatgttcgtattgcaaaacatctggagtctgctaatacaatgttctcctttatatggtggataatcggattttactgggtatctgctggtgggcaagttcttactcatgatgcacctcaactttactggctttgcatcgtctttctggcatttgatgttttctttgtcgtcttttgtgttgctttggcttgcatcattggaattgctgtttgttgctgcctcccatgtatcatagcaattttatatgctgtgtctgatcaggagggagcatcggaagatgatattcgccaaattccaagatacaaatttcggaggatggatgagcctgaaaagcaatctgtcaacatgactggatcttccggtggaataatgatagaatgtggcaccaaccaacctattgaaaaagtacttgcagctgaagatgcggagtgctgcatttgcctgtcagcgtatgatgatggtgcagagctgcgtgagctcccttgtgggcaccatttccactgtgtctgcattgataaatggctgcacatcaatgcgacttgtcccctatgcaagttcaatgttcgaaaaaacagtagcagcagtggtagtgaagaagtataa

SEQ ID NO: 13458 - DNA, 1113 bp, Oryza sativa
  Clone ID: TFbOSC400009j.C1.o30.fg
atgtcgaatccggccgcctactacgccgccgtcgcgcggaagcagtacttctgctaccaatgcaaccgcaccgtcctcctcccggcctccgccgccgccgccggggcgctctcctgcccggagtgccgcggggatttcatcgaggaggtcaacgtccccgcccccgccatcatccccttccccttcgccttccccccgatgatgcccaccgccacctccgcctccgccgccgccgccgccgcggcctcgccgacccagtcctcctcctcgtccgccgccacgtcgccatccagcgacctctccgccttcctcaacagcatgctcggcccgctcaacctccgcaccgacgagcggatgccgggaaccacctccgccgcgggcacggcgacccccgaggacgagcccgacgggttcgacgcggtcacgttcttccagaactacctccagaatctcatggacggcggcgccaacatccaggtcctcctcgacgacgccagcgtcggcctcgcccccggcatcggccgcgtcggcggcgccagcttcggggactacttcgtcggcccgggcctggagcagctcatcgagcagctcaccgagaacgacccgaaccgctacggcacgccgccggcggccaagtcggctctctccacgctccccgatgtcgtcgtgaccgacgccatggtcgccgcggcggatggcgccgagtgcgccgtctgcaaggaggatttctcgcctggggaaggggccaagcagatgccctgcaagcacatttaccacgccgactgcatcatgccatggctggatctccacaattcatgccccatatgccgctttgagctgcctactgatgaccctgattacgaggggcgtaagaaatcaaacccacagccaactgctggcgttgatgccggagctgcatctgggagttctactgctgctgaggagcgagaggagagtggggagagtgcgaggttggtcgaacggcggtttaacgtgtcgctgccatggccttttagtggattgggatcgcaaacgccgcagcaggatgggagcaatgggggcgctggtgccagtggctcgaaggatggaggcgcatccagtgacaaaaaataa

SEQ ID NO: 13459 - DNA, 2145 bp, Oryza sativa
  Clone ID: TFbOSC401901j.C1.o1.fg
atgtcgctggggctcaacctctgcgtctacgtgcccaggacgctggacgacggcgactcgccgtccaccgggtcgtccacggcggcgctggtgtcgccggtggcgtcctcgtcgtcggcggcgaccagcgccaacaccacgcccacggcggagcagagggtcaagggcgccggcgcgctcatgccgaccaccccgacgccgacctccgccggacttcgcctctccaaatccggcagcaaatccttcaagaaaacatgtgcgatatgtttgaccacaatgaagcctggtcagggccatgctctattcacagcagagtgctcacatacctttcacttccattgtatagctgcaaatgttaagcatggaagcaacaattgcccagtttgccgcaccaagtggaaggaactcccatttcgaggtcccttgcctggtgaatttcctcaaggaagtgcaaggattaatccagttaatgggcaccaaaatggcgggcagatgaccatactgcgaccacttccccgtgctcgttcttctggtcggctgcatcatatgacatcgttgttgcctgacactgaccgtagtatttttaacgatgatgaacccttggactcactgtctgaagcaaatgaaggctcgcagcaggggtgtttaagaacagtggaaataaagacatatcctgagttcactgaagttccagaaagtacttcagaaagaaattttacagtcctagttcatctaaaggcaccccttgctcagactttgcaaacaagcagcaaacttgaagatggcaatagcttgggcacaactcgagcccctgttgatctcatcacagtgcttgatgtcagtgggagcatggctggtaccaaacttgcattgctgaaaagagccatgggatttgtcattcagaaccttggctcctcagatcggctttctgtaattgccttctcatcatctgcacgtagactcttccccctccgtcggatgactgagactggtcgtcagcaaagcttgcaagctgtttattcactgacatcaaatggtgggaccaatattgctgagggcctgaggaaaggctccaaagtgattgaagatcgacaggccaagaatccagtgtgcagcatcatcctactatcagatgggcaagatacatatacagtctcaccaaccgctggtgtacacaaagcagcaccagagtactgctcactcctgccatatactagtaatggttgtcaacaggtaccagttcatgtctttggatttggtgctgaccatgattcagtctcgctgcattcaatctcacaaacctccgggggcaccttttcattcatagagacagaggctgccatccaagatgcatttgcccagtgtattggtggactcttgagtgttgttgcacaggatttgcatgtaaaggtggagagcctccaccctgatgtacactttggctcgatcagatcaggaagctattctagcagacttgcagatgacaagaggaatggctccatagatgttggtgacatgtatgccgaagaggagagggatttccttatgtcagtaaatgttcccccaggttacggtgaaacagcacttctcaaagttggctgtgtctacaaagatccactgatgaaggagactatcaatatggctgatgtgcaagtcaagatctctagaccagcattcgtctcagtacaaagcgtgtcaatcgaggtggaccgacaaaagaaccgtcttcatgcagctgaagtcatggctgaagcaaggttgtctgccgagcgtggtgacctgacacatgctgtttccttactcgaagactgccggaggatgatcatggggtcaacatcaggacaatccggtgatcggttgtgccaagcattggatgctgagctgaaggagatgcaagaaaggatggccaatcgccaaaggtacgaagcatcaggccgcgcctatgtcctctccggcttgagctcacactcatggcagagagcaactgcgcgaggtgactccacagacagcgagagcctaatccaggcctaccagacttcatccatggtcgacatgctgctgcgctcgcagacaatgagccgctcctcaacccctccacagatgaggcatgtgaagtcgtttccagcgcgcccgcagcctaggtaa

SEQ ID NO: 13460 - DNA, 945 bp, Oryza sativa
  Clone ID: TFbOSC19766j.C1.o10.fg
atggcggcgggaacgtcgtcgtcgtcgggaggcggatctgggccgttggtggtgagcaacggcgtgctgctcgccgcggtcatcttcctgttcatggtcgtcgtcttcgtcttcctcctctacctctacgccaagagatacctcggcgcgaacccgctgctcgcccccgtctcgccctcctcccgcttcctcttcctcgacgcctccccgttcccgcgccgcgggttgccggcggccgcgctgcgggcgctgcccgtcacggtctacgcgaagcccgcggcggcgcgcggcgaggaggcgctcgagtgcgcggtgtgcttgtccgaggtggccgacggcgagaaggtgcggatgctgcccaagtgcgaccatggattccacgtcgagtgcatcgacatgtggttccattcccacgacacctgcccgctctgccgcgcgcccgtggggcccgacgccggcggcgaggggctgccgcgcgtgccccggggaggaacccggcttgccatggactttcccccatgttccccccccaacgtcctcttctggggcaccgcccacgacgacgtcgccaacgccggtgaccgccacccgttccaccccccgccgccgccgccgcctctcatggccgcgccctccacgagctcctcggcgtccgcgcgcaggaaggagagcctcgtcatcgacatcccgtcgcgctctgccgccgccgccgcggcggactccgtcacgtcgtcctccgcctcgacgccgctgccggcgagcaggatggcggacgacatgaggtcgccggtgtcggcgcggctgcggtcgctgcgccgcctcctcagcaggggcaagcaggccgtggtcggaccgtccttcagcccgcgcggcggcggcgacatcgagcaggggctcgccggcgctccgccgaagacgcccaagacgccgccgccggcgaactga

SEQ ID NO: 13461 - DNA, 441 bp, Oryza sativa
  Clone ID: TFbOSC19766j.C1.o8.np
attattaattattttcctatcatttgattcattattaaatatagagtaaagtccatcgccggtctctaaacttgtaccgctgtgtcatcccggtccctaaactcgcaaattgactgttcaggtcctcaaacttgctcgactgtatcatcctggtccctaaacttgtagatcactcatttagatccttcaacttgttcaattgagtcaccccggtgtctaaacttggatttgaatatcatatgggtcaaataggatgggaccggggtgacacaagtgaacaagatggaggacctaaacgagtgatctgcaagtttagagaccgggatgacacagtcgaacaagtttaaggacctgaacggtcgatttgcgagtttagggaccgggatgacacatcggtacaagtttagggaccggtgatggactttactcttaaatatacta

SEQ ID NO: 13462 - DNA, 681 bp, Oryza sativa
  Clone ID: TFbOSC23270j.C1.o1.fg
atgttcttgtccgggatctcgccggcggtgcaccatgacctgcagccgggcggccgtagtccgtacgacggcgacgacggcgaccgcacgctggtggtgctgctcaccttcggcatcttcttctccttcgtcatcctctacctcgtcgccggcctcatctgggccgtcgtcatcaccgccgccgccgtcgtgctgtccttcctctacctcagggtccggcggcggcgcgccgccgtgggcggcacggcggcggcggcggcgcccaacgacgtggtcttcatcgtgggggctcatcaggctgctcggagcaccggcagcagcggcggcggcggtgatgtcgccgccgcggccatcgtgtcggcgatcccggcgttcgagtacaagagggtgaacggcggcggcggcgaggacggcggcgcggcggccgggtcggggtgggcgcagtgcgtgatatgcctggggctggtgcaggtcggcgaggtggtgcggcggctgccggcgtgcaagcacatgttccacgtggagtgcatcgacgcgtggctgagctcgcactcgacttgcccgatctgccgcgccgacgtcgtcgacgagctcgccgccgccgccgccggcggccggctttctctttctccctacggaactgaactaattcatatgaaattcataacagaattcctgtag

SEQ ID NO: 13463 - DNA, 915 bp, Oryza sativa
  Clone ID: TFbOSC400045j.C1.o24.fg
atgcggccgccctcgtcgtcggcgacgcccgggacgggccgggtgtcggcgttcacgatgcgcgcggtggcgcgcatgtcgagggcgcggtggttcatcttcctgaggcgggtgtaccagtaccagaacggcccgaggtccgacctgggctccaaccccttcaactcgcccggctggctcgccctcgagctcggcgtgatcatggcgcagatggtcgtcaccaccgccgtcgtcgccacctcccccaaggagcgccccgcgtggccgctccgggtttgggtcgccgcctacaacgtgggcaacgtgctcagcctccccctcctctactggcgccaccggcattcctcctccggcgcccgcggcggcacgctctccgacgatcccgagatgcacggcgccaacgaccctctaaggaacaggtcgtatctgatgaacaaggcacgggcgttcctggagctgttcttcgcgatgtggttcgtgatgggcaacgtgtgggtgttcgacgcgcggctcgggtcgttccaccgcgcgccgaggctgtacgcgctctgcatcggcctcctcgcatggaacgccgtcgtctactcgctcccattcctcctcttcctcctgctctgctgcttcgtcccggccgtcggctacgcgctcgggtacaacatgaactccgcgtccgtcggccggggcgcctccgacgagcagctcgccgcgctgccgcagtggcggttcaaggagccggccgacgcgccgagagaccgcgaccacgacgatcaggagtgctgcatatgcctggctcagtacaaggagaaggaggaggtgaggcagctgccgtgcacgcacatgttccacctgaaatgcgtggacaggtggctcaggatcatctcctcttgccctctctgcaagcaagagctcagctag

SEQ ID NO: 13464 - DNA, 804 bp, Oryza sativa
  Clone ID: TFbOSC400378j.C1.o8.fg
atgctggcggcggcggcggcgatcttcatcacgttcgtcgtgtgcttctacctcttcctctgcgccaagaggtaccgcggcgccgcgcccacgatcggcggcgacagcggtgggggagggaggggacgcgcgcggttcgtgttcgggggccccggggacggcgggtgcggaggcgggagggggcttgacgaggcggccatcgcggcgctgccgacgaaggtggtggcggcggcggccgaggggggcgacggcggcgaccccgcggcggactgcgccgtctgcatcacggagctcgccgccggggagtccgcccgcgtgctgccgcggtgcggccacgggttccacgtcgagtgcgtcgacatgtggctccggtcaaactccacctgcccgctctgccgctgcgccgtcatcgacgaggcgctgccgccgccgcccgccgtgcgcccgccggaggctgacgcggagtcgcccaacttccccaccaacgtgctcttcttcggctcccaggacgccgtcaggacaggcggcgccgccgcggcaacgccgccgccgccgcctccgtcgtcccatcatcagcagcaaccggccttcccgccgcagccgtcggcgggacccatcgccggagtcgccgccgtggtggaagcggcgaggatagcggccctgcggcggctgctgggctgcggcggcgcgactcccccgcccccgccggcgccggcgcagggcgaccgcgacgtggagatgggcctccccggcggcgagagcagcgcgtcgcggccggcgacgaagccgcagccaggttcttga

SEQ ID NO: 13465 - DNA, 588 bp, Oryza sativa
  Clone ID: TFbOSC405090j.C1.o3.fg
atgctgctcgtcaacctgtactcgcggctcacggcgagcaccggcgtcggcgtcggcgtcgacgacgatgacgacgacggcagcggcgggtatggggttctcgacggcgcgtgcggcggcacgctcgccgtgttctgcgccctcgccgtctccgtcgtcgtctggaaggcgtgcgcgttcgtcgccatggccgccgcgctcctcgccatcggctggcgcgtcgtggcgccgcggagatcagtggggcgcgcgggcgcgggagcccccacgccggccgagtgcgggctcacggccgcggcgatcgacgcgctgccggcgtcggagtacgagcgcccgcgcggcggcggcggcgacccggcgtgctcggtgtgcctcgaggacgtccgtggcggcgagacggtgcggtggctgccggcgtgcgggcacctgtaccacgcggcgtgcatcgacgcgtggctgcgctcgcgcacgacgtgcccgctctgccgctccgacctgtcgtcgcggcgaggaggcacggcgagcgggcgcccgcggccacggctggtgacgcacgagtcgttgctgccgccattgccttccgtttaa

SEQ ID NO: 13466 - DNA, 490 bp, Oryza sativa
  Clone ID: TFbOSC918j.C1.o2.np
tccgacgatcaaatcagtaatcttgaatatggcggctttgaacggtaaggtggtggtggcggtgatggtggccggcgggagctccggcgccttggacgccaacatggtcatcgtcctcgccgcgctgctctgcgtcgtcatctgctccctcggcctcagctccctcatccgctgcgcgctccactgcgcccgcggcctctcaccctcacccgccatggcgacgccggcagctgccaccaccacgggcgggctgaagaagaaggagctgaggaggattacggtggaggtgtacggcgccaagcaggccggcgtccccgacgccgagtgcgccatctgcctgggcgacttcgccgacggcgacaaggtgcgcgtgctccccaggtgccaccacggcttccacgtcggctgcatcgacacgtggctcgccgcgcacacgtcctgccctacttgccgggactccattctctccgtccatgccggagtcaccggc

SEQ ID NO: 13467 - DNA, 3006 bp, Oryza sativa
  Clone ID: TFbOSC412549j.C1.o5.fg
atgtcgacgggcgggaacggcggcggcgtcggcgtgcggcggcggaggtggaacctgtactggtgctacgtgtgccgccgggcgctgcgggtggtggtgccttcggcgacgtccgacgtctactgcccgcgctgcttcggccgcttcctccacgagatcgacctgccggtgccgcgcgtgagcccgccggcggaggaccagttcttccagccgccgttcttgccgtacgacggcccacgccgctgggtcctctacactggcggcggcggcggcggggactacggcggcgctgatgtaacggcgcgccgccgccgcttgccgtcgccaccgccggcgccgggaacgcggcgccaggacggtgcaggcgatggcgatccacctccaccggcgccggccatcgatccgggggagtacttcgccgggcccgacctgaacgcgctgatcgacgcgctcacgcaggacgaccgccccgggccgccgccggcgccggagtcggccatcgagtccctccccacggtgcacatctcgccggaccatctccccgccgacggcggctcggagtgccccgtctgcaaggaggagttcgagctcggggaggccgcgcgcgagctgccgtgcaagcacgcgtaccactcagactgcatcgtgccatggctccggctgcacaactcctgccccgtctgccggcaggaggtgccgccgccgccggagccggacggtgaatctccgggcatcgacggcggctgtgacgacggtgtcggaggaggtggagagccggctgagccgccacggccggccatggccggctgggaccctattgcgctgctggcgattgcactacggccggacttgaatggttgggagaacagccatggccggagcgagagtgaagcggatgacgatgaggtcgccggcggcggcgtcagcccacacttattaaagcggacaacgactttgacattctgggttttgcacccaccaataattactggagttcatgcactcaccaaaccggcacttgacgaacgatgccggtggaatcggttcggattcttcctttttgacgaaaagatcgggatgatcgcacgcgataccgttctgcgtttcgccgtgcgattgttcgtcgtgatcgtcgtctcgtctcgttcttcctcggccgacgacggcggcggcgacggcggcgtcgacttcatctaccaaggtttccagcacgcggcgaacctgaccatggacgggtcggcgaaggtgctgcacggcggcgcgctccagctcaccaacgacagcaaccgcctcgtcggccacgcgttccacgccgcgccggtgcggtttctcgacgacggcgccggcggcggcgggggaggagtggtgtcgtcgttcagcacggcgttcgtcctcgacatcgtcaccgtcgggagcggcggcggccacggcctcgcgttcgtgatctacctcggcgtcctcgggccccgcaccaacgggaacgcgtccgaccacgtcttcgccgtcgagttcgacacggtgatggacctcgagatgaacgacaccaacggcaaccacgtcggcgtcgacgtgaacagcctcgtgtcggtcgtgtcggagccggtggcgtactacgccggcgacgggagcaccaaggtgcccgtgcagctggagagcgcgcagcaaatccaggcgtggatagactacgacggcggcagcagcatcctcaacgtcaccgtcgcgccggcgacggtgacggagcggcctcgccggccgctcatctccacgaagctcgacctcctgccgatcttcaaggagaacatgtacgttgggttctcgtcggcgacggggaagctggcgagctcgcactacatcttggcatggagcttccggacgaacggcgtcgcgcaatccatcgatctccggaggctgcccaaagtcccgaggcagagctcgccgccgcccaagctgctcatcatcaagttcgccgcggtggcctgtgcaggaacactcaccctgatcgccgcggcgatggtcgccgtgctctggctccggcgaagggcggcgctcgccgacacgctggaggagtgggagctggagcaccctcagaggatcccgtacaaggagctctacaaggcgaccaaggggttcaaggagagcgagctccttggcgccggcggcttcggccaggtgtacagaggcgtgctccggcgccgctccggcgaggcggtggcgatcaagcggatctcgaacgggacacggcaagggatgagggagttcgtcgccgaggtcgccagcctcgggcggatgcgccaccgcaacctgcggttcgccatcctcaagggcgtcgcccatggcctgctctacctgcacgaggagtgggagcacgtggtggtgcaccgcgacgtgaaggcgaacaacgtgctcctcggcgccggcgacacgggggccgcccggctcggcgacttcggcctcgcgaggctctacgagcacggcgcgacgccggcgacgacgcgcgtggccggcacgctgggctacatggcgcccgagctcacgttcaccagccgcgccacgacggccaccgacgtgttctccttcggcgcgctgctcctcgaggtggcgtgcgggcgccgcccgatcgagccggcggcggcgggggaggcggacggcgacgtgctcctggtgcggtgggtgcgagaccgcgcgctcgacggcgacggcggcggcggcgacgtgctgcgagccgtggacccgaggctggaggggtgctacgacgaggaggaggcgaggctggtgctgtggctcgggctgatgtgcagccaggcgaggccggaggcgaggcccagcatgaggcaggtgtgccggtatctcgacggcgaggagatgctgcaggaggacgccacgccggcggcgatcttctccggcgccgactcgtccgatctcttcggtggctcgttcgtcgtgtccatgacgtcatcctccgccggcggcaccatgtcggccagctcgctgcaaggcggccggtga

SEQ ID NO: 13468 - DNA, 2988 bp, Oryza sativa
  Clone ID: TFbOSC900289j.C1.o1.fg
atggcgaccccgttggccgacgagggctcgatcgccgccgcggtgatgccgcgctcgccttctccaccggccgccgccgcggggtcggcggccgaggcgccgatgctgatattcgtctacttccacaaggcgatccgcgcggagctggagaggctgcacgccgcggccgtgcgcctcgccacggagcggtccggcgacgtgggggagctcgagaggcggtgccgcttcctcttctccgtctacaggcaccactgcgacgccgaggacgcggttatctttccagcacttgatattcgagtgaaaaatgtagcaggcacgtattcccttgaacataagggggaaaatgatctgtttgcacacctgttctctctgttaaagcttgatgtgcggaatgatgatggtcttcggagggaactcgcgtcctgtacaggtgcaattcaaacgtttataacccaacatatgtccaaggaagaagagcaggtcttcccactgctcattaagaagttttcacatgaagagcaagctgatttagtctggcaattcttatgcagcatccctgtcaatatgatggcagagttccttccatggcttgctacttctgtttcatctgatgagcaccaagatattcttaactgcttacataaaatagttccggacgagaaacttctccaacaggttgtatttgcgtggattggaggggaagcagtgaaaacaatatcacatgatttttgtagtccttgttcaaaaagcaatgttagatgcaaggatgctattgatcaaacagacaagtatggatgctcacatgagcactttaaaactggaaagagaaagcgtgcagaatctagttatagtcagcttgttatgcatccaatagatgagattttgtgttggcacaatgctatccgaaaagaattgagcgatatagtagaagaaacaagaaggatccaacaatctggggacttctcggatatatcagactttaatgtgaaacttcaatttattgcggatgtgtgcatcttccacagtattgcagaggatcaggttatatttccagcagtcaacgatcaagtgtcctttgagcaggagcacgctgaagaagaacggcggtttaataaatttagatgtttaattgaacaaatccaaataacaggagccagatcaacagcagtggatttttactctgagctatgttcacaagctgatcagataatggagaaaatcgagaggcacttcaaaaatgaggaaacaaaggtacttcctcaagctaggattcatttttcatcagagaaacaaagggaacttttatataagagtctctgtgtcataccgttgaagttattggagcgtgttttaccgtggtttgtatcgaagctgaatgatcaggatgcagaagcttttcttcagaatatgtttttggcagagtccttccgatcgctgtctctcaattattctgctccttcattgtattcaagtcttttttcatgggagacagatgcagccttttctggcccagataacatttcaaggccaattgacacaatattcaaatttcataaggcaattcgcaaagatttggagttcttagatgtggaatctagaaagctcatagatggggatgaatcttcccttcgccaattcatcggaaggtttcgtttactgtggggtctttatagagcacacagcaatgctgaagatgaaattgtatttcctgctcttgaatcgaaagagacactgcacaatgtcagccactcatatactcttgaccacaagcaggaagaagaattatttaaagatatatccactattctttttgagctttcacaattgcatgctgatttgaagcatcctcttggtggtgctgatgcagttggagcgaaccacattcatccatataataggatcgattggtccaaaaagaataatgaacttttgacaaagcttcaaggaatgtgcaagtctatccgggttactctgtctaatcatgtccatagagaagaacttgaattgtggccactatttgataaacatttttctgtagaggagcaggataagattgtaggccgtataattggaagtacaggagctgaggttctgcagtcaatgttaccctgggttacatcagcgcttagtctagatgaacagaacaatatgctggacacatggaggcaagtaactaagaatacaatgtttgatgaatggctaaatgaatggtggaagagatcacctacttcttctggcccttcaagcgatgcctcccatccagaagaagatcatttccaggaaaagttcgatcagagtgaacagatgtttaagcctggttggaaggacatcttccgaatgaaccagagtgagcttgaggctgagatacgaaaggtttctcgtgattctactcttgacccaaggaggaaggcttatctaatccaaaatctcatgaccagccgctggatagctgctcagcagaaatcgccccaacctcagtcagaagatcgcaatggatgtacagtattacctggatgttgtccttcataccgagatccagagaatcagatttttggctgttttgtcatgataaagttagtgaccatacaatggaaagagcataaatgtcgagaaaagatgctagagatgaattgcccaatctgctgcgacttcctatttacatcgagtgcagcagttaaaggtctaccttgtggccatttcatgcattcagcttgctttcaggcgtacacctgtagtcactacacctgcccaatctgctctaaatccttgggagatatgacagtatactttggcatgcttgatggcttgctggccgcagaagagcttcctgaggaataccgggaccggtgccagagctttcagcttccggggccaaattctttagagaatcaagagaagcccaaccaaatgggcacaaagggtgttagttcccaggggattggtggcatgtggggcaacaaaattgttggtacccaaatatggaagtga

SEQ ID NO: 13469 - DNA, 291 bp, Oryza sativa
  Clone ID: TFbOSC410095j.C1.o1.fg
gaattgttggatttgggtgaggcagttggaacccaaagccgtggtctctcccaagaacgcatttcattacttccagtcaccaagtacaaatgtggtttcttttcaaggaagaaaacacgccgtgaaaggtgtgtaatttgccaaatggagtacaggagagggaatctgcagatgacgcttccctgcaagcatgtgtaccatgccagctgtgtaacaagatggcttagcataaacaaggtttgccctgtttgctttgctgaggttcctggtgacgaacccaagaggcaatga

SEQ ID NO: 13470 - DNA, 1773 bp, Oryza sativa
  Clone ID: TFbOSC401506j.C1.o8.fg
atgaagtttgccaagaagtacgagaagtacatgaaggggatggatgaggagctcccgggcgtggggctgaagcggctcaagaaattgctcaagaaatgccgctctgacctccaatcccacgagaacgacggctcctccgccggccgctgccccggccattgctctgtatgtgatgggagttttttcccatctcttctcaatgagatgtcagccgttattggctgcttcaatgaaaaggccaagaagcttctcgagttgcacctggcatcagtgactatttttgttagaattaacgtatctatcattgttcttgtctttggatttaagacggtcctcaatggttatattaataattatatacattactcgaagcaagggcaggaattcaaagctcaagcccagagtctgcatattgaaatacttcaatccccatggctctgtgagctgatggctttctacatgaacttgagaagaagcaagaagaacaacggtgctatggagctctttggggattgttctctcgtattcgatgatgacaaaccaacaatttcatgcaacctctttgactctatgcgtgtcgacattagcttgacatgttcgatttgcttggataccgtgtttgatccagttgctctttcctgtggtcacatatattgctacttgtgcagctgttctgctgcatccgttacgatcgttgatgggctgaagtctgccgagcgcaaatcaaagtgcccactgtgccgacaggcaggagtctttcctaatgctgtacacttggatgagctgaacatgctactaagctatagttgtccagagtactgggagaagagaatacagatggagcgggttgaacgtgttcgtctggctaaggaacactgggagtcacagtgcagggcattcttgggcatattcttagaaactggaccaaaggctagaatgtttgaggagattctgattccgagagaagctgctgcagttagaagctctcccaaacagccgcagggagatcacatagagcttcaccagaagcgccatggccggcgcctggactacgaggagcgcaagcgcaagcgggcggcgcgcgaggtgcacaagcgatccagggatgcccggcagttgcttggtgctaagggtaagaggttcgccaagaagcggtatgccgagaaggcacagatgaagaagaccctgaaaatgcacgacgagtcaacttctcggcagaaggttgatgatgttcaagagggtgctcttcctccatatctgctggaccgtgatcagacacaacgtgccaaggttctcagcaacacaattaagcaaaagaggatggaaaaggctggcaaatgggaggttcctttgccaaaggtcagacctgtggctgaagaagaaatgttcaaagttttacgaactggcaagagaaaaaccaaacagtggaagagaatggtcactaaggccacctttgttggacctgggtttacaaggaaaccaccaaagtatgaacggtttattaggccaactggccttcgtttcacaaaggcccatgttactcaccctgagctgaaatgtactttcaaccttgacataatttctgtgaagaaaaacccaaatggtcaaatgtactctactcttggtgttttgacaaggggaactatcattgaggtgaacgttagtgaacttggtctggtaacccctgctggaaaagttgtttggggtaaatatgcacaagttacaaacaacccagagaatgatggctgtatcaatgctgtcttactcgtgtaa

SEQ ID NO: 13471 - DNA, 453 bp, Oryza sativa
  Clone ID: TFbOSC406125j.C1.o5.fg
atgcgcctcgagatgtcacccgacaacctcctcttcttctgctccgtcgcggcgtcggcggccgctggattctgcctcttctcgctgtaccggcggctcgcgcggcggtgccaccaccaccacgcggcgcctgccggaggatcggaagaggaggaggaggagcgccggcggctgaccgcggtggcctccggcctcccggcgttcatgtacgaccggctggtccggcacagcggcaagggcgcgagctggacggagtgcgccgtctgcctcggcgtcatccatgtcggcgccatggtgaagctgctgccggcgtgcgcccacatctaccacgtcgactgcatcgacctgtggctgtcttcccacccgacgtgccccctctgccggtgcagggttgatcatcctgggcaggggcaggagacggccaggcagcttgcccagctttccccagcatag

SEQ ID NO: 13472 - DNA, 594 bp, Oryza sativa
  Clone ID: TFbOSC401779j.C1.o7.fg
atgacgcgccgggccaaccacaccgcctcgccctccgtgaacgccacgacggcggcggcggcggcggccatgatcaccgccaccccgtccccgccgccgaggctgccgcttcccaaccccggcaatgccgacgccggcgccggggcgtggggcccctacgccagctcgcgcgcgttcttctccaacgtggccaccatcctcatcatcctcgcctgcgtctccctcctcgccttctgcctccacgccgccgcgcggtgcctcatccgctgcctcgcccgccgccgcgactccggggcgccggcgctggcgccggcgctggcgcaggcgcagccgcccaagccgtcttccgacgacggcgccaacacgggtagctcgggggcggccagcgcggcgtcgggggtcgcgatggtcggcgggtgggccgaggcggagtgcgccatctgcctgtcggagctggcggacggcggcggcgagcgcgtccgcgtgctcccggcgtgcgggcacggcttccacggcgcctgcgtggacgggtggctcgcggcgcgcgcttcctgccccacctgccgcgcgccgtcgcgcgccggcgagccctag

SEQ ID NO: 13473 - DNA, 702 bp, Oryza sativa
  Clone ID: TFbOSC900008j.C1.o12.fg
atggggtcggtgctgtgctgcttggccgacgacggccgccccgtctgctgcttccgcctcccatggccgatcttcaacgccgctcacaaccacaaccacaactcgggttccattgctcgtccaagagcggatacacgagttgcgcctgatcaaggaagaattagtctcactgctccatcacagcatgattcgatggatactttccgctgcccgccaaggcccttgccttgggatgatcctcgattcagccatcatacagagcatcacccactagtaggaggacatgacaaagcttcaacaacgttccacaaatctggtagccttggagaaagcaagaatgctgatagcatatctaattccaaagctgtcaaggatgatgggccttccacagctgtgaaggatgatggatcatcagtaaaacaccattcagatggtctgcacattggcaaagagcaagtacatgatcttttcgactttgaggacgactgtccaatatgcctagaagagtatgattatgagaatccaaagatgacattacaatgcaaccacaatttccatctttgttgtatttatgagtggatggagagaagtcaagcttgcccagtctgctcaaagaaaaaattggtagcttgtgtcaatccacatatcacatttcgattggatgttacagatgcgcgtttgagtgattgcatttgcttctga

SEQ ID NO: 13474 - DNA, 1158 bp, Oryza sativa
  unsure (1)..(1158): unsure at all n locations
  Clone ID: TFbOSC17452j.C1.o2.gm
atgggtgcggtgtccatgtcgacaacgacacgcctccccctcgtcgccgccctcctctccgccgctgcttgcgtcgcagcagcgcagccggccaccgccgaggccgccccggagacgcccggcgtaggcatcaaggtgtcgttccgccccagnnnnnnnnnnnnnnnnnnnntcttcaccatgatcttctcgctcaccttccttctcctcatgtacgccaaattctgccatccatcctcccccgtcgccgcccccgcccccacggtcgtcccggcggcggcggcggacgacggcgtcgccaagccggtgatcgagtctctgcctttcttccgattcgcggctctccgcggggccaggcaggggctggagtgcgcggtgtgcctggcgcgcttcgacgacgcggacctgctccgcctcctcccgcgctgccgccacgccttccacctcgactgcgtcgaccgctggctcgagtccaaggccagctgccctctctgccgcgcgcgcgtcgacgccgaagatgccgcgctcggcctcaagtacgcctccagcgcacgcttcgtcccggccgggggggcgtccgagtccgagcgctttgacggcgaccaagacctcctgggcatcttcgtcgagcgcgttccgtcgtcgcggatggagccagcggcagcggcacactgccctgatctggaccgctacaagcaccgcatcgtggtgtcggacgcggtgttcaagagccgatggagcgagatcaactcctccgacctcatcgcgctcgacacggagctgcttcggtccatggagacgatggaggtggagatggagatggagctgtacaaggagacggaggaggaggagacagatcatgatcatcagcggaagacactgctggcggcaagcggcggcaggtcatcagtcgacgcggcggcgagggcgaggatgatatcatcgtcgtcgtcgtcgggatcagtgcggtccatgtcggagatggtgagcctgccgaggctgcgggcggcgatgagggagcgcctggcgcacgaggaccgctgggtccccatcgctcgtcgtacagcgcgctggttcgccggccgcgagagccgccacgacgaggctgccccggtggttgactcgccgccggcgtcccattccaattcccttgtctag

SEQ ID NO: 13475 - DNA, 1122 bp, Oryza sativa
  Clone ID: TFbOSC416024j.C1.o1.fg
atggcgaaacccttccccgatccgccgaaaccgccggtccccgagccgccgaaaccgggctccgatggcgcctgctacgactgtccctctcctcctcctcctcctcctccccactcgcgtgaccaccgccgcgtggtgatcgcgctcgccaccaccgcgtccctgctcttcgccatcctcctcgccttctccgtctactgcttcatccgccgcaggcgccagcagcgggcgcggcgtgaggcgcttctagcacctcccccttctgatgcggctggaggaggcggcgcaccgggtgcgccggtcgccgccggcgacggggcggtgggcggcgccggggagggggagggggagggggaggtgctgcaccacgcgtggcacatccgcaccgtcgggctcgacgaggcggcgatcgagtccatcgccctcgcgcggtaccgcgccggcgccggcatgctcggcgccaccgactgccccgtctgcctcggcgagttccgcgacggcgagctcctccgcctcctccccaagtgcggccacgcgttccacgtcccctgcatcgacgcctggctccgcgcccacgtcaactgcccgctctgccgcgcccacgtcctgcaccccgccgacgccgacgccgacgccggggacggggaacgcgtcccgccacccgccggcgctaacggcggcggcggcggcggcggcggcgcagccaccgaccaagcctcgagccccaccgatcaaaccgcggaccaagaaaaccctggtcaacagcagcagggggagcagcacgagctccgggtacaaatcgatcggcgcgaccagcccagctcgccggagccgccgcgccggagtcccgacccgcgcagcgcgcagagtttccggcgagtagcctccatgggctcgcgctcgccaccggcgccatccgaggatgctcctgaagacgagcagacgacgacgcagagcagcaaagagaaacaggggagcggcggtgactctgcctgctgcggcaaggcgccgtcgggctccggccgcttgcaccacatgaggaggtctttctccggcggcggaggccggcgatctctcccctcgcggcatggccgcacttctagctcgatgctgccgttgtga

SEQ ID NO: 13476 - DNA, 1047 bp, Oryza sativa
  Clone ID: TFbOSC900112j.C1.o8.fg
atgtcctcgccgccgtctgatccgagctccggtggtggcgatggcggctcggccgtgccggggacggcgagctccaacttcacgctgctgtacatcatcatcgccgtcctcgtcggcgtgatcctgtacatggcgatccggtacggccggtcggtgatgtcggagtggcgccagctgcaggccggcggcggcggcggcgagccgcgcgccgcgctgctcgggctgagctcggacgacatcgacgcgctccccacgttcacgtaccgggcgcgcggggcggcggcgtcgccgctggtcggcggcggcgggaggaggggcggcggcagcggcaaggggaagggggcgacgacggtggtggtggagtgcgtggtgtgcctgcaggagctcgccgacggcgacgtggtgcgcgtgctgccggcgtgcaggcacttcttccacggcggctgcatcgacctctggctgcgcgcccactccacgtgcccggtgtgccgcgcgcacccggagcccgacggcgtgcggcttagcgacgtcgtggccgtgtcgccgccgctgccgcagctgctccggtgcggcctgttctcttattggcccacggcggcgtcgcgcgccctggcggacatcctggcacgttctccattgaggggcaacaccacctcgacgacgacgaccaccaccaccggcggaccgatcacgtcgacgtcgtcgaagtcgccgtcgtcaccggttcaagcggcgatcatcaactacgtgcaggcctcacgttcgccgtctccgacggcgtaccacagcctgaacgagcggtggccgagctcgccgacgccggttgtggttgtgcggtcgaagtcgccgtcgccgtcgtcgccaccgataggtggtctgagtctgcagacgacgacggcggcggcggcgagaggcgtcggcgtggtggaaggggtggatgcaggtgcaaccacgtcggcgtcggcgtcggcgccaacgcaggtggtggcgctgtcaagggaaggtggtggttcgcggtccaagtcgccgtcgccggtgccacattaa

SEQ ID NO: 13477 - DNA, 963 bp, Oryza sativa
  Clone ID: TFbOSC900058j.C1.o15.fg
atggcggcgggggcgacgctgtcggtgctcctcctcgtcgccggcgtggtgctcatgctcgtgctgcacgtcgtcgtcgtcttctgggcgctgcgccggggcgtgttcctgcgcggcgcgttccgggtggaggagcgccgggaccagcgggccgccggcctgacgcccgacgagatcgccgtgcttccctgccacgagcgcaaggaagacggcggtggcggcggcggcggcgagtgcgcggtgtgcctggaggcgttccaggcgggcgaccggtgccgcgtgctgccgaggtgcgagcacgggttccacgcccggtgcgtcgactcgtggctgcgccagagccgcgtgtgccccatctgccgcgccgaggtggaagtgtccggctacgccggcaagccggccgcggcggtggccgaggcaagtcaggcgaccacgctggagatcgttactgaaagattgggaggcacagaacgcctcgaggtctcaaatgtgtgtgaagtccatccgcttgattcggttgatcgcatgaaaggagacaactccaacgtcttcctcgtcgccggcctctcgctggtggtcgtcgtccatgtcctcgtgctcctatgggcgctgtggtggggatacggccgctcgcgcctcgccctcgcccgcgcccgcgtcgtcgggcagcacgacgtggcgcgcggcggcctctcggcggaacaggtcggcgagctgccgtgccacgtggtcaaggagggtgccggcgagtgcgcggtgtgcctggaggcgttccgggcgggcgaccggcgccgggtgctgccgaggtgcgagcgcggcttccacgcgcagtgcgtcgactcgtggctgcgcgtgagccgcctgtgccccatctgccgcgccgaggtggccgccagccgcggcaaggaaggtgacgcgccggtggccgaggccgcctccttggagatcgtcgccgaacgatag

SEQ ID NO: 13478 - DNA, 728 bp, Oryza sativa
  Clone ID: TFbOSC401250j.C1.o3.np
ggttgtccccggggtcgcatgtgggtcctcgacgcggcgtgttggggtgggaaatggcaatgcgtccgcacacgccggggagaattgtggcatggaagaggggaagtgggtgaaaagctcagatatggcagggtccctgaagagtaaggccatcagctggccaagctctttacaggtttccagtagagacttctgctggtgaaacttgcatgctactttccagtcaggtttactcatttaaaagcgtttcaatggctgatctctctcctgcaccattgcaactggatagtggtagagctgcaggtggacagcagggcttctcacccatcaacacaggaactgaagctgcagatgatgtggctactggccttgaatatgggaaggtatcttcaaccgagctggtacaggcagtccacgatatgctttcagctgcaggggtaaggatggatgctacaaaggaaacgcttctacagactactctttccttgcaagaccagcttaaagaatctcaagtggctctactcgtggagcaggagaaagcggaggcagcagttagagaagctgatgttgccaagtcagcatggtcatgtcgtgtctgcctgaatgcggaggtcaacatgactataataccatgcggtcatgttctttgtaatcgatgctcaagttcggtttcacgatgcccattttgtcggacgcaagtatctaggatgatgaaaatattcaggcct
